United States Patent Application Publication US 2019/0348154 A1 - sequence listing, part 132

SEQ ID NO: 502358 - DNA, 2730 bp, Stenotrophomonas maltophilia
atgaacatgcccgcacccgccgttacccggctggcggtcgcgctcgccctgtcgttggccaatccattggccatggcacggggcgtgcccgccggctttgaagatctggttgaaggccaggtcgaacaactggacattcgtctgttcggccgctcggccggtctttcgccggtgcgggtgaccctggagcacgtgcagctggaagacccggcggcggtgctgcaggtgctggacctgccgaccgaggcgcaggcggcgttgctgcctgcgctgtcagagccgctgccgcgcaacagccatctggcgtgccgttacggcggcgccgcagccggctgcggttacctcgacccgccggaggatccggccgccgtgcgtgcgctgtatgacgaaggcgagggcgcggtgcgcctgttcgtggcgcggcagtggctgccgggcgaaccggccgccaaacgattccatgaggtcagtgcgaatgcagaaaacgcattcctgcaccggcaggtgatcaacgccagtggcagccgcaacgcactcaccgtcagcgcacagggcggcggcgtgctgggcctgttcgagcgcggccacgcggcggccgactggaccttcaaccaccagcgctatcgccgcagcggcacccgtgaccagttccagttcgacaatgcgtattaccgccacgacctgggccagcagcattacctgcaggccgggcgcatggatcgccgcaacctgtccagcccgcagggcggcaccttcagcttcagcatgctgccgctggaccgcttccggggcgtgcgcgccggcaccacccaggcctacgtggacagcgccggcgccgtgcaggcctcgccgctgaccgtgctgctggcacgcgatgcacgggtggatgcattcgacggccagcgtctgctgcagacctactatctgcagggcggcatcaatcagctggatacgcgcagcttcccgttcggcaactacctggtcactctgcgcatctacgaagatggtgtgctggtgcgcagcgaggatgcgccattcgacaaggggggcgactggaccaacacgcgctggcaatggttcgtgcagggcggccagcgcgacgagcgctaccgcgaccgcttcgaaggcgagggcatggcgatggccggcgcgcgggtgccgttgggccgcgatgcggcggtgaccgccggggtcgcccgcctgggcggggtgacctatggcgaactgcgcgtggacctgcgccaggcgtttgcccagcacgatatgcgcgcctcgttcagcggcatgcgcggcagcgatggcagccacggccagcagcaccagctgtcctaccggcgccgcgccgcgtggaatctctaccagcagcgcatgcgcggcaacgcctgccagttccaggacaacgcccgcgaccgccttggctgtgccgattcgctgagcgcctcgatgtccctgccggtggcgggcggcagcgcctacgtggcctacacgcgccggcagacctggcgcagtggccgcggcctgccggggctggacgatgacccgctgggcgcgctggaaccgttgctgccgccgctgctgcccgagccgcggcgacagccgcgcttgagccgcacctggcaggccagctacagccgcacccagcgctggggcgaattcaccgcgtcgacccgcgtgggcgtgtggatgcaacgcagtgatgagctgatggccggtggccgccagcacgatcgcggcgtctacctcaacgtcagcctgagccgcctgcagcgtgggctgcagggcaccgcccagcgccgctacgcggtagacgcgcggcagccgcagcatgcgcgcccggacctgacctacagcgtggcgcagagcgtgcgccaggaagccgacagccactaccgtgaggccaccgccgagctgcgcggcagcaacgccgatgcgtacagtgcctcgctcagcggccagctgcagaaccgcatcggccagaccagtgccgcgctggcgcgctaccagcagtccggccgcgatgaactgtcctggagcgccacccacagttccggctttgcgctgggcccgcgcggtttctactggggcggtggccccggcgccgaggccggcatcgcggtgcaggtgcaggacaccgacgaccacgaactgcgtggcgtcgccgccgaagtgcatctgggcggtctgcatcggcagcgcctgcagctgggcgagcgccgcctgctgccgatgccggcctaccagtcgcagcgcgccgaagtacaggacgccagcgccctggacagcagcgcctcggtgcgggtgagcgggctgggcggtgcgcgcccgctgtacctgccaccgggccggctgctgcgcatgccggtgccgatcgaggtgacctacaccttcatcggcaatgcccgcgacctggccggtgcgccgctgggcggcgcccgcatcctcaacgcaccggtgcccggcaccggccgcaacggcggcttcgtggccgaattcccgcgccgcgaacgcacgctctacctgctgcaggacgaacgcctgctgcagtgcccactgcaggtacgcgaacgccgcaacgtggtgctgctggtgggcgcggtgcagtgcgaaccgctgtcggtcgcgcagctgccggccgagatccgccagcaggcgcgggtgacccgcctgctgcaggagcaggcattgattgccggcacaccccagaccgctgccgcaggaggcgcgccatga

SEQ ID NO: 502359 - DNA, 1134 bp, Stenotrophomonas maltophilia
atgaagtaccgggacctctggaaatggatgctcgcctgcgcgctcgcggccgtgctgccgagggccgcggcgcagcagccgcccgaaacccacccgtccagcgcacaccaggacatcgtgatgagctgggaccgctcggcgatacccgcggaaatcgtgctgtgggcgccgaagacgctgctggcctattcggcggctgatccggatgcctatggcacggcgcatctggtgtgcagatcggagacggatgcttcggaggggcggtgcccggttgttgggtgggaggagcaagccggaagtggcggcgatgtctggctgggagctacggaaagccgctccggtcttcgaactgcaattcgcgtcgcgggcggcattcatcggccgcacagcgggcagacgtgcttctcgggctattggtcacaccagatgtttgctccatggtcttcgcgactggaaagatgtggcgtccaccaatcagcgggaatcggagcccaactttcaatacccgcttccgagctggagcgacttgtcgctggaaagtggtctgcacagctgacgctcgagatgccagcccaggccggtggtcccagcctcgccacgtacaccttcaacctcgacttcaccatcaccgaccacgacgcggtcgcgatctacttcccgctgttcaaccacgtcaccccgcatgtcggcctgaacctgcgctacgaccccatcgcgaagatgatcggcgggcgcaacgaactggacatgtgcctgtacgacggccagggctcgcaggccgcgtacctgggggtgaccgtgcgtgacagcagtgggcgcgcgccaggcggcagcggctactcggcatggcatgtcgacggcggcaacgacgacagccagcgtctggactacacggtcaccctcgaccacaacggcacaccggtgccactacgcaatggcgttgaagagcagctgcacggcatcgacagcgcgcggttgcgcctggtgctgctgcccggcatgaaccagccggtgttctgcgtgcccaccccgctcacctttgaaaccccacgcgtgcccgttgccgaaaaacgcaacggccgctacgacggcgcgctgcaggtcgagctgcgcgtccctaccgcaaccccgtga

SEQ ID NO: 502360 - DNA, 705 bp, Stenotrophomonas maltophilia
atgaaacccgtcatccgttgcctgttgccgctgtcgctcctgctggcctcgcaggcgcaggccaatctcaccatccacccgatgcgcacctcggtggatggcaagcgtcccacgcagatccgtgtgtattcgcagtccacacagccgcagtacgtgcaggtgtcgctgcgccgcatcgtcaacccggccgaggaaaccgaacacgaagtggagcttgacccggaagaggcggccatcgcggtcacgccggccaagttcgcgctggccggcggcggcaaccggctcatccgtatcgtgccgttgcgccccccggcactggaaaccgcctaccgcgtgtacttcgaaggtgtcggcggccccgagggggcggacatggccgacggcgagggtgccgacgcccaggtcggcgtcagcctggtctggggcgcgctggtcaatgtcttgccggcggagtcgcgcgtcgagctgcgggtggacagcggcacgctgctgaacctgggcacggcgcgcgtcggcatcaccagcgtggcggactgcgtaggcagccgatgcaccgcccatgacatctcacgggcgctctacccgggcggcgtcctcaacctgcccttcgacgtgcgaccggggcacacggtgcagctgcgctaccggctgacccgcgatggccatcgcgagcacgtgcagaccctcatcccggctgccatctga

SEQ ID NO: 502361 - DNA, 4611 bp, Stenotrophomonas maltophilia
gtgaaaagcgcaggaacatcgcgtcgtcttggccccggcctgtcctcgctcgcccgctcaccgctgatgatcgcgcttctgctggcactaccttcggcatgggctggcacgcccgatgccgacgaaccgcatgaagacaccgaagcactgtctttccaggtgcagtcccaggcgctgtgggccgcgttcggaccggcctctgcgccgcatgttctcggcggcatgacatcgatcagtgcattgctcgcaccgaccccgtacgggcagctgaccttgaccaccgatacgtcctaccgcgactccaccctggacggcaatcatctggtcgtcgtcggctcgcgatcctcgctgcgtggctccacatcggtcggctacggcaatctcatcgactccaatggcgaacgcaacgtcgcggtcggctacaacgtcaaggtccgccgcggctacagcacagccatcggcggtgacgcctactccgatggcgtcggcacggtcgcgctgggtcatttcgcccgcgcctattcggaaaattccatcgccatcggcagtggctccgctacggtcaacagcagcgccggtgaatcacggatcgccatcggcggcaacgcttatgcaggcagcgcaggctataccggagccgttgcactgggaggcgagagccgagccgaatatgacgccatcgccatcggcatgggaagcaaggccagagcggtgggggcactctccatcggccgattctcgcaggcatccggcgatggcagcctggcgattggcaaagacagcctcagcacagccaggcaggggattgccgtcgggcagggcgcgaatgcatccaataccggctcggtcgccctgggagcgaactcgacgacgtccgcatccaaccagatttccgtcggcagcagctcactcaagcggaagatcgtgaacgtcgcagatgcgacgctgggcacgtccagcagcgaggctgtcaccggcaagcagctgtacgccaccaaccagacgttggccgccaccaccagcaccgccaatgcagcaaagtccaccgccgacaatgcgctgtccaaggccaacaccctgagcggcctgctcagccagaccagcagcagcggcaatgtgcgcctgggggccgccaacagcggcagcgtgctggacgtgcgcaacagcgccaatggcagccgccgcatctccggcgttgccgatggcgcgctcagtacctccagcaccgaagcggtgagcggcaagcagctgtacgccaccaaccagaacttggccaccaccaccagcaccgccaatgcagcaaagtccaccgccgacagtgcgttgtccagggccaacaccctgacgggcctgctcagccagaccagcggcagcggcaacgtgcgcctgggtgcggccaacagcggcaccgtgctggatgtgcgcaacagcgcgaacggcagccgccgcatctccggcgtagccgacggcacgctcagtagctccagcaccgatgcggtgagcggcaggcagctgcatgccaccaacagcaatgtcacacgggccgcagccgatgccagtaccgccatgcagatcggtgcacatctggcaggtttgattggccaatcgggtgctgctggaaacgtccgcctgggaggcagcaacagcggctccgtcgtcgatgtgcgcaacagcggcaatgcagaccgcctgctgtcgggcgtcgcggcaggatcgatcagcgctgccagtgcagaggcggtgaatggacgccagctctacgccaccaaccagaacgtggccaaggctaccaccaccgccaatgccgcgcacaccaccgcaaacacggcacacgccacggccaacactgcgctggtgaaggtgaatgtgctcgacacgctgctcagccaggccagcagcaccggcgacgtacggctgggtgcaggcaacagcggaactgttctggatatcggcaaccgcacgggtgccgcgcgacgcatcaccaatgtcgccaatggacgactgagtgccagcagtgccgatgccgtatccggccagcagctgcatgcgaccaatgaacttgccagggcccagggcgcgcgtctggatgggcagggtgatctgattgcggacaaccgcaatgagctggagcggttgcgcgacgccttcgaggacttcgatccggacctggagggcgtggtgaagttcagcgccgaccgcagccatgtggacatggatggcgcgctggtcaccggcgtgggcgcgggcgatatcgactcggccaccagcaccgatgcagtgaatggcgggcagctgtttgccaccaatcaacgcatcggccacatggaatcggtggggcggttgatggccattggcgatgaggcggggagtgtggccgccggtgccggcatctatggcgtggcactcggcaacggggcaagtgcttcgccaacgtccgagggcggaaccgcggtgggtgcgtactcggttgcgctggggatgaactcggttgctgtggggcgaggagcctacgtgtcggaatttgcagcggatgcgttcgcgctaggggcgagcgcacgcgttgatgctgtcggtggcttggcaatcggcaacaactcggctgttgaaagcggtgtcggtaactcagtggcattgggtcagtactcaatcgctgatcaaaaggacaccgtgtccataggacacgcatcgctgcaacgtcggctgacaaatctcgcccgtggcaccgctgcgcacgacgcagtcgccatcgatcagctttcggacagcctggccgcgctcggcggcggtgccggtctcgattcgaagggcagcatcattcgcccgagctacaccatgcaggggagttctcagagcacggtcggcgaggcgctggacgtcctcgacggcgcggtggtcacgcaggcggaaaagaccgggcgcttggagcggcagctgggcgccatgttccaggacggcatcgcggtgcgtgccgacggcatcggacagctgaacctggccggcgtcaatggcatggtgctgtccaacctggcggacgggcggattgccgccggcagccgcgacgccgtcaccggcagccagctgttcgatgccaaggcggatatcgcacgcaatcgcgatgaactggatcggctccaggccgagcgcgatagcgcctcggcatcgctggccgcagccgcgttcgacgctggaaatcccatcgactatggcggtgcgacgctgaccggtgtcagcgacggtcggcttgcggaaggcagcagcgacgtggtcaacggcggccagctccatgccagcaatgagcgcattgcgcggatggagtcagtgcggcagctgatcgccttcggcgacgaggcgggacgtattgacccaacggccggtatctacggcgtggcgctgggcaatggcgcgactgcttcgccgaactcggaagggggaaccgccgtgggcgcctactcgtttgcgctgggaatgaattctgttgctctggggcgcggttcctccgtttcggaagcctcgacggatggaatcgcaatagggctaggcgctcgtgttaatgcggtaggtggcttggctattggcaagtactcattgatagaaagtggggcagataatgcggtggcgttggggcgatcttccatcgccacggaaaaagacactgtttctctaggcaatgtatccctgcagcgccggctcaccaacgtcgcccgcggccggtcgcagacagacgccaccaccgtgtcgcagctcaacgacacgctggctgcactgggcggcggtgcccacgtcgatgccaacggcaacatcatccgtcccacctacgcagtccagggcagcacgcagggctcgatcggtgacgctctcaccgcgctcgacacggcggtggttacgcagtccgaaaagaccgagcgcgtggagcggcagctgggcgccatgttccaggacggcgccacggtgcgcgccgatggcatcgggcagctgaatctggccggggccaacggcatggtgctcggcaacgtggccaacggcctggtggcggccggcagccgcgatgcggtgaatggcggccagctgcacgcgatgcaggatcagctcaacacccgtatcgacggtgtcgaaaagcggattgacgaacagccgcagcccggcctgcgcactgcttcggcatcgggcgacacgccacagcctgcgtccgcaggcgacggcgacggcgcgatcgccgctgcgcggcccaaggccgaagctcccgcaccggacgcaccgaccccgcaggtcgataccgccgaactggagaggatgctggcccgcgccaacgactacagcgatggcatctcgcgcgaggtggatcggcgcctggaaaagatggacaagcgcttcaaccgcatggcagccatgaccagcgcgcagagcgcgatggcgatgaacaccgccggcctcaacacctacaaccggctgggcgcgggcgcgggcgtgggctacagcgacggcgaatcggccatggcggtgggctaccagcgcgtgctcaaccaaaagggctcagccaccttcagcctcaacggcgcgttcaccaacagcggcgaacgcagcatgggcgtgggtgtgggcatcggctggtga

SEQ ID NO: 502362 - DNA, 534 bp, Stenotrophomonas maltophilia
atgcgcgcgcagaccgtacgtggtgcgatggtgctggccgtgctgctgatggccggttgtggccgtggcgtgaccagcacgcccggcgacgcaccgaaccttgaaaagtgggtggaaggcgagcgtgcgcgaccggcgcaaccgctggagccgctgccggtgatgcagcagttcgagaccttcgaatactccgcgcagggcatgcgcgatccgttcaccgatgcctggaccaatccgcagcaggggaatggcggattgcggccggacccgaaccgacgcaaggagccgctggaaggcttcccgctggatgcgctggacatggtcggtaccatcggtaccggcgcaggtaccgtggcgctggtgatggggccggacaaggtcacctaccgggttcgcccgggcggttacctggggcagagcgacgggcgggtcacggcggtcttcgaagaccgcgtggagctgatcgaactggtgccggacggcgcgggtggctggctggaacggccggcaacgctctcgctcgaagatcaatga

SEQ ID NO: 502363 - DNA, 786 bp, Stenotrophomonas maltophilia
gtgaacccatccatgggggcttggccgcggcatccatgccgcggacaccccgcactgcccacccacccggccgctggcagattccgtgttcgtcacccacggaaaagaaaaagaagatcaagagcaaaagcagcttggccgccgcttcattgcttcccccgcgatccgctcttgatcttctttttcttttccgtgggtggcagacctccgaaatctgtcagaggacggtcgggttgggtacgcgggggtgtccgcggcatggatgccgcggccaagcctccatggacggattcacggcgtcccccgcgtacccaacccgaccggcccccgcggcttctgcttcccgcgaccacccagactccacccacgaggggctgcgccgttggctggaaactctctgacgttgcgcagtgcctgttgtggaagcgttctcacaacaatgcgaagcaatacacccaccgaccaaagtccgcaaaaagcgttagctggttcacacttttacaccgcgttgatcttgatcaatggacttgtcgtaatcggcctgcacaatggcggcccgttcggcacggcgcgccgtcaatcgttgcagcgcgagggggcgtcgggcgggaagcagtactgatccaacgggtacagggagcgcggggtactgccactggggagcggcagccgcgcaggtaccgaccggatccggtcgccggttgcgtctgcggggatggggacgcaaccggcaacctctcactgaatggggaagcccgatcacgacgtcttcacatttcccgctga

SEQ ID NO: 502364 - DNA, 702 bp, Stenotrophomonas maltophilia
atgaagcatgcggtcgtcctgcaacacattgcctttgaagacctcggtaccttgcagcctctgcttctggcgcagggctggcagctgcaggtgctgcaggccggtatcgacacgctcgacgcggccgaggccgccgacctgctggtggtgctggggggaccgatcagcgtcaacgacgttgatctctatccctttctcaacgacagcatcgcgctgttgcaacgccggctgcagcagcagcgacccacgctgggcatctgcctcggcgcgcagctgatggcacgtgcgctcggtgccgacgtcaccgccacgggcggcaaggagatcggctttgcgccgctgctgctcaccgatgacggccagcgctcgccgctgcaggccctgcagggtatcccggtgttgcattggcatggcgaggcgttcgaactcccggccggtgcacgtcgcctggccagcacgccggcctgccgccaccaggcgttcgccatcggcaaccacgcgctggcactgcaatgccatcccgagctggacgcacgccagttcgaacgctggctgatcggccacaccctggaactggcccaggccggcatccgtcccatcgacctgcgcgcgcagtcgcgtcgctatggtgcgccactggcggcggccgccaccgcgatgttcgaccattggctgcaggacctgccggagcaaccgcgatga

SEQ ID NO: 502365 - DNA, 1911 bp, Stenotrophomonas maltophilia
atgcgtgtgcgtgccgtcgctgtagccattgccctttgcctgtccagcactgtgctggccaccaataccccgccgatgaccccggacatcagcggcaagcccttcgttgcccccgatgtcggtcgtgactacgacaagcgcgtggtgatggtgccgatgcgtgatggcaccaggctgtatacggtgatcgtggtgcccaagggcgcccacaatgcgccgatcctgctgacccgcaccccctacgatgccgccggccgcgccagccgcagcgattcgccgcgcatgcgcgacctgctgccgcagggcgacgaggtgttcgtcgacggcggttacatccgcgtgttccaggacatccgcggcaagtacggctccgaaggcgattacgtgatgacccggccgctgcgcgggccgttgaacaacaccaaggtggaccacgccaccgacgcctgggacaccatcgactggctggtcaagaacgtgccggagagcaatggcaaggtcggcatgctcggctcgtcgtacgagggcttcaccgtggtgatggcgctgaccgacccgcacccggcactgaaggtggccgcaccgcagagcccgatggtcgatggctggatgggtgacgactggctcaactacggtgcgttccggcaggtcaatttcaactatttcgcaatgcagaccgagaagcgcggcaagggcacgccgctgcccagcctgggctacgacgactacagcactttcctgcgcctcggttcggccggcgactacgcgcgtttcaccggcgtggaccagctgacttggtggaagaagctggttgagcatccggcctatgacggcttctggcagggccaggcgctggacgcggtgatggcgaagacgccgctgaaggtacctaccctgtggctgcagggcctgtgggaccaggaggacatgtggggcgccaaccacgcctaccaggcgatggaagggcgcgacagcggcaacaaccgcaattacctggtgatgggcccgtggcggcacagccaggtgaactacagcggcagcgaactgggcgcgctgaagttcgatggcgataccgcgctgcagttccgtcgcgatgtgctcaagccgttcttcgaccagtacctggtggatggtgcaccgaaggccgacacgccgccggtgctgatctacaacaccggcgaaaaccactgggaccgcctgaaagggtggccgcgcagctgcgacaagggctgtgccgccagcagcaagccgctctatctgcgtgccagcggcaagctggcgttccaggcgccagcggcgggcgagggcgacttcgaggagtacgtgtccgacccggccaagccggtgccgttcgtgccgcgcccgatccgcttcggcgaccgcgacatgtggaccacctggctggtcaaggaccagcgctttgtcgatggccgcccggacgtgttgaccttcatcaccgaaccgctgacggcgccgctgcgcatcggcggcgcgccggtggttcacctgcaggcctcgaccagcggcaccgacagcgactgggtggtgaagctgatcgatgtgtatccggaccaggaagcgtcgacgccggagatgggtggctacgagctgccggtgtcgctggcgatcttccgcggccgttaccgcgaaagcttcagcgatccgaagccgctggcggcgaaccaggtgctgccgtaccgcttcgatctgcccaacgccaaccacaccttccagaaggggcaccgggtgatggtgcaggtgcagtccagcctgttcccgctgtatgaccgcaatccgcagacctacgtgcccaacatctacctggccaagccaggcgattaccagaaggccacgcagcgggtctggcacagcgcggcgcaggccagctacatcgatctgccggtgtattga

SEQ ID NO: 502366 - DNA, 1659 bp, Stenotrophomonas maltophilia
atgcagccctggcaacacctgtacgaccccgccggcaacctgtggttgtccagcctgatcgcgctgctgccgatcgcgttcttcttcgttgccctggccgtgctgcgcatgaagggctggctggccggcacgatcaccgtggccatcgcgctcggcgtggccctgctgttctaccggatgccgttgccccaggcgctgggtgcggccggcttcggcttcgtctacggcctgtggccgatcgcctggatcatcatcggcgcggtgttcctctacaaggtctcggtcaagaccgggcagttcgacatcatccgcgcttcgatcctgtcggtgaccgaagaccagcgcctgcagatgctgatggtcggcttcgcgttcggtgccttcctggaaggggcggccggtttcggtgcgccggtggcgatcaccgcagcattgctggtcgggctgggcttcaagcccctgtacgccgccggcctgtgcctgatcgtcaataccgcgccggtggcgttcggcgcgatgggcatcccgatcatcgtggccgggcaggtgaccggcctggatgcattcgagatcggccagatggccggccgccagctgccgttcctgaccgtcatcgtgctgttctggatcatggcgatcatggatggctggcgtggcatcaaggaaacctggccggcggtgctggtggccggcggctcgttcgccctcgcgcagtacctgacctcgaacttcatcggcccggagctgccggacatcaccgcgtcgctggcgtcactggtgtgcctgaccctgttcctgcgccgctggaagccggtacggatcttccgcttcgataccgaaaccagcgccgaggcggctgcacaggcactggaggcaccgcgctacagcgtcggccagattgccaaggcgtggtcgccgttcctgatcctcaccgcgatggtcacgttgtggagcatcaagccgttcaagtcgctgttcgcggcgggcggcccgctggaaagctgggtgctgaagctcccggtgccgggcctggaccagagggtgcagaagatgccgccgatcgtggacgcgccgctcagctatgaggcggtctacaaattcgactggttctcggccaccggcacctcgatcatcctggccgcggtgatcgcgatcatcgcgctgcgcatgccggcccgatcggcgctgaagaccttcggtgaaaccatgcgtgagctgcgcatgccgatctactcaatcggcatggtgctggccttcgccttcatcgccaactattcgggcctgtcggcgacgctggcactggcattggcgcacaccggcgacgccttcccgttcttctcaccgttcctgggctggctgggcgtgttcctgaccggttcggatacctcgtccaatgcgctgttctcggcactgcaggccaccaccgcgcagcagatcggcgtgtccgacgtgctgctggtggcggccaataccaccggcggggtcaccggcaagatgatctcgccgcagtcgatcgccatcgcctgtgcggcggtcggcctggccggcaaggagtcggacctgttccgcttcaccgtcaggcacagcctggtcttcaccacgatggtcggcctgatcaccctggcccaggcctactggctgacctggatgattccctga

SEQ ID NO: 502367 - DNA, 609 bp, Stenotrophomonas maltophilia
atgcagagtgcggatcagatatggacttccatcaaggcgtcgcttcacgagaagggttgtctggatgaagtgcagttgcggccgggagcctccgaaagcgagttggttgaactggaagctcagcttggagtcgctttgccagatatgctaaggcagctgctgatgattcacgacgggcaggatggggccgggcttctgttcggcagtcagatgctctcgtccatggaggtcagacggcagtggcaggggtggcgtgagatcgaggccgccggcatgaacgaggactgcgcggagttcatggagtcgagtcccgcgggggtggtgaagccgatgtacaccaatgcacgttggataccgctgacccacgatggtggtggtaatcacatgggattggatttcgatcccgacagtgacggtgccgaagggcagatgattacctttggtgcggatgaagacaccaagtaccttctcgctcccactttcgctgaattcgctgaaaaggctgtggagtggatcagtcaagcaagctggaatggtgagaatcttgagtcgccaactgatgacggcttcgctcccccggcagttctccggactgttggcgggtcgtag

SEQ ID NO: 502368 - DNA, 1839 bp, Stenotrophomonas maltophilia
atgtgtggaatcgtgggtgcaatcgccgatcgcgacgtggtgccggtactgatcgaaggcctgaagcggctggagtaccgtggctatgactcctcgggtatcgcggtgatcgaccacgccgagcgccccgaggtacggcgtgtgcgccgtaccggccgcgtatcggaaatggcgacggcggctgaagccgaaggcttccatgcggtgctgggcatcggccacacccgctgggccacccatggtggcgtcaccgaggccaacgcgcatccgcacatcagccacggcgtggcgctggtgcacaacggcatcatcgagaaccacgaagagcagcgcgagaagctgcgtgcgctgggctacaccttcgagtcgcagaccgacaccgaagtcatcgcgcacctgatccaccatcacctgaagggcggcgatgacctgctggtggcgctgcagcacacggtgaaggagctgaccggcgcctacgcgctggccgtggtcagccgtgccgagccggagcgcttcgtctgcgcgcgcatgggctgcccgctgctggtgggcctgggcgagggcgagaacttcgtcgcctccgacgtctcggcggtgatctcggccacccgcaaggtgatcttcctggaagagggcgacaccgccgagatccgtcgcgatggcgtgcgcatcttcgatgagcatgaccggccggtcgagcgcgatgtgcacctgtccgacgtgtcgctggcatcgctggagctgggcccgtaccgccacttcatgcagaaggaaatccacgagcagccgcgcgcactgggcgacaccatcgaggcggcgatcgacgccggtggtttcccggccgtgctgttcggcaagaacgccgaagcggtgctgtcgggcatcgagggcgtgcagatcattgcctgcggcaccagctactacgccggcctgaccgcgcgctactggatcgaggccatcgccggcctgccgtgcagcgtggagatcgccagcgagtaccgttatcgcgcggcctatgccaacccgaagcacctgatcgtcaccatctcccagtcgggcgaaacgctggatacgatggaggcactgaagtacgccaagtcgctcggccacacgcacacgctgtcgatctgcaacgtgccggaaagcgcgatcccgcgcgccagcgaactggtgtgctacacccgcgccggcgccgagatcggcgtggcctcgaccaaggccttcaccacccagctggccgcgctgttccagctgaccgtggtgctgggcaagctgcatggccgcatcgacgcggcgcaggaagcggattacctggagcagttgcgcttcctgccgggcagcgtgcagcacgcactgaacctggagccgcagatcgcggcgtgggccgagcgcttcgcgcgcaagtccaatgcgctgttcctgggccgtggcctgcattacccgatcgcgctggaaggctcgctcaagctcaaggagatttcctatatccatgccgaggcctacccggcaggtgaactgaagcacggcccgctggcgctggtggacgaggacatgccggtggtggtgatcgcgcccaacgacagcctgctggagaaggtgaagtcgaacatgcaggaagtgcgcgcccgtggtggcgagctgttcgtgttcgccgaccaggacagcaatttcagcgagtccgaaggcgtgcatgtcatccgcaccccgcgccatgccggcgtactcagcccgatcgtgcacaccattccggtgcagctgctggcgtaccacaccgcgctggcgcgcggcaccgacgtggacaagccgcgcaacctggccaagagcgtcacggtggagtaa

SEQ ID NO: 502369 - DNA, 402 bp, Stenotrophomonas maltophilia
atgagcacctcgcgatacccgtacctgttcgccaccctgggcgaggccgccaacaccctgcccgatgaacttgcccagccgctggaaatcacccttgccgcccagcagaccgatgatggcatcaccctcctaggtagcctgcggcgcttccgccaggtagacgctgccgatggccagcccttgcagcgcaacgggcgcaccgcggggcagtgcatggcgctggcgcgcatcaaccgggcaaacgccgggctgaccgtgctgctggaactgctgcacgccagcgagcgcgtccgcgtggatggcgacgaagggcagcagatcggcaacgacgtgcgcgaaggcctcctgctggcctgccgcgggttgtccgaatatgtggatgtgcaggtgcatgcggcctga

SEQ ID NO: 502370 - DNA, 252 bp, Stenotrophomonas maltophilia
atgccgcgcgtgggtgcggaatggaaaattatggtcacactgcgcgtcgcccacctcggccaaggcacatgcagtccgcagaagtatacgacgatggcgcgcagcgcgagacctgcattcccgccggcgcgggggcgcaggctggcggtggcaagtggctacggcgcgcagagctatgcgctggggttggagatcgcgctggaacacctgaggctggccgaagacagcgaccgcttccacgtgggcacctga

SEQ ID NO: 502371 - DNA, 741 bp, Stenotrophomonas maltophilia
atgatcaggtgcctgcagatgcgcttacgcaatgcagaagtccgtcgacgctgtaccggcgcggtgctcgtgccagtgcggaagtcgcgtgatgaggaagtgtcgcgcgccgcattcgagcgggagaaggccgatcgcgactacatgatgccgcgaatccgggtcattgatggtctcttctcctcacgtgagtgtcgagaaatcctggacatcgcggagaataagtgggaagtgagcagagtcaacggcggtccggatgcttctgtctccaggcagcggaccagctactcggcgatgttcgacaggtccgaccatctgcgcatcgcgcccaagatccgcgagaagttgagtgcctatgtgtccggcatcgaagtggaggacatagaagctctgcaatgcgtgagttatcaggtcggtcaggagtacaagccgcacctcgatgtctccttcgaggttgacgctgcctcggaccatcggtggtggaccgcgctgctgtacctgaatgacggttacaagggcggcgaaacatacttcccaatcatcgatcgtaggatcgagccggttgcggggcgagtcttgctctttcccaaccgacggctcgacggggcgccgctcgtcagttctctccacacgggcttgccagtgctggatgggcgcaagtacgcatgcaacatctggatggcaagaccatcggtgacaacggtgcctggcgatggcttggcgaatcaaatgacatactaa

SEQ ID NO: 502372 - DNA, 615 bp, Stenotrophomonas maltophilia
atgaccaaggaagtatcggccgtccacgatagtgagagggcggactgtattcacttgataaaatccgtcatatccgcagagctagtggacacgtactacacctatgcaagacagcacttgatgctgcctggctacttcaggatggagcctgaatacctttccatgtcccgttacgcggatggactgggcgaggcgctgctggagcgattgaccccaaggatcggcgaggccctgggccgcgatgtgcttccctcctactcttttcttagattctatactcacggatcggtgctatcccgccacatcgatcggccggcctgcgagatcactgcgacgttggcactgggtcctcgtaccgagagcccatggccaattcacgtgcttgacagtgggagggagaagacgacgctattgtcgcccggcgacattttggtcttcaggggggcaagactgcctcattggcgagacgcgtttccgggcgaacactgtctacagctcttcctgcactatgttttcaaggatggtgaattcgcagattacaagaacgacaaacgggcgtatgttgggccattgtcgacgatgatggtgaccaatgaagcagaagtcagcgaatag

SEQ ID NO: 502373 - DNA, 1257 bp, Stenotrophomonas maltophilia
atgctgataatgctggtcagcacactcgccataggaatctccgcttgcaccactgcggcggttctatactttgccttgaatgccgagtccattcgcggagtatccaacgaccttcatgtcgttacgatggatgcgcgcagtgttccggatcccaagaaccctgattacgacaagccgttgagctatatgggcttggacgatgcaaaggaacttctgcgatcgggtgcgcaagggaagatgctgggcgtggcccagagcgtccagctgatctccgaaaacggagctggtgacaccgaactcatgtctgggcttctggtgctgggtcgcaacccagagctattggggttcgatgtgaccgatggtcgtgcctggaccagcgccgagctcgacgccagggcacccgtcgcgctgattgatcgggatgttgctcagaagttctatggtggtgtgcaggcgttaggtaagaacatcaggatcggcgagggtgtgttccgggtcatcggcatctattcgacatggaagcctcgcacgcagttcctggacatctcccggaacccgatcagggtcgcgggagcgaccgaatccttccttgttcccgtcgacgccgccttggagcgggatgtgggtcctttcaatagcggaagatgccacaagcagtttgataccaccttccagacggtcacattggtcggttgtcggtggatcgaagtgtgggctgacctgggttcagccgtagaggtgggccaatacaaggacctgctggccaattttgcgcgccacgcgcgcgagagcgggcgatttgcatatgacccgcagccgcgcttgttcagctccgtagagtggatggacgagaacggagtgatccctagctatgtcgctgcgaccgcagcgcttacggtggggttccttgcgctgagtgttgccaatgcagttggcatgatgcttgcccgattcaaccggagaagaatggacttcggagttcgcaggactttgggggctagcaagcggagcatctttgcccaggcgatcgttgaaagtggcctgattggccttatcggcggcgccatctcacttccactgacagtggcgggtattgccctgatccgcatgcagcagattgactttgcgccgctggtatctctccatccagtcgaggtcctctgggtatcgctggcggctgttctgatcgggatcctgatcggaattattcctgcttggcgtgtttgccaggttgctccgtcactggcggtcaagtag

SEQ ID NO: 502374 - DNA, 1107 bp, Stenotrophomonas maltophilia
atgctggtggacgatggtgttcgatcgcccaatgaactcctcatcgcatgggatatcactccgcggggaaaaccatggccgacctccagaatcaaggaaatggaatcaagactggcgaacattccaggggtgacaagcgtttccgcggcgtcgtccttgcccttcaaattcggtgcatcggtgcaggccgaggtcgcggtggaccaaagcggccccaagcacgatgcgaccatctacatcggtgacgacctgattagtacgcttggtctcgagcttgtggatggcagagacttcgtgccggaggaggccggtcttcagttgcctggcgttggattcggtcaaactggctctgtgatcgtttcccaaaagttggcagacgcgatctatcctggtgggcgtgcactcggaagcacagtggatattgtggatgcgcctgcacctcgcaccatcgtcggcattgtgaagagcatgccgtcgaatgacctggaaacgcaggctgcgggcgcgctcggtaacaccatgatctttccaggtgttgcgggcggttggcgacatacggtgtatgcagtgcgtgccagcggctcaaccggtgtcacagagggcgtgtgcgcgcgagtgctcgctgagatctccgacacgtttcggtctgacctcgcggtgggtatcgttccacagtgcttgacttactcagaaatgaagcgcgaggcgatgaagggtcaccgcgcgatcatctggcttctttcgggtatcaccatgctcgtgctggtgatggctgtgatcggagtgggcggcttgacgtcgtattgggtgcagtcgcgaacagttcatataggaatccgtcgcgcgcttggagcgacccgaggagatgtgcttcgaggggtgcttgctgagagcactgttctggtgcttatgggactgggcagtggcttggtattaaacacgatatttagcggatggataacacggcatctcgacattgatccaacgcccattgcttatgtagccatcagctcgatcttcatgttcgccgtttgccagatggcagcattcaaggcggcgctgtgggcatcacgggtttcacccatggtagcgttgcggtcggtctag

SEQ ID NO: 502375 - DNA, 597 bp, Stenotrophomonas maltophilia
gtgctggcctactgtggccagcgcatccgcgtggactggtccagcgcgcacccggccagcacggcagcgtttcccgccaatgggctgaagcttcacctgctgaatgtaccgtccaccgaccaggcgcaggtggggatgcagatcgacagcgtggaccgcttcggccacagctgcctggatgattcggtggcatcacccatcggcgtgctgctcagttgcgacccctccgatgcacccatctggtgggacttttccaagcggacctggcgcgaacggacgccgcgcccgcactatggggtggtcacgctgcagggcgactcccaaggcaagctgctcggcttcaactacatcgcggccgccgacgcccactacacgcccgaaggattcccgttccagggaaactgcacggccgaaccgggcaccggcccgtaccacgatcaatgctacgtccgcttcaagcgcgggcgcatggcggtcagctacacctatctggccacatcgctgcgcagttggcgcgaggtggacatgctggtgcgcagtacgctggatggccaaccggccaccgagcgttgtgcgttttccttggctgcacagtga

SEQ ID NO: 502376 - DNA, 306 bp, Stenotrophomonas maltophilia
ttgaaaggcacgcgcccgcctgcgcccggccccgacaacgggacaggcagcgagatcaccctgctcgaccccggtgcattcgccgacagcgcccgcctgcagcgcttgctgccacacctgcacaacgcctatgtggaagtgcatgacgatggcgcacagcgcgagacctgcattcccgccggcgctgggcgcaggctggcggtggccagtggctacggcgcgcagagttatgcgctggggctggagatcgcgctggaacacctggggctggccgaagacagcaaccgcttccacgtggggacctga

SEQ ID NO: 502377 - DNA, 894 bp, Stenotrophomonas maltophilia
atgtacggcttccgcgccctgcgcgcctccgcgtcaccccatcttccgaccttcatcggcgccagcgccgtgctgctgtggagcccggtcctgggcatgctgcgaaccatcagcgagatcttcggtgcggtcggtggcgccgcgctggtcttcaccgccgctgcggtgttctcggcgctcatcctgggcgtgccgcgaccctcgcaactgccgcgacgctacctgctgatcggcggtgcgttgttcatcggcaccgagatctcgctgtcgctgtccatcggcctggcccaccaccgtggtcaggcgctggaactggtgatgatcaactacctgtggccgtgcctgacggtgctgctgaccgtgctcacccgcatgcagcgcggcaactggctgctgctgccggccaccgtgctgtgcctgctgggcgtggtgctggtcatcaccggtgaaggcgcatggtcgccggcgatgctgctggccaacctgcgcagcaatccgctggcctatgcgttggcgctggccgcctcgtgcatgtgggccacctattcgctggtgaccaagcggatcggcggttcacgcaactcggtgccattgttcatgatcgccaccgccgcggtgctgtggctgaagtacgcgctgggcgatgcgccgccgctgcacctgcactgggtcgggctggcccaggtggccgtgttcggcctgcttaccgccaccgcctattcgtgctggaaccatggcctgcagcacggcaacgtcacctcgatggcgatcttctcctacttcgccccggtgctgtcggtgctgtggagcagcgtgtggctgtcgctgcacccgggcatgggcttcgcgcagggcgtggcctgcgtgaccgccggctcgctgctgtgctggtga

SEQ ID NO: 502378 - DNA, 2745 bp, Stenotrophomonas maltophilia
atgacgcacaggctgaatctcaaaaagacaccggttaccttgaccgccagcgtgcgggccagtgccgtgctgctggctctggccggcccggctgccgcacaggacaccgccgcggccaaccccaccgaactggatgcggtgacggtgaccggctaccgcgccagcgtggagaaggcgctggacatcaagcgctcggaaaagggcatggtcgatgcggtggtggccgaggacatcgccaacttccccgatctcaacctggccgaatcgctgcagcgcatccccggcgtgaccatcacccgcgacgccggcgaaggccgcaacatctccgtgcgcggcctcggcccggatttcacccgcgtgcgcatcaacggcctggaagcgctgaccaccgttggcggctccgaccagtccggcggcaccaaccgcagccgcggtttcgacttcaacgtgttcgcctcggacctgttctcgcagctgatcgtgcgcaagaccgcctcggccgacgtggaagagggctcgctgggcgccaccgtggacctgcgcaccgcgcgtccgttcgactacgacggctttactttcgcggcgagcgggcagggcagcttcaatgatctttccgagaaggccagcccgcgtgcggccgcgctgatcgccaatacctgggccgatgggcgcttcggtggcctgctgtcggtggcctattccgaacgccgcgtgcgagaggaaggcagtaatacaggccgctggtacagcgccagcagcaatggtggcttcagccccagctcgccgttcaccgccggcctggccgatggcgtgtggcacccgtatttcccgcgttacacgctgctggagcacgaccagaagcgcctgggcgtgaccgcctcgctgcagtggaagccgaccgacaacaccgagttcgcgctggacgcgctgtattcgaagatcgataccgtgcgcagcgagaagtacatcgaggcaatctcgtttgcctactcggcgcagaagcagaacatggtgctgcgcgacggctatatcgaccccacctccggcgcgctgctgtacggcctgttcgacggcgcgggcgtgcgctccgaacagcgccgtgatgaatggagcaccgagttcaagcaggtgtcattgagcggcgagcaccgcttcagcgatgtattcaagctcaatctgctggtcggccactcgaaatccgagcacgccaacccggtgcagaccacgctgatcatggacaaggccaacgtgtccggctacagctacgacttccgcgacagcgtcacccacccgaccttcaactacggcatcgatcccaccgacaccagcggctggaccctggccgaagtgcgcctgcgcccgcagcacgccagcaacagcttcgacaacggtgcgctggatttcacctggaacttcggcccatcgttcaccctgcgtggcggcctgctcgccaaggactataggttcgacaccagtgagtaccgccgacagagcgaaaccgtggtgccggccttcgccgatggcagctacaccgtgccggcggcactggtggacatcgcccgcctgggcggtgtggccggttcgcccgatgcctgggccgtgcccgacctggccgcgttgtcgcagctgctgggcatctacagcgggcagggcatctaccagctgtacgaacgcaacgcgacgcgccgcagcgtggaagaacgcgaccgtggtgcgtggctgatgggcgagttcggcttcggtgtcggcagcgtgccggtgtcgggcaacgtgggcgtgcgccgggtcaagacatcgcagtcttccaccggttattccacggtggatggcgcgatggtgctgacccatgtctcgcgcgactacaccgatacgctgccgtcgctgaacctggtggccgagctgtcaccggacttgatgctgcgcttcggtgcggccaaggtgatggcacgccccggcctgtcctcgctgactccgggcacgacgctgagcctgtccagcggccatcgctacgtcaacggcggcaacccgaacctggacccgatccgcgcacgcacgctggacctgggcgtggagtggtacttccaggaaggcgggctgctcggcctggcgctgttccacaaggacatcgaaagcttcgtgcagggcaccagcacggtcatgccgttcagcgccagcggcctgccggccagcctgctcgatggcaccggggtgtcgcccaatgaagacttcaccttcacccgtccgctgaacacgcccggtggcgacctcaagggtgccgagttcaactacgtgcagcccttcagcttcctgccggggcgctggagcaacgtgggcctgcagctgaattacacctgggtcgattcgcagatccagtacctgacctccaccggtgcggcctcgctgaagaccgacctgaccgggctgtcgaagaattcgtacaacagcacgctgttctacgaaggtgagaagctgggcgcgcgcgtgtcctacacccatcgcgacggctattacacccaggtgccggccagcgtgcagggcttcagtttccacggcatggatgcggtggacacggtggatgcctcgatcagctggaagatcgacgaccatctggaagtcagcctggaaggcatcaacctgaccaatgaaaccagcaacgagtgggtgggcacctcggcctggaaactgccgctgacctacacccagaccggccgtgagttcctgctcggcctgcgctacaagttctga

SEQ ID NO: 502379 - DNA, 960 bp, Stenotrophomonas maltophilia
atgccgcaagcacgcctgttttttctccacctggccggcctgctggtgctggccgcactgcccgccgccgcacgcgactgggtggtggccgccgatggcagcggtgactaccgcagcgtgcaggctgccatcgatgcggtacccgatggcaaccgcacgcgccaggtcatcgtgctgcgcgaagggctgtaccgcggcgtggtgaaagtgccgaaggaaaagacccgggtgacgctgcgcggcgcgggcgccggcgcgtccatcctcagctggaacaactacgccgacctggtcgacccggccaccggcaaggcgatgcgcaccagtggttcggccacggtgtacgtgtatggcgatgagttcatcgccgaagacctgaccatcgagaacaccgccggcaacgtcggccaggcactggcgctgtatgccgcaccgccgcgcggcggcttccgcaacgtgcgcctgctcggcaaccaggacacgctgtacacgcacgaaggcagcgtgctgcacttcaaggactgctacatcgaaggcaccgtggatttcatcttcggtgcggccaccgcgctgttcgatgactgcaccatcgtgtcgaagggcaaactgggctgggtgaccgcagcttccacgccggaaggacaacgcttcggctacgtgttccgtcgcgcgctgctgcgcggcgaaggcgtgggcaccgcctaccttgggcgcccgtggcggccgttcgcgcgcacggtgttcctgcagtccaacctgggcccgcacatcgtgcaggccggctggcacaactgggacaagcccgatgccgaacgtaccacttactacggcgagttcggcagcgtcggtgccggtgcctcaccggaaggacgcgtggcgtggtcgcatcacctgtccggtgacgaggccgcgcagtacaccgccgagacggtgctcggcagctggcggccattcccctga

SEQ ID NO: 502380 - DNA, 2031 bp, Stenotrophomonas maltophilia
gtgaccgttgccaaccccctgctcgatttttccggcctgccgcgcttcgaggcgatccgccccgagcacgtggcgccggcgctggacgtgctgctggccgaggccgaagccgccgtcagcgcggccgagcaggtgcagccggtcacctggcagaccttcgtgaccccgctggacgatgccaccgagcgcctgtggcgcgcctgggggctggtcggtcacctgcagggcgtggtcaacacgcccgaactgcgtgaggcctacaacagcaatctgccgcgggtgacccgcttcgccagtgcgctgggccagaacttggcgctgtatcgccaataccaggcactggccgccagcccggaggcagcacacttcgatgaagcccggcgcaaggtgctggacaacacgctgcgtgacttccggctgggcggtgccgagctggcgccggaggcgcagcagcgtttcgctgcgatcaaggaggaactgtcggcgctgtcggccaagttctcgcagaacgtgctcgacgccaccgatgcatggtcgctgttcatcgaggacgaagcgcggctgcagggcctgccggaagacgtgaaggccgccgcgcgcgctgcggcagagaaggacggcaggaccggctggaaactgaccctgcagatgccgtgctacctgccggtgcagacctgggccgaagaccgcgacctgcgcgagatcctgtaccgcgccagcgcgcagcgtgcgtccgagttcggcgacgaggccctggacaacagtggcaacatcgaccgcattctggccctgcgcgccgaactggccgcgttgctcggtttcgattcgtacggccattactcggtggcgaccaagatggcgcaggacccggccgaagtgcttggcttcctgcgcgacctggccgcgcgtgccaagccgttcgcggcccgcgaccgggccgagctggagcagttcgcacgcgcgcagctgggcatcgacgacctgcaggcctgggacctggcgttcgccgccgaccgcctgaagcaggcgcgttacagctattccgagcaggaagtgaagcagtacttcaccgaaccgaaggtgctgggcggcctgttctcggtgatcgagcagctgtatggcctgcatgtgcaggaggacagcgcgccggtctggcacgaagacgtgcgcttcttccgcctggtcgatgcgcagggcgcgctggtcggccagttctacctggacctgtacgcacgcgagggcaagcgcggtggcgcgtggatggatgactgccgcaaccgtcgcgtgcgcgccgacggcagcgtgcagacgccgctggtctacctggtgtgcaacttcggacgtggcgccagcggcaagccggccaccttcagccacaacgaagtgaccacgctgttccacgagatgggccatggcctgcaccagctgctgacccgcatcggcgagctgggtgtggccgggatcaatggcgtggaatgggatgcagtggaactgcccagccagttcatggagaacttctgctgggaatgggcgcacctgcagggcatgaccgcgcacgtggacacgggcgagccgctgccgcgcgcgctgtatgagcgcatgctggccgcgcgcaacttccacagcggcatggccaccgtgcgccagctggagttcggcctgttcgacatgctgctgcacagccagttcgaaccggcacaggacagcgtgctggccctgctggaccgcgtgcgcgccgaggtggcggtgaaccacccgccggtctggaaccgcttcccgcaccagttcagccacatcttcgccggcggttatgctgccggttactacagctacaagtgggccgaggtgctcagtgccgacgcctatgccgcgttcgaggaagcaccgcaggcagtggccgaaaccggcgcacgcttccgcgatgaaatcctgtcgcggggtggcagccgtccggcagcggagaacttcaaggccttccgtggtcgtgccccgcagatcgacgcgctgctgcgccactcgggcatggcgtag

SEQ ID NO: 502381 - DNA, 1467 bp, Stenotrophomonas maltophilia
atgactgcaacttcccagtggctgccggatgcgctctggtccggcaccttctttgatggccgttggcaggccgccgtgcagcggcagccggtgatcgagccggccaccggccgggcgctcggcgagatcggcctggccgacccggcgcaggtcgcgcgttcggcagccgctgcggcgcaggcccagcaggcctgggccgcggctccctatgagcagcgtgcacaggtgctgcgcaccgccgcgcggctggccgaggagaatgtcgacaccctggtggaatggctggtccgcgaaagcggatcgacccgcctgaaggccggcttcgaggccaaggtgaccgtcaaggcgttgcacgaggccgccgcactgccgtcgcgcagtgtcggcgagatcctgccctccgaacccggccggctgaacctggcgcggcgtcgcccgctgggcgtggtcggcgtcatttcaccgttcaattttccgctgtatctggcgatgcgcgcggtggccccggcgatcgcgctgggcaatgcggtggtgctcaagccggacccgcgcacggcggtatgtggtggcgccgtgattgcccgcctgttcgagcaggccggcttgcccgcgggcgtgctgcacgtgctgccgggtgacggcgccgccggcgccgcactgaccagcgatccgaacgtggcgatgatccagttcaccggctccaccgcggccgggcgcaaggtgggagaagccgcaggccggcacctgaagaaggtttcgctggagctgggcggcaagaattcgctgatcattcttgatgacgccgatctcgagctggcggtggccaatacggcatggggcgtctacctgcaccagggacagatctgcatggccaccggtcgcgtactggtgcacaggaagatccatgatgcgttcctgcagaagctggtggccaaggcggcgtcgctgaaggtgggggatccggcgcgcgaagacgtggcaatcggcccgttgatcaatgccggccagcgcgaccatgccgcgcgcgtggtcgagcaggcggtgcaggccggcgcttcgctggaagccggtggcacgtaccacgatctgtttttcgcaccgaccgtgctcggcaacgtcgacgccggcaatcccgcgttcaacgaagagatcttcgcgccggtcgccgtggtggtgccgttcgacgacgacgaccacgccgtgcagctggcaaacaacagcgagtacgggctgtcgatggccatcgtctccagcgatgtcggtcgcgcgctgaagcttggtgagcgcctgcgcaccggcctgctgcacatcaacgaccagacagtgaacgacgaggtgatcaatcccttcggcggcgtgggtgcgtccggcaacggcaccagcatcggcggcccggccaacggggaagaattcacccagtggcagtggttgaccgtcaagggcgaagcgcccgcctacccgatctga

SEQ ID NO: 502382 - DNA, 207 bp, Stenotrophomonas maltophilia
atgaacaacgacgctgcatcccgtgagatcaccgccgccgttgtgcgcggcaaggaacagcccttcgtcatcgagcaggccacgctgcgtggcgtgcaggatgacgaagtacgggtgaaagtggtggccgccggcctgtgccacaccgacctgatcgtgcgcgaccagtactacccggtgccattgccggctgtgctcggccactaa

SEQ ID NO: 502383 - DNA, 420 bp, Stenotrophomonas maltophilia
gtgcgcagcattgccgccgttgccagatcggagaacgacaaggatgccgcgaagctgatcgcgcgttacgtcagccccgaagcaatcatcatgaccgacgaaagtcccgtctacgcgaccgtttcagcgacacacacccactacgccgtcaggcatagccaagagtacgtttcggtcgagggtgtcaacgagaaccaggccgagtcgttcttcagccggctcagacgctgggagtatggggtttcgcacggcgtgcggccagcttacctggctgactatgcgaacgaaatggcgtggcgcgaggacgttcgacggttctcgatcaggacacaggtcgaaatgctcctagaaaaggccctcaccgtggggcattcgcggtggtggcgcggctactaccagggggaaacggcgcgggactga

SEQ ID NO: 502384 - DNA, 459 bp, Stenotrophomonas maltophilia
atgactaaagcggggcacgtgaaaatttcggttaagctgctccagcgggacggatatccgccggtggagtgggaggatctgtgggctgttccgcaatccgagggcttttgcgtcgatagcgtccctttttacgctcggcttgttagctatggcgatatcgtctctgcatcagagattaatgggtatttggtgtttgatcgtgtgcagactcctggagggcactcgactatacgcgtgatattgtacgtggatgagttggtctctcaggttcggagcgaagttgaaagacttgggtgctccacggagctgagcaacatagaaacgtttttttcgattgatgtgccgccgaatgttgaatattggggggtcattgatttgctggatatgtatgttgagcggggtgttttggactatgaggaatccgcaatccaacatgaagaaagagatggccctagctag

SEQ ID NO: 502385 - DNA, 897 bp, Stenotrophomonas maltophilia
atgaacacacggaagacaaagcaggtacccaagtggctggctgccatcgccatggctgtggtgacgtttgtagggaccgcgacagcacaaacggtcacctatattcacaccgatgccttgggctcgccggtggccgagaccgatgcatccggcaatgtcatcaagcggtacgcctacgagccctatggagccgtcgttggcggggaagtgactgatggaccgggctataccgggcatgtgagtgatgctgcaacgggcttgagctacatgcagcagcgatatatggatccccagctgggtagattcctgtcagtggacccagttgcagcggatgcgaacaaaggagataactttagtcgctataaatacgccaacaacaacccttatcgtttcaccgatcctgacggccggcaagaacgagctgctgagcgcttcagtgatgctttttctagtaatccggaggcattcgagaagtttggccctgctgcggttaccgccactcaggttgcagttaacttaacgccggttgttggtcccgtactcggtgctgcgttccgtcaggtcgcaaaggagcctgttgctgcaagaggcagcgcgggcggccctcgtgccggaaaggattttacagctgctgggaaacgagaggttattcagaaaaatgagcaatcgaatagcggtcaaacgacgtgcgaggggtgctctatcgctacgacccctgctcaacaaagtcagcgtggcgtccctactcccaagaatgaaaccagggtggatcacatcatcccaaaatcgaaaggcggagatggatccccttctaatggacaagttttgtgcagctcctgtaacatcaataaaagcaataaaactgattggatcccccccaaggatcgactgccatga

SEQ ID NO: 502386 - DNA, 1152 bp, Stenotrophomonas maltophilia
gtggcctttgatggctcgggccgcacctatcaagtgaccagcaagcctgcaggcacctatcgctatcgggtcaaagcatgcaatccacagggctgcggcgcctactcggccgaagcagcgattaccgcgctgcatgctccatctgtaaccgtactgtcagtacccgctgcgagctacaacggcagctacgccgtctctgtttcgagcgtggcccaggccagcagctatcgcattgaagaacagttcaacgggggggcatggactgagatcaaccggatcagtgggaatcaactggccattagtggacgaatcgcgggcagttacgcctatcgtgcctttgcatgcaatgacgccgggtgcagcgcgtcaagcgccgtaggcgcgatcgtcgtgacattgccgccggtccaagccaccgggatcaatctcgatggtttgagctacagctcaaccgtgagcatgtggtggggcgcagtccccgccgcgacaagctatcaactgatggaacagctcaatggtggcggcttcagcctggcgcaggaggatggcgcaacttcggtggcccgaggcggccgctggccggggcattgggattaccaggtgcgtggctgcaatgtcgctggatgcggaccgtggtcagcagttgcgggcgtgcgcgtaattggccctccggcgactccgattctacgcgtgccggatggggtgggaatcggcgcggcttactcgatctccctgctggaagtggcggacgcgacgcgctatgaaatcgacgaaagtactgacggcgccaactggacactgattgcgggggatcgggctgtttccctgaataagggcggcggaggcaacttctactaccgtggtcgtgcctgcaatcccgcaggctgcagccccagttctgctgctggcctggttgcgatttccagtgcgccggccgtacctacgggtgtgaggatcgtaaagagcggccccaacatctgctcggtcatctggaatgcgtcgccgggtgccacctactacaacatgcgttcaagcagcggcggcgcgacctatagggcggatggaatcgggtacgacctcaatacacgctgccaggggggctacaaggtgcgtgcctgcaatgcgcaggcgtgctcggcctggtcgaactga

SEQ ID NO: 502387 - DNA, 4248 bp, Stenotrophomonas maltophilia
atgcgaatctggcagtggcaggcgttgttgggcgcggcattggtcatgtcatccgggtggacctgggcgagcagtccggtcacaccgcataccgagtactacaagaggatcaagacgggtgaggggctggcgccgctaacctcgagcctgttcggggacagcatcagcccgagctccggatcaacagaatttgtcgttaccgacattgacctgccaggcaacaacgcgctgccggtgcgattgcagcgtcgtctcgctgtgcagtccttcaaggaccggcagccgttggggggatttggcagctgggacatcgaagtgccttacatgcacgccaccttcgactccatctggaagtggaacgagtcgggtaacggcgctacccagcgttgctcgcagaccttctaccccaagacacgtaccggcgtgggcagcttcgagatatggaccggcgtgcaggtgcgtgtccccgaccagggcgagcaggagatgctgctgatcgccaacgcttccaacccgaaacccaccaatggtgaaacctatcgttggggcactcgaggcaatatgcgtctcagttgcctgggctcgacggccaatggctatcccggtgagggattcctgggcgtggatgcttcggggaatcgctacttcttcaatgtgggcattgaacgaacagcgggtttcatggatctcggccagggcgtaggttccaagctggtgcgcgttctgttgatggccagccgggtcgaagatcgccacggcaactgggtagcctatgactattcgggcgacaagctggttggcattcgcggcagtgatggtcgtgccatctccattgcctatgccggggaccgcattgccagtgcgacagccaatggccgtacctggagctacgagtacaacgaaggttccggtgggatgggatttgcacgctggccctcgctgcgcgccgtccagcagcctgatggcgcgcgcttgggctacgaatacagttggcaggatggtgggttcggtgggctgaatccggagtatcagagctgggacggagagcccaagctctgtaccaagcccatgttcgagcagtctggattcaccctgatcgcgacccacccatcgggaacgcgcgggcagtttgacttcaagtacctgcgccgcacccgcctgggtgtaagaagtacggcttgcgcggacatgggcggtgggcgctacgcgcaacgcgcctccaatgcgttcgacctcttcgcgatcaccagcaagacgctgacggggcccgggttgggcaatctgacctggacgtacgagtcgggcggatatgactcgggcctggccaactccgcagtgtcgacgatcgtggagcctgatggtacgcgccgtcacagtgtgttcggacgaaaactcgacgagaacgaggggcagttgctgcaggaggcggtgcgtgcgccggacggtcagatcgtccaggtcatcacccatacctatatgagttcggacgaggtccaggccggaccgttcccggacagctacggttcgatgaccgcggccgatgatcccttcgccgtcaagattcgccctctgaagcagtccgtgctcagccaggatggcgtcaacttcgtcaacacaacggatcagttcgacgcgcatgtgcggccggtggtgcagaccgagagcaactcgttgggacgctcgcggactctgagaaccacctacttcgacgacaccggccgctggatactcggccaggtcgggcgcagcacacagagcgttgacggcgttgagatcgagaccgagcgcaccgagttcgactcgatggcgcgcccgcaacgtacctacgccttcggcgtgctgcagcagacgctgggctatcacgccgatggcacgctcgcctccgcggccgatggcaagggcaatgccattgcgctgggcagctggaagcgtggcctgccgcagagtgttgcgtacccggacggcagcagtgcctcgctgcaggtcgatgacaatggctgggtgcgcacggcggtggagcccaatggtgccagccggagtttcgactacgacgggatgggccggatcgtactggcgacccaggccgccaatgacagcgtggcctggaatccttccacaacgcggttcttccaggtggcgggcgcggagatcgggctggaagcaggccattggaagcgcgagtccagtaccggcaacgcacgcgcggtgacgtactacgacgggttgtggcgcccagtactggaagagtcgttcgacgctgcggaccgtagcggcaccctgcgccagacagtgacccgctatgacagcaatgggcgcccggttttcacctcttatccgacgcgtgtcgcatcggacttccgttcggcgctgcccggcacctacacaggttatgacgcgctggggcgacccacccgcagcgagcaggacagtgagctggggcggcttgtcacgaccaccgagcaacttggcggaggcagcgtaaaggtgaccaatccgcgtggcattgcaaccaccaccgactacctgatgtacggcaagcccagccaggacacgcccatccggattctccacgctgagggagtggtgacggagattcagcgcgacacgctggggaagccgctgtcgatcctgcggcgcaactacgatggcagtgtcagtgtgcggcggcagtatgtctatgacggcgcccagcgcctgtgcaagagcatggagcctgagaccggtgcaaccggcatgggctacgacgccgcaggcaatctgctctggtctgcctcgggcctgacgttgctgggccctcaatgtgagagcgaggctgcctatgcgtcgccttcgcgggctgaccggacctacgacagcatgaatcgcttgctgacgctgcgcttctcggatggccagggtgatcaggactggaactattggcctggcgggaaagtgaagcgtgtgcagacccgcaacaacggcgccatcaccaccaacgactacacctacaacctgcgtggactgcccacgtccgagagcgtggcctacgacggtggcgaggcctgggcgctgggctatggctacgatgcaaacggcgccttggcaacccatgtgcagccgtccggcctgacgatcgactacggcccgaatgcgctggggcagccgacgcgagccggagccttcgccaccaacgtgcgctattacgcgaacggcggcatgagcggcttcacctatggcaacggcgtcgtgcatcagatgacgcagaacgcgcgtggcctgcctgatcgcagcaccgacagtggtgcaggtggcaaggtcatcgatgacggctacgactacgatgccaatggcaatgtggcggccatcagtgacggcctgccggcagccgctggaaaccgcgacatgcgctacgacggcctggatcgtctgaccacggtgacagcggccagcttcggaaacgcaagctatgcgtacaacgttctggacaatatcgtcaccgccaacgtcggcgcgcggcgacagtcttttgaatacgacttcaacaaccggttgacgaacgtgcgggatgtcggcagtggcgcgaccgtgaccgggctcgggtatgacgcgcagggcaacctgaagatccgcaatggcgtcgtgttccggttcgactacggcaatcgcctgcgcgaggtcgatggcaaggaggcttatcagtacgatgcacatggccgtcgtaccttggccagcgcaaccaatggcaacattcgttccctctatgggcaggatggcgtgctgcgctatcagcacgaccagcgccaggccaagggctttgactacatccagctcaacggcagcctcgtcgccaagcgtgccgtggatatcgcgcctgcagcattggtcgtaacggttccgggttacagcgcggacggtgcgtttgcggtgcagtggacagccgttgccggtgcgcagcgttacgaggtgcaggagtcgagtggcggtgactggcaggctgtctatcaagggcctgcgctgaacgtttcgctggccgggcgaagctccggcgtctatcgctatcgtggccgtgcctgcaatggcactgtctgcggcgcttggggtgtggaagcctccatccaggtggagcttgctcccaccgctgcgccggtgatcactgcaccggcacaaggtatcaacgggaactattccctgagctggtcagcggtgcagggggccgcccgctttgtgcttgaggaggccgtggggggggggttggaatgtggcctttga

SEQ ID NO: 502388 - DNA, 3123 bp, Stenotrophomonas maltophilia
atggcacgctttttcatcgatcgacccatctttgcgtgggtgatcgccatcatcatcatgctcgccggcggcctggccctgttcaagctgccggtctcgatgtatcccaacgtcgcaccgccggcggtggaaatcagcgccacctacccgggtgcgtcggccaaggtggtcgaggactcggtgacgcagatcatcgagcagaacatgaagggccttgatggcctgatctacttctcctccaacagctcgtccaacggccaggccaccatcaccctgaccttcgagagcggcaccaacccggacatcgcccaggtgcaggtgcagaacaagctgcagctggccatgccgctgctgccgcaggaagtgcagcggcagggcatcaacgtggccaagtccagctcgggcttcctgaacgtcatcgcgttcgtgtccgagaatggcagcatggacgccaacgacatcgccgactacgtcggttccaatgtcgtcgaccgcctgagccgcgtgccgggcgtgggcaacatccaggtgttcggcggcaagtacgccatgcgcatctggctggacccgaacaagctgcacacctatggtctgtcagtgccggaagtgaccgctgcgatcaaggcgcagaatgcccaggtagcgatcggccagctcggcggtgcgccatcggtgaagggccagcagctcaacgccaccatcaacgcgcagtcgcgcctgcagacgccggaacagttccgcaacatcatcgtgcgcggcgcgcaggacggtgccgagctgcgcctgggcgacgttgcccgtgtcgaactgggtgccgaatcctatgacttcgtcacccgttacaacggacagcccgccagcggcctggcggtcaccctggccaccggcgccaacgcgctggacaccgccgccggcgtgaacgctgcgctggaggacatgaagagcttcttcccggccgggttgaaggccgaggtcccgtacgacaccaccccgttcgtgcgcgtgtcgatcaagggcgtggtgcagaccctgatcgaagcgatcgtgctggtgttcgtggtgatgtacctgttcctgcagaacttccgcgccaccctgatcccgaccatcgcggtgccggtggtgctgctgggtacgttcggcgtgctggcgatgctgggcttctcggtgaacatgctgaccatgttcgcgatggtgctggcgatcggcctgctggtggacgatgccatcgtggtggtggagaacgtcgagcgcatcatgtccgaggaaggactgtcgccgcttgaagcgacccgcaagtcgatgggccagatcaccggtgcgctggtcggcatcggcctggtgctgtcggcggtgttcgtgcccatggccttcatgagcggctccaccggcgtgatctaccgccagttctcggccacgatcgtctcggcgatggcgctgtcggtgctggtcgcgatcgtgctgaccccggcgctgtgcgcgaccctgctcaagccgctgaagaagggcgagcaccacgtcgcccaccgtggcctggccggtcgcttcttcaatggcttcaaccgcggcttcgaccgcaccagcgaacgctaccagcgcggcgtgcgcggcatcatccaccgtccgtggcgcttcatgggcatcgtggcggcgctgttcgtgctgatgggcgtgctgttcgtgcgcctgcccagctcgttcctgcccaacgaagaccagggcgtgctgatggcgctggtgcaggcgccggtcggcgccacccaggagcgcacgctggaatcgatcgcggcgctggaaaaccacttcctgcagaacgagaaggacgcggtggactcggtgttctcggtgcagggcttcagcttcgccggcatgggccagaacgcgggcatggcgttcgtcaagctgaaggactggagcgagcgtgacgccaacaatggcgtgatgccgatcaccggccgcacgatggcggcactgggccagatcaaggatgccttcatcttcgccttcccgccgccggccattccggaactgggtaccgcctcgggctacaccttcttcctgaaggacaacagtggccagggccacgaggccctggtggccgcgcgcaaccagctgcttggccttgccgccggcagcaagaagctggccaacgtacgcccgaacggccaggaagacacgccgcagttccgcatcgacatcgacgcagccaaggcaacctcgctggggctgtcgatcgaccagatcaacggcacgctggcggccgcatggggcagttcgtacatcgatgacttcgtcgatcgcggccgcgtcaagcgcgtgttcgtgcaggccgaccaggcgttccgcatggtgccggaggacttcgatctttggtccgtgaagaacgacaagggcgagatggtgccgttcagcgcctttgccaccaagcactgggactacggctcgccgcgcctggagcgctacaacggcgtatcggcaatggaaatccagggtgaaccggccccgggtgttgcctccggtgatgccatggccgaaatcgagcagctggccaagcagttgccggcaggcttcggcatcgagtggacggcgatgtcctaccaggagcgccaggccggctcgcagacgccgctgctgtacatgctgtcgctgatgatcgtgttcctgtgcctggccgcgatgtatgaaagctggagcgtgccgaccgcagtgctgctggccgccccgctgggcatcctcggtgccgtgctggccaacaccttcaagggcctggagcgcgacatctacttccaggtggcgatgctgaccacggtgggcctgaccagcaagaacgcgatcctgatcgtcgagttcgccaaggaaaacctggagaagggcgccagcctggtcgacgcgatcatgcacgccgtgcgcgaccgcctgcgcccgatcgtgatgacttcgctggccttcggcatgggcgtggtaccgctggcgatttccagcggtgccggctccggcgccaagcaggcgatcggcaccggcgtgctgggcggcatgatcgtcggcaccgtgctcggcgtgttcttcgtgccgctgttcttcgtggtggtgcagcgcgtgttcaagcgcaagtccgcgacgtaa

SEQ ID NO: 502389 - DNA, 1386 bp, Stenotrophomonas maltophilia
atgaaaagtgcatccctgttcctctccattgccgccgcgctcgcgctcgccggctgctccaccctggcgccgaaggacaccgccgtcgcgccggccatcccggcgcagtggccggccgaggccgcgcagggccaggtcgccgatgtcgccgccgtcggctggcgcgacttcttcactgatcggcgcctgcagcaggtgatcgagcagtcgctgcagaacaaccgcgacctgcgcgtggccgtgctcaacgtcgaacgcgcgcgggggcagtaccgcgtgcagcgcgccgaccgcgtgcccggcgtggccgtgaccgggcagatgcagcgccagggcaccgacgccggcgtcagcgagcagttcaccgccggggttggcgtggccgagttcgagctggacctgttcggccgcgtccgcaacctcagcgaagcggcgctgcagcagtacttcgccgtggccgccaaccgccgcaacgcgcagctgagcctggtcgccgagaccgccaccgcgtggctgacctatggtgccgatgcgcagcagctgaagattgccgaggccacgctgaagacctacgaggattcgctgcgcctggccgaggcacgccacgaacgcggtggcagctccgccctggagctgacccagacccgcaccctggtcgagaccgcacgcaccgatgccgcgcgcctgcgcgggcagctggcccaggaccgcaatgcgctggcgctgctggccggtggccagctggatccggcattgctgccggacagcatcggcccgcagctgctcgcgctggcgccgccgccggcgggcctgcccagcgacgtgctgctgcagcgcccggacatcatggccgccgagcaccagctgctggccgccaacgccaacatcggcgcggcacgtgcggcgttcttcccgagcatttcgctgaccggcagcatcggcagtggctcgaccgaactgtccaacctgttcgacagcggcacccgcgtgtggagcttcctgccgaagatcaccctgccgatcttccagggcggcaagctgcgcgccaacctcgccattgccaatgccgaccgcgatatcgcgctggcgcagtacgagaaggcgatccaggtgggcttccgcgaaaccgccgacgcgctgtcgctgaacgtcagcctggacgagcaggtcagcgcgcagcagcgcctggtggaggcggccgaacaggccaatcgcctgtcgcaggcgcgctatgacgccggattggacagcttcgtgaccctgctcgacgcacggcgcacggcctacaacgcgcagcagacccagctgcaggcccagctggcgcagcagtccaaccgcatcaccctatacaaggtgctgggcggcggctggcacgagcgcggctga

SEQ ID NO: 502390 - DNA, 477 bp, Stenotrophomonas maltophilia
gtgatcagccaggccggcagcgaggacaacgtcaagggattggtctacatcgaggccttcgcgcctgatgccggcgagagcccgggtggcatcacccagcagcacctgccggaggcggcacagaacctggcgccggacagcgatggctatctgtggctgcgtgcagacaggttccacgagagcttctgccaggacctgagtgacgacgaaggccgggtgatggcggtcacccagaaggcgccgctggccagcacgttcggcgatgcggtcagcaatccggcctggaagcacaagcccagctggtaccagctgtcccgccaggaccgcatgatcgcaccgcagaaccagaaggcgatggccacgcggatgcagcccaggcgcctgctcgagctggatgccagccatgcttcgctggcctctcagccgaaggaagtggccgcgctgatcctggaagccagcgctgccatcgctggctga

SEQ ID NO: 502391 - DNA, 873 bp, Stenotrophomonas maltophilia
atgttcggcctgcagcgcgtcggcgacctggcctgggccgctgccgatgcacgtacgcgcggcttcctgctcggcgccacctcgggccgcaccacgctgatgggcgaaggcctgcagcacgacgacggccacagccacgtgctgtcgtcggtgattccgagctgcgtgtcctacgacccgacctacaactacgagctggcggtgatcatccacgacggcctgcgccgcatgtatgtcgagcaggaagacatctaccactacatcaccgtgctcaacgagaactatccgcagccggcactgcccgaaggcgtcgaggccggcatcctgaagggcctgtacctgctgcgtccagcagccgccgacaacgcctcgcagccgcgcgtgcagctgatgggcagcggcgcgatcctgcgcgaggtggaagcggcggccgacctgctgcaacaggacttcggcaccgccagcgatgtgtggagcgcgaccagcctgaccgaactgcgccgcgacgggctggccgctgagcgctggaacctgctgcatccggccgaagaaccgcgcgtaccctacgtgcagcagcgcctgcagggccatgaaggcccggtggtggtggccaccgactacatgaagatcgtcggcgaccagatccgacccttcatcaacgaccggcgcttcatcgcgctcggcaccgatggcttcggccgctcggatacacgggaagcgctgcgcacgttcttcgaagtggatcgccacttcatcgtgctggccgccctgaaggccctggccgacgaaggccgcatcgagcgctcgcggatgcaggacgccatcgacaggtaccgcatcgacaccggcaagcgcgacccggccgcagtgtaa

SEQ ID NO: 502392 - DNA, 888 bp, Stenotrophomonas maltophilia
gtgaaagcaactactgccagactgcaagcagcgatcatcgcacttgtcttcttttcatttgcaggtgaatcagaagcaggcggcctcatcgagtgcaacaattgcgtatcgcccaaatccgtcgctctacagtctggatctggactcaccgtgataattgacttcgaaaaagcacaactgactgcattcgatgttgaatatgatcgggaaatgagaaaatggagagcccttccaacccccgtacccagccagatccaaatggcatttctccggattgtggaaagcgtatctggcgttagtgatcagccgagccacgcttttccagatgcggggggaggcgcaatggttcccctccaccccgacaatccggggaattccaatgggatgcgatttccagagtcatacaaatcgtccgacgcgttcgagatcgtcagctcggcgaccatgaggacgcgactaggccagtatttggccctagaaatcgcaggagccaatacaagcaacctagcgtggaacagcttcgcgctttccatacagcaattttcgctcaactgggcaagcataaaagggggcggatcagtcaatatagtaattacttggagagacggatcaaaaaccctctatcgaatcacccctgataacgtagcagaggccaaataccagaaaggtgagagccgggacggcactggaaacaaggtcccagatgagaccattgcagatcctgtcacggctccatcttacgctggacagtattacttccgccacgacggcgacgtcgacaaatgggtccgcactgctcagatgtatggtgtgccggtccaacgcgggtccagcagtcggatttcctgcagctgggacggccgcacagtctattgccagcaatactga

SEQ ID NO: 502393 - DNA, 447 bp, Stenotrophomonas maltophilia
atgaaggacgacgccgtgacccagctcaccctgcccgaactggccaagaagatggccggcattgatttcaccctgctgcagacccacgccggtggagagattgccggccgtccgatgagcaacaacggcgacgtggactatgacggtgacagctggttcttcaccaccgaagacaccgacatggtgaaggagattgaagctgacccggccgttgccttgggtttttccggcagcaaatcgttgctgggcaagccgccgctgttcgtgcacgtccagggcagggctgcgctggtgcgcgatcgcgccacgatgagccagcactgggtgaaggacctggagcgctggttcgaacagggcgtggatacaccggggctggtgctgatccatgtgcgcgccagccgcatccactactgggatggcgaggacgagggcgagctcacagtctga

SEQ ID NO: 502394 - DNA, 810 bp, Stenotrophomonas maltophilia
atgcaacgacgcgcgcccctgctgatcaataccgaggccatcgagctgtggcccgcccacctgctgcgcgcacgcagcaccctggatgcccgcctgctgtcgcaggcacagtgggtgctgcggcgcaagcgcgatggccgcttcctggcggcggtgacgacgcatggcgtgcattcgctggtaccgcgcctgccgcgcgaacccggggtcgaggaggctctggcgctgctcgatgcagcggcggcgcggccgttcggcgctgcgctgcaggatcagtggttgccactggcgggcctgcagcagcgcctgcagcagctgggcctggatgcccagcgctatgccgacgacagcggcctgccattggagcccgaaccgtgcctgctgcacttcgccggtcgtgaccggttcggccgcccgctgtggctgcgccgcggcgccgcgcagggatggcggcggatgcgcctgcacgcggcacgggagggcatcgcgctcgacgcaatctccggcttccgcagccatgcctaccagttgggcatcttcgagcggaagctggcacgcgggctgagcgtggcggagatcctgaaggtcaatgccgcaccggggttcagcgaacaccacagcggccacgcgctggacatcggcacaccgggcgatgcaccggccgaagaatcatttgaagccaccgacgcgttcgcctggctgcaggcccatgccggcaggcatggcttccatctgagttacccgcgtgacaacccgcacggcatcgtctacgaaccctggcactggtgctggagaccggccaacggctga

SEQ ID NO: 502395 - DNA, 594 bp, Stenotrophomonas maltophilia
atgagtgccagcgatccgaagcagtacgaggtggccgaaagctcgccgttgcgcgtgctgtggatcgtgctgcccctgctcgccgccttcgtggcctgcctgtatgcgcagctgtacaaggcaccggcgacggcaccctggattgaagtgacgctgtcgccgccctggttccggatgggcggcagcgccgcctggagcctgctggtcattgcagcgctcggcgtcgggctgggcgcggcgttcttccgccgccgggtggaactggccgacgacgtgctggacgtgcgctcgacgatgtaccgccgccgtattccggtgacgcagttgcggctggaccaggccgaggtggtcgatcttgcccgcgaccgccgctatggcatccgcttcaagaccaacggctatgcgatgccgggcttctactccgggcacttccgcctgcagggcggcggcaagggctttgccctggtcaccgaccgcagccgcgttctggtgctgccggtacgcgacggcagcgcgctgctgctcagcctggaccggccgcaggtactgctggacgcactgcgcaaggtggccgcaccggcgccgcggcagtaa

SEQ ID NO: 502396 - DNA, 180 bp, Stenotrophomonas maltophilia
atgagcacgcgctggagctaccagaccatcgaggtcaagacatccatgatgggcgtcctcaaggccgaggacgtccaggccgagctgacccgccagggccagctgggctgggaactggtcaacatcatcatcccggcaccgatgcgcccggcgatgctggtgttcaagaagcaggcctga

SEQ ID NO: 502397 - DNA, 180 bp, Stenotrophomonas maltophilia
atgagtgagaagaaagcctatccgctgcgcatcaacgccgaggtcctggccgccgcgcagcgctgggctgacgacgagctgcgcagcctcaacgcgcagatcgaatacgtgctgcgcgacgccctgcgcaaggcaggacgcctgccaaaacccacgccatcgccggaggacaaggaatga

SEQ ID NO: 502398 - DNA, 882 bp, Stenotrophomonas maltophilia
atgaaagagaagtcgcttgcctccctcaacggcctcggcacgctggccggtgccctgctcgtcgccctcgccggcgctgccctgttcgtactgggcgtggccgccaaggccagcaccggctcgcccaacctgctgctgatgctgctgggtgcgctgctggggatcctgggcgtgttcatcctggccggcctgtacaccgtccagcccaaccaggccgcggtgctgagcctgttcggcaagtacgtgggcaccgtgaaggacaacggcctgcgctggaacaaccccttctatgccaagcgccgggtcagccagcgcgtgcgcaacttcgagagtggcaagctgaaggtcaacgagctcgatggcagcccgatcgagatcgccgcggtgatcgtctggcaggtggtcgacgcctccgaggccgtctacaacgtagacgactacgagagcttcgtgcatatccagtccgaatcggcgttgcgcgcgatggccaccagttacccctacgaccagcacgaggacggccagctggcactgcgcagccacgccagcgagatctcccagcacctgaagaacgaactggccgagcgtctggccgatgcgggcgtacaggtgatcgatgcgcgcatcagccacctggcctacgccgccgaaatcgcccaggcgatgctgcagcggcaacaggccaacgcggtgatcgccgcgcgcacgcgcatcgtggccggtgcggtgggcatggtcgaaatggccctggccgaactgcagaagaacggcgtggttgagctggacgaggaacgcaaggcgcacatggtcagcaacctgctgaccgtgctgtgctcggaccgcggcacccaaccgatcgtcaacgccggttcgctgtactga

SEQ ID NO: 502399 - DNA, 1188 bp, Stenotrophomonas maltophilia
atggccaagcttggaactccgttgtccccctccgccacccgcgtgctgctgctgggctcgggcgaactcggcaaggaggtggccatcgagctgcagcggctgggcgtggaggtgatcgccgccgatcgctatgccgatgccccggccatgcaggtcgcgcaccgttcgcacgtgatcgacatgctcgatgccatggcgctgcgtgcgctgatcgcccaggagcagccgcacctggtggtgccggagatcgaggccatccataccgagaccctggtccagctggagcaggagcagggcctgcgggtgatcccgactgcgcgcgccgcacgcctgaccatggatcgcgaaggcatccgccgcctggccgccgaaaccctgggcctgccgacctcgccgtaccgcttcgtcgataccgaggccgagtaccgtgctgccgtggccgccattggcctgccatgcgtggtcaagccggtcatgtcgtcctcgggcaagggccagagcaccctgcgcagcgaagcggacatcgccccggcgtgggagtacgcacagaccggtggccgcgccggcgccggccgctgcatcgtcgaaggtttcatcgacttcgattacgagatcaccctgctgaccgtgcgccatgccggtggcacctcgttctgcgcgccgatcggccatctgcagaaggacggcgactaccgcgaaagctggcagccgcagccgatgtcgagcgcggcactggcgcgtgccgaagagatttcgcgcgcgatcaccgacgacctcggcggctggggcctgttcggtgtcgagctgttcgtgaagggtgatgaggtgtggttcagcgaagtgtcgccgcgcccgcacgacaccggcctggtgacgctggtatcgcaggagctgagcgagttcgcgctgcacgcgcgcgccatccttggcctgccggttccggtgatccgccagagcggcccgtcggcctcgtgcgcgctgttggcacacggcgagggcgtgccgtacttcaacaacgtcgccgccgcactgcaggtgccggacaccgccgtgcggctgttcggcaagccgagcgtgcatggccaccgccgcgtcggcgtgaccctggcgcgcgcggcaaccatcgacgaagcacgcgccatcgcgcgtgacgccgccgacgccatcggcgtcgaactgcgcccgtaa

SEQ ID NO: 502400 - DNA, 234 bp, Stenotrophomonas maltophilia
atgaaactgcaactggccgcgatggccgcattgaccgtggccttcgccggaatgatgtcgcctgccatagcgaccgccgagatcgttgatgtccaggaggagtgtgtacccttcagggtcagtggcaacgtgttccaccagcgctgtacttcctatgcaatccatgacgatggcacccgcgaagtcaccgggcattacaactgtgacgagaacgggatgatctacgacccctga

SEQ ID NO: 502401 - DNA, 240 bp, Stenotrophomonas maltophilia
atgaccaccacccatttcgatcaactgcaactcgccgagcgctgggggctgtcacccaagacgctggagcgctggcgcgtcatcggcaccggaccaaagtacatccggttgcctggcaaggtcatctaccgtttgtccgacatcgaggcctacgaaaacgagtgtctggtgtcatcgactgccgagttccgaaagcacacgaagttgtccgggcagccattggccgccgggcgatgctga

SEQ ID NO: 502402 - DNA, 612 bp, Stenotrophomonas maltophilia
atgaaacactcacccccggcagaagacctctccgcgcacctgaagcgacagctcgtttttctccggaattctgttgccgcttatgacaacgggtgcccagaggaggccatacgcatcggtgtcgctatccgtgttctttgccacgacactcaaaaaagtgagtcactgcttacaaaaatggggcgaaagcatactttgccgttagtgacgaccgcaaagactgtgccgaatgactttctcgaaaccacggatttcggggagttaatggcaggtatgacgtttggccacaagctcgaatatgacccggtaccgggagattcgcctaccattctctgtgctgattggtgggagcagcctgttttcatccgtgacaagaaggcttacacacggaaagacgtcgtgcttgcagcggccaacaaggatggtggtgcccacgtcgacaaccctgatgccaaactgcaagcgcttcaggagggtttctggatcagaacggtgacgcatgctgacggcacgaagaagacggagcctttagctgacaaccactttcggatgctgcgccgcttcgccgaagagttgctctcgagtaaggagttgctcaaactggcagattga

SEQ ID NO: 502403 - DNA, 984 bp, Stenotrophomonas maltophilia
atggatgaatcacggacggccgatgctcaggcaataaaccaatctatcgcgagccggattccggttcgatcgatatccttggccatcgtagtgacggtggtgatgtacgtcggcatggcgaccctggcggattgggaggcgtttggtgctgcggtctcggcgctacccggtttgctttgggtgcaggtggtgttgctctccctcctgagctatctccttcggtttgcccgctggcatcatttcatcgttgctctgggacacaaggttccgatccttcgtaacctcgaaatctacctggcagcatttgcgctaacactcaccccgggcaaggctggagaaacgatccgatccgtttatctccatccttatggcgtcagctatccgcacagcatcggtgcctttgtctcggagcggcttctggacttggtcgcagtgggggctctggcgtcgctggcggtatcgatgttcccggaacagcggctgtggatgtttgctgcaatcgcctgcatcgttatcgtcattctgctactgcgctcccgtctgctcagcttgataggaaggcgagccgcaggcagctcagtcgttggccacgcggcaaagttggttgctaccgttcgttttctattgtcgagtcgccgagtcgctgtggctgcacctttgagtcttatggcctggatggcgcagggcgtctcactttacttgattgttgatgcgctcggctacgaattaacggccagcaccgtcgtcgcgatttattgcctgagcatcctggccggcgctgcgtcgttcatccctggtgggctgggggcgacagaagccgctatcgtgttgcttctgtcggctgcaggcgttggtcagacggatgccatcaccgcatcgctcgtcagccggagtctcacgttatggcttgccgttggtattggcgttgtggcgatgaccaaagccgctcttgccaatcgatctacgcgctcggcgcaaagttaa

SEQ ID NO: 502404 - DNA, 417 bp, Stenotrophomonas maltophilia
atggatttctcttacgccctgaccccatttctggcttggctcgtcgccggagtctcaaaattcattatcaacagcatcaaggccaagcaactcgcgttcggcctcatcggctatggtgggttgcccagcaaccacagcgcgatcgtcagcagcatggctgcgctcattgccctcaaggagggtatcggacacccagctttcggtgtggccattacactggcgtttattgtgatgttggatgccaatagcctgcgccggcaggtgggtaagcatgcgctagtcatcaacaagttggcagccggggcatctgaccatcagacactgcgcgagcgcatgggccacacccgattggaaattgccgccggcatcgccgtgggtatcgcggttgccgccgtagtgaacgtaatgttggcttga

SEQ ID NO: 502405 - DNA, 885 bp, Stenotrophomonas maltophilia
atgcatgataccgtaatagcccgctcgcgtctagctcagatgctgggcttaatcaagctgatgcgaccaaagcaatggatcaagaacggctttgttctggcgccgctggtcttttctggggcgtttttggatgctggtgctgtcagtcatgcccttttggccgtgctgcttttctgcgtcgcctcgtcggcgacctacatcatcaacgacatgcacgacattgagcgtgaccgtcgtcaccccaagaagtccaagacccgccccctggcggccgggatcgtctcggtgccagctgctttgatgttgctcgtagccctctacgccgtgctggtatggggctggttcgttgccccgaaggtggtgatggtcatcgcggcctatctggtcttgaacctggcctacacgttcgtgctcaagcaccaacctgtggtcgacatcttcaccatcgccatcggttttgtgctgcgagtctacgccggtgccatggcactggacgtgcccgtgtcctcatggatgttcatcacgaccctgtgcctggcgctgtacctggccgccgtcaagcggcgccaagaactcagccaaagcggaacggagggccgcaaggtgctggagaagtactccgtgtcactggtggatcgttacgctgagatgtcggcaaccggggcgctgcttttctacagcatgtttgtgatgtccgcccagcccgagttggtcatcacggttccattagtcctgttcggcctgttccgctactggttcgtggtggaggcccttgatggcggcgagtcgcccacagatgcactgctggctgactggcagctgttgcttaccgtggttctgtgggtggctgcctgcggctgggcactttggccggtgcaggggtga

SEQ ID NO: 502406 - DNA, 414 bp, Stenotrophomonas maltophilia
atggttgcctcgtctaagctggcgattaactatgccattttcgcactaatcgcaactgcagccaacattggcgctcaggatcttgtcatccgtacctacagcggcgccttcgacatcctggcctcggtcgtcgtgggcaccggcgtcggtcttgtggtcaagtacatcctcgacaagcgctacatcttccgctttcgggcgcgcagcgccgcccacgacactcagactttcgccctctataccgtcatgggcctggtcacgaccgtgattttctggggcttcgagtttggcttccaccatatcttcgagaccaaggaaatgcgctacctcggcggcgttattggtcttgcgatcggctacctgaccaagtaccacctcgacaaacgttacgtcttccgcacggaggccgtatga

SEQ ID NO: 502407 - DNA, 1302 bp, Stenotrophomonas maltophilia
atgaagccggttacttcctgggggcgcttgagcgccgatcctcatcatgtcgtcggcctgaatgatccctctagggttaaggcgctggtttgccatgggccccaccctggcgtcgcccatggcatgggtcgcagctacggggacgtctgcctgaattcagaaggcacgctctgggtcacaaccgggctcgaccatttcatcgctttcgacgacagcaccggccgcttggtatgtgaggctggcgtactgctacaggacattcagcgactggtcatccctcgcggctggattctgcccgtgacgccggggactcaactggtgaccgttggaggggcgatcgccaacgatgtgcactgcaaaaaccatcacgtactgggctctttcggcgatcacgttcagaacctcactctcgttcggaccgatggcgagatcatccagtgcggaccacatgagcgacctgattggttcgccgccacggtgggaggattgggcctgacgggtgtgatcacccaagctgagatccaattgcgccgtgtgtccggcccgtggctagacaccgagaccgtgccctatgccaacctggacgagttcttccggctcgcggatgattccgaggccgattgggaacacacggtgtcctggattgactgcatcacagggggcggcgggcgtggcttgttcatgcggggcaaccccaccaatgtcggagatcgcccggcacctcaggggcgtaaactgaccatgccgatggtgccgcccgtttccctggtgaatcggctgtcgctgcgccccttcaacatggcctactaccacctcaagaagtggcaggccgggcgggccatcacgcactacgagccgtttttctacccgttggacaacctgctcgagtggaaccggatgtacggcccgaagggcttcttccagtaccagagtgtggttccacgcgaagttgggcaagacgcggttcaggccatgctcaaagaaatcgctcgatcgggagatggttcgttcctcgctgtcctgaagacttttggcaaccgccagccggtggggatgctgagtttcccacagccaggagtaacactggcactggactttccgaatcatggggaacgcacgcacaagcttttcgaacgcctggatgccatcgtgcgtgaggccaatggccgcctctatctggccaaggatgcacgaatgcccagagaactctttgaagcaggttatccgcgcctggctgaattcatgaaataccgggacccggggattagctccggtctctcacgccgtttgatgggaagttga

SEQ ID NO: 502408 - DNA, 753 bp, Stenotrophomonas maltophilia
atgaacaacaagaaaagaatcgtcattattggcgccacctcggcaatcgccgagcactgcgccaggctttggctggcacagcagccggccgacctgactctggtgggccgcgatacccagcgcattgagcgggttgcaactgacttgaaggtacgtagcccgcaatccgagattcgggttgtccaagcagaatttctgaaccctcaggccataaacgccacggttgaggatatcgtcaaatcggggcgcatcgatatcgtcttgattgcgcacggatcactgcccgagcaaaccgagtgccagaacgatcttcagtcttgccgtgacgcactggagatcaacgggatgtcaccagtcctctatgccgaggcctttgccaaagagatggaaaaagccaaccacggcaccattgccttgattggctccgtagccggggacagggggcgcaagtccaactatgtctacggagcagccaaaggactggttacccgctatgcccaaggcttgcagcaccgttttgcgggtagcggggtcaaggtggtgctgatcaagcctgggccgactgataccccgatgacggcacacctcaagggcaagggtgcgaacctggcatctgtagagagcgtagcaaagcagattgtggacgcgattgacactggaaagcctctggtttacaccccgagaaaatggcggcttatcatgagcataatccagcatttgccccgtgtagttttcaacaagctagaaatttga

SEQ ID NO: 502409 - DNA, 1416 bp, Stenotrophomonas maltophilia
atgcagaatatcaacaaaaaactagagccatggctttaccacacagcgcttggaatatttattgcgctcagtttgctgcatcttttaaccggctatgctgataatggtgatttttcaagaagcgcgggattcttatttgaaaggccgcatgatttttcaacaatgtggccagccgcagaaagtgaagaatggaggaggcgcttttttggcgaatggcacgataaatggatttttctgaaaagttggccaaataccgaaaacgttttctcattctcatcctataaactttatttgctatttcaagcttatttgtcaacattaattggtgttgacagctcatactactcaatcatctcgggctcaatattgtcacggctaatcctttgtgcggtctttctggtttttgcgcatcacctcagatatcagatatcaaagctcaccgcctggatattcatcttaatctttggcttcatacttattgactcaagctggattgcttttttaaactccttctatgaggagcaaattgcgattgttttcttgcctattttgggcttttttcttctaaagtttctcacaaatcaaaacactaagactggtttttggtttctattgtgcgcaacgtttataggctcagcaaagacagcatacttttatttaccgacactatctattttatttttggctccatttttttcatcaaaaaataaattaactaaattaatcttaatcaccatcctcttgcaggcagtatcgttgctgccggcatactttgggaagtacgaaaaaattaactcttatcacgctctttactttggggctcttaaagtattacctaatactgaagcatcatccatcaagtcaatcggcgagaaacctgtctttcatgaatgcataggagtttcagcctttagcccacttgggaacaaatgcatggaaaaatcaaatacaagctacgctgatgtcgttaagttgataggcaaccacccaagcgttggatttgaaatgatttttaaggtattcgaagatggaagagcaatacgcctcgaatacctaggcaaagaaattaaaaatgcccctaacttttcagaaagttatgtttttaatatctggccgaaatttttcgcgaaaggattaaattatttcatactcctagccttacttgctgcgagctttctgttgatcgaaaaaagatctcttttaagcgataaagaaaaatcagttttgctcattggggtatttttcgctgcgtttggtttctcgcagtacattgtgtctttgggtgatggctactatgaaataaccaagcacttgaccgcaggaaattatgctcttgctttatcgctaccctttatttttgcggcgatcatttcggcggctcaacgtttgcttttttcgaagctcaactccgaataa

SEQ ID NO: 502410 - DNA, 465 bp, Stenotrophomonas maltophilia
atgcgtcacgtcaccgaagaagggctcaacctgatcaaacggtttgagggcttcagccagacgatctacatttgcccggccggctatccgaccgttggctacggccatgtggtactggcacatgagcgggagcagttcgcagcgggcattacgcaagccgaggccaccgctattctgcgcaaggacgtcggcatcgccgaacgagccgtgctacggctcatctccgtgcccctgacggacgggcagttcgatgcgttggtctctttcaccttcaacctcggtgccggggcgctacagcgctcgacccttcggcggaaggctaaccgtggcgaacacgaaggcgtccctgctgagctgatgaagtgggtctggtccaatgggaagcgtcttcggggattgattattcgtcgtcgcgaagaagcctttgcttattcggagttgagcttcgaaaaaagcaaacgttga

SEQ ID NO: 502411 - DNA, 462 bp, Stenotrophomonas maltophilia
atgctgaccctgctcggatcattgctgggctttctcagcagcaccttcccggaattcctcaagctgtttcgcgacagccaggaccgcaagcacgagctggcaatcctggatcggcagatggagcagcagcggctggggcacacccaacgactggaggaaatccagattgcggcggatgttgccgagagccaggcgctgtacagctacgccaaccaccccacaggcttaccctgggtcgaggcattgcaggcctcggtgcgcccgatcatcacctatgccttctttctggtctttgcggtggtcaaggtctcggccttggccactttgctgcaaaccgatgggatcaccctggcggcggctttgcaggccacgtgggacgaagaaattcaggcactgtttgccgccgtgatgtcgttctggttcggcagccgtcagatcagcaagatgcgccgaggtggctga

SEQ ID NO: 502412 - DNA, 291 bp, Stenotrophomonas maltophilia
atgaacacaccgaccacgcgagacggctgggtatccatgccgctggatgaatttgagcgattgatcgaggacgcagctgagcgtggcgccaagcgcgccatgactgatgtcggtctggatggcgaaagtgccgccgctgacatccgtgaactgcgcggactgctcgaggccttcaataccgccaagcacacggcctggcagaccctgatacgcatggtgaccaccggcttcattctggcgctggtcgccggtgcgctgatcaagctgaaactctttggtggaggacactga

SEQ ID NO: 502413 - DNA, 1053 bp, Stenotrophomonas maltophilia
atgcgtgccatctttcaggttattgctaacgcgcaggacatcaccgatctgctcaaagaccgtctgctcagcctggagctgaccgatcgggcagggctgcagtcggacgaatgtgaaattcgcctggacgatcgggacgatcgcatcgccttccccaaaaagggggctgtgctgcgcatctcactcgggtgggagggtcaaggcttgagtttcatgggggcctacacggtcgatgagatcgaactctccggcccgccccgcaccctcgtcatccggggcaagcctgcagacatggcaggagcagccaagaatacccgccagcacgcctgggaacaggtaccactgtcgcagatcgtcaaggaagtggccgcgcgcaacagctggcaggcggtgtgctcgatcgacacgaccatccctagggctgatcagacgtgggagtccgacctcaatttcttgacccgcctggcccgtcagtacaacgccacggccaccctgaaggaacgcaagttgctggtgatgccgcgcgccaatggcaaaaccgcctccggcaagagcctgccggtgatccagttggagccgaccgcgatcaacagctatcgcctgaccttcccggatcgtggcagcgtggccgcagtcaaggccagagcacatgacagcaagaccggccagaaaatcgacatcgtgatcccgaacccggatgcaccgacgggttcgagtgctgcggtacataccgaccggcacatctatcccaacgccagcgccgccaaggcggcggccagggccaaactggccggcatgaaccggcaaaccgcaacgggcaacttaaccttgcgtgggcgcgccgatctggctgccgagaaatcggtcgcgctcaaaggcttcaagcaggaggccgatggcacctatctgatcgagtcggtgacccatcacctggccgggcagagctggacaacaactgtggagctctcagccgggaagtctggcaaagctaaagccgggcacaccaagcagcctgcccgaaagaccgcactggtcatccccgcagcgccctga

SEQ ID NO: 502414 - DNA, 207 bp, Stenotrophomonas maltophilia
atggcgacgactatcaaaacctctgacggtgatgtgctggataccctgtgccagcgccactatggccatctgctgggttcggtcgaggccgtgctcgaggccaacccggggctggctggcatccctcagccctttgtcgccggggtgcaaatatatctgcctgatctcgcatcgccgcgtaccgatgtcatccagctctgggactga

SEQ ID NO: 502415 - DNA, 930 bp, Stenotrophomonas maltophilia
atgtccttaattactagcgcgaccgccatcacccagcaggtatcgcaggcgagcacaaccgtcgcgcgcgctgccagccatgtgcagcgtcttgggaaactggctaataccatgaccaatgccacccagccggcggaaagtgtgttccggctggccagcaacaccaccgccgaactggtacgcagcgcttctgcactcaaaggtgtggcggcactcttgcccaccagcgtgctgtcatccattgagcgcagcactgtgggtcgcagcctgtcatcgctacagacgggtctggctgacatcaaacggcgcacccagcaagtcggacgtttgatcgatgccagccaggccgcggccaggcgcgtgggcacagccgtgcaatcgatccagaacgcggcaagcgcggtcggcactcaggtcacgatcatcaaaacgcagttgggtaacgggtcgctcgtggccgctgctgtcgctttcacgggtggttcgggcgcatccccactgcccagcctgtccagcgctcgcccacacctgctggtgatgattgccgaccaaggtgagcgcttttactttggcctcagcaccgctgctttcgacagcctgcgccggcagagcaactacaacgtcgccccccaggagcggcttggtcgcccggaggccttgcaggcggtcaatcagggcggcgaatctctctcgctctcgggtgtggtctttgcccagatggccggtatgacccaactcaacgccttgcggcgcatcggtttccagatgaagcccgtggaactcatcgcagggcacggtgaaatcctcggccgctggtatctgaccagcctctccgaagaccagagcgatctaatggccgacggcgcgccgcgaaagcaaaccttcactgtggaattcaaacgctatggcgacgactatcaaaacctctga

SEQ ID NO: 502416 - DNA, 2451 bp, Stenotrophomonas maltophilia
atgaaacgtgatatcgcactgggcatcgtcattggcggcgcggtggatggctcgctgggccgggcgctaaccgacacccagtcgcgcatcacccgtctcaagcagaccgccgagcaacaacgcctgtggcagcgcacgattggggagacgcagcgcctgcagggcgagtttcgcaagctgcacctgagtggcgatgccgctgcggagggcatccgcaagaagatcgaagccaatctcacggtactgcgccaggccggtatcgaagccgataagctcgagcgtgcctatcagcgcctagggcgcactgcccaggggctggagttgcaggctgctggccgtgagcgcatcggccaggggcttgagcaaggccgggaggcggtaggtgatgccttgaagcttaccgctacgatcgcggtcccagccacgatctcggccaactatcaggccatcgtgcgcgatatggcgatcaaagccggcattgcgggtactgcgcgcgaaactcagatcggtgagcagatcgcccagagcgctctggccagtggcatggggcgcaacgagctggcccaagccatcaatcagctcgtgggtggcggcatggatctggagcgtgccaccacttttgcccccttgctggcgaaattcgccgtgggccagggctcgggtagcgtcgacacggcgcgcatgatcggcgccctggagcaaaacgccaagatcaccgacccggcccagatgcagcaagccctggaggcgatcgcctacctgggcaaagagggatcatttgaatcctcggacatggcgcgctggtttccggagctgctggccgagatgcagaagatcggcatcaccggccaggactcggtcaatcagctcggcgccatgctgcaggtgcagatgaaggtctccggctcgccggatcaggcggccaacaacctcaaaaactggttctccaagatcggttcgcccgagacccagcgacgctacgccgatgccggtatcgattacacagccatgatgcaggaggccatcggcaagggctggagcacgatggagtcctcctttgtgctagcccgggcctacatcgagcaggccgatccccagcgagcccagcaagtctccgtggcggcgcaacgcatcgggcaagaacgtgatccggctaagcaacaagccatgctgcaagccttcgaagccaccatgaaaaccggcgatctcttcgccgacatgcaggtcaaggcggcgctgaccgcctacatgcaaaacgccgatctgtaccaacgcctcaaacaaaatgccgcacaggccagcggtgagattgagcaagacctgatcgcgcggcgggaaacttccaagcagatctgggccgaggtcggtcaggcgtgggacgaggccttgcgccggattggtgacgccttgcgtccagtgaccgacaccgtgggccaggccgtcggttctgtcggcagagccttggccacgctggtcgagcaggcaccgatggtggtggcgggtctggccaccgtggccggcgggctggtggcgctcaagggtgccaaagccgcctggaatatcgggcgcggcgctttcgacttggcgcgcggcacccttatggccggccggatcgggactggcaaaggcctgcccggaaggctgggcaatctggccagtgtgctctctggtggtgcggccagcgcaggcgcccagcctgtgttcgtcaccaactggcctggtggtggtggcggaggactgatggatctgctgggtcggtctggccgaggcagcccaggcaccgccacgaccgctggcaaggcagccgggggcatagcagcttctgcaaacaatctggggcgctttacccgtgtgggcaactggctgggcaaggctggtggccgattgggtggtgcccttgccatcggcacaactgcttaccaggtctacgacaccagcaaaaacgccactactcgccaggagaaagcgcagggctatgggggtgctgccggcacgctcgccggtggtttagcgggtgccaaactgggggcagccgtgggcgcactcggcggcccgataggtatcgccattggtggcctcttgggtggggccataggcagcttcgccggcgacaagctaggtggctggctcggcaaatcgctggtcgcgcccacaacgccacagccggcaccgactttggtggctacgcagcccatcccagctgcggcttcgtccagtgctgcggccaatgccccgacccctgctgtcaggccagtcacctcaccagcggcaaaggcgccgcccgtgccgcaccagctgagtttctcgcccacgctgcaaatcaccgtcaaaggtgacgtcaaggacccgaggcagctggccaatgagctgatgccgcacctcaaaaccctgttcgaacaatttcagcaacaggcccagcgtgccgcctggtacgacggtgcccatgtgtga

SEQ ID NO: 502417 - DNA, 303 bp, Stenotrophomonas maltophilia
atggaccaactgaccgtcaagctacaacacccaaccgaattcgatggcattcgccgcgacaccctgaccctgcgcacgccactcgtgcgcgacatgcgcctggcttcccggcaagcgccgtccgacgccgaagagcgcgaattgatcctgttcgggattctggcgggcgttgcgccgaaggatctggagggcatgcgctttaccgactacaagcggctgcaagacagctactttcgcctggtgtccgctcgcccggatgacgccgcccctgttgggcctgctgatgaagcgtctggcgcgtga

SEQ ID NO: 502418 - DNA, 504 bp, Stenotrophomonas maltophilia
gtgatcccgcaaaccctctacaacctcaacctcttcattgacggcgtgaacttcgccggcatcgccacccaggtcaccccgcccaaactcaagatcaaggccgaagactaccggggtggcggcatggacgccccgatcaagatggatctgggcctcgaagcgctggaagccaacttctcgctctcgggcatgtcgatcgaagccctacgcttcttcggcctggccgaccagagtgccttcaacggtgtcttccggggcgcctttcgcacccacaagggcgaggttcagtcgtgcgtcgtgacgctgcgcggcatgctgaccgaggtcgacatgggcgactggaagccctcggagaaggccgaaaccaaatttagcctggcctgcagctactacaagctcgagctcgatggcctgctcatctacgagatcgacccgatcgcctcggtgcgcatcgtcgacgggcgcgaccagctggccgacatccgtgtcgcccttggtctgtaa

SEQ ID NO: 502419 - DNA, 1161 bp, Stenotrophomonas maltophilia
atgcccacttccttcttccacggggtgactgtcaccctgatcgacaccggtccgcgaccgatcaccattccgtcctcgtcgatcatcggcctggtcgatacctacacgcccgccgaggggctggccgagccccataagcccatcttgctgacctcctatcgcgaggcggtgaagcagttcggtgcgggcagcgccctggccaagtcggcacgcggcatctacgcccagtcatctgcggtggtggtggccatcggagtgccgctggtcgccgatgccgctgcgctcaccagcgccatcatcggtggcgtgacggtcgatggccagcgcactggcatgcaggcactgctcgacggcaagtccgtgcataacgcgcaaccccgtctgatcgtctgcccggggaactcggccacccaggcggtggccagtgccatggatggcctggcgaccaagctcaaggcgatcgccatcgtcgatggccccaataccgatgacgaatcggctattgcctatttcacaaacttcgggagcaagcgcgtctttgcggtcgacccctggctcaaggtgtgggacaccgagtccggcgcggccagtacggtgccggtgtccccgtatgccgcaggtctctttgccaggaccgatcgcgcatacggtttctgggcctcgccctccaacaaggagttcgtcgaggtcattggcaccgcacgcccaatcgagtttctcgatggggatgagacctgccgcgccaacctgctcaacgccgccaacatcaccacggtcatccgtgatggcggctaccgtctgtggggtaaccgcacgcgttcggccgatgccaagtgggccttcatcacccgggtgcgcacagtcgacatcgtcatggatgccatcctctacggccacaaatgggcggtagaccgctccatcaccaagacctacgtcaaggacgtgaccgaaggcctgcaggccttcatgcgtgatctgaaagcgcagggcgccatcatcaatttcgaggtctaccccgaccccgaactcaacaccgcgagccagcttgagcaaggccgcgtgtactggaacatccgctttactgacgtgcctcccgcagaaaaccccaccttccgggtcgaggtcacgaaccagtggattactgaagttctcgacatttaa

SEQ ID NO: 502420 - DNA, 558 bp, Stenotrophomonas maltophilia
atgcctaaatatgcgtatttcgatcaaaacacgaaagtggttctgcagtggatcgacaccgatatgcaatcctttgtcttgccagatacgtcgcatttgcatgaatgcactgaaattgaatggcgaatgcaatttaagcatgcagccttaattgaatgcgatggcaagctgaaaccataccatccggctttgccggatatatggcaggttcgagaattaatggcgcataaaattcaattagagcgtgaccgtcgcatgcaatatggtggctatgtgttagacggaaagtggttccacagtgattcgaaaagccgaagccagcaacaagcactgtttcttttgggcagcaatttgcccgccggattgcagtggaaaaccatggaaggctcctttgttgccatgacaagccagctcgcacagaggctgttggcaacatcaatggcaagcgatatcgcaatcttcgaggcggcagaggctcatcgcagtgcaatggaagcaagcgccgatcccagcgcctacgacttcacttccggatggccattgatgttcggagaataa

SEQ ID NO: 502421 - DNA, 1932 bp, Stenotrophomonas maltophilia
atgagtcaaacctactttgccatcctgaccgcgattggtgaggccaagctggccaatgccactgcgctcgggaccacgctgcaactgacccagatgggcgtcggtgatggcaacggcagcacgccattgcccaatcgaaaccagaccacattgcttcgagaaaaccgccgcgcaccactgaatcgtctattcgtcgatccggccaatgccagccagatcattgccgagcaggtgatccccgaggaaattggcggttggtggattcgcgagattggcctgttcgacaccgacggcaatctgtgtgcggtggccaactgtccggacacctacaagcccgtgctggccgaaggttcggggcgtacgcaggtgatccgcatggtgctgatcgtgagcaatacctcagcggtgcagctaaagatcgacccagcgattgtgctggccacgcgcgggtatgtggatgagaaaatttcttctgaaatacgcaagcttgattggaagcaaagcgttcgcgttgcaaccaaaggaccagtcgaattgtctgggttgcaaactgttgacggtgtgctcgtttcgtccggggatcgagtattggtaaaagatcaagctttagcaagagagaatggaatttatgtcgcgggggcctctgcttgggcgcggtcgatcgatgccgacttggatttcaaggttactccggggttatttgtatttgttgaggaggggagcgcttacgcggactctctatggcaactcataagtgatggcccgattttaatcggcggaagcgatcttgttttttctatggcagcgggaaagactggtgttgagtcaggggtttacgatgaagttatcgtaaatgcctacggaaaaataattggaggatcaaatccggcaaccccaccccgctttgactattcaacaaaaaaagcaaccactgagtacgtaaaacaagcaggaatacagtcaagcggttttaccgtattcacggcctcagctgtcattccggctgatgcatgtgggtcgatgattcaggctgggcagggttccggaaactacactctgaccttgccaccggtatccagttgtcctgctggcagcagaatcgaaatggtttcgacctctacctatgccgtaagtgtaatttctcaagagggagactccattggcttaggctctttgatactcaatcaaaacgatacgctgcagttgcaaagcaatggccagagtacttggtttgtggttggtgggacagtcctagccaatttgactcagcccggattcaaaaccaaggggcaacaacgatttacagttaatgggttgttcatcgttccacttggcgtaacccagatctacgtttctggatgtggtggcggaggcggtggtgggggtacaggtggcggaaactcaacgggtagttgggttaccagcggcggcggcggaggtggcggtgctgcgcagttcgttattcgccagccctttcctgtcgttccggcgcaaacactaaccatcactattggtggcgccggcagtggtggggcctcgggaggcgtggcaggcaacggacagccaggaacagctggcggaaacacgaccctcgtgggaacgggagtttctttgatattggctggtgggggtggtggtcagccaagcctgggggtcactggatctaatattgcttcaattccgggcgcaggtggaaattcctcggcaatgcctggtgcatattctcttgcaattggaaattatgggtatgactttcctggcatcgggggaatggggggaggcacaccttacgggaccggtggtggtgctggagcccccgcgtcaggatttggctccggtggagggggggcatctggcatgctcaccggatcaaccgcattcggcaatgcgggcgcgtcaggtgcccctggtctgttaatagttgagtggtga

SEQ ID NO: 502422 - DNA, 639 bp, Stenotrophomonas maltophilia
atgcacgcggcaacgcgacagcagcgccgagttcagctcgaacgacggattctcggtggtggcgccgacgaacaggatcgtgccgcgctcgatgtgcggcaggaatgcgtcctgctgcgccttgttgaaacgatgcacctcgtccacgaacagcacggtgcgccggccctccgcgaagcgttgcgcggcttcggccagcacctggcgcacctccggcagcccggacagcacggcagagatggcacggaattccgcatccgcgtactcggccagcagcagcgccagcgtggtcttgccgcagcccggcggcccccacaggatcatcgaatgcacgcgaccggactcgaccgcgcggcgcagcgcgctgtccggcgccagcaggcgcttctgcccgaccatttcatcgagggtgcgcgggcgcatgcgctcggccagcgggcgcaggtgctcccgatcaacgctcagcagatcgggaccggggaaggaagtggagcgatgtcttggcacccgcttattgtaccgcgagagcgtgccagcaattccggtagtgccggccgctggccggctgatcccaagcgtgccagacaacggttggcacccaccggattcggtagcgccgggccatgcccggcgccctga

SEQ ID NO: 502423 - DNA, 453 bp, Stenotrophomonas maltophilia
atgaagggattgaagcttgcaactgccgcggtcgcgtgcggcctgatctttgtgccacccgtgttggcttctggagccgagtcctcgaagacagcggagaggacagcggaagatccgggcgactatgccgagttggttgcactgcttgagcacgagatttccgccaagttgactcgccatctgcaagagaagggcaggttgcgccaggtgactgtgagcgtagtggtcgttccgcagaagcgcagaatggtcgtcgagttcggccccggatatcttccaggcaatgaacagaactatggagagctcttcctcataccgctggccgctgatcttcggcactactcgaatcaggcgggcctggacatcctggacgtggagttccttttccagggtaagccaatcgaggcgcatttcccggaagatcaccctgttcttacgcggacgacgtcctga

SEQ ID NO: 502424 - DNA, 456 bp, Stenotrophomonas maltophilia
atgacgttcaatctggaagaagcccgcgaggcttttgagcaattccttatgctgatggacggccagatagaatggctggtcgcgcaggctcaaacgcatggcattgaactggatggcagccccgaaagcctcgacaggctggaacgcctccatgacttgatggcagccacgctgtctgaggacgagcgggactctctgagggtcgtgttcgcccgatatctaggggagaccgtcaggctggtacacggtgggaagtgggccctgccacttgatgaccctaaggacatccacttcaacaggcccgtcatcattggtcactcacgctaccccctgtgtgagttcagtcccatccatgcgattcgcgcctactcgcttcgccgccgcccggggctgatcagaagcatcgtagccagcagcgttgatccgcagatcctggacctatcagaagcatcgtag

SEQ ID NO: 502425 - DNA, 546 bp, Stenotrophomonas maltophilia
atgcgccctgcccatgccccctgccccgtcggcccccgcccagcgcggggcgttcacctgaccgaactgctggtggtggtcgtggtgctggcggtgctgctggccgcgtcctggccggcgctgcagcccctcctgctgcggcaacgcgccgatgcactgcaactgaacctgcacgccagcctgtccggcgcccgcagcgaggccttgcgcaggcgcgagctgatcggcgtctgtgcaagtgtcgacggcctgcactgcaacgacgactggagcgccggctggatcatctaccgcagcggcgagcagcgcggggagcccgcgtcgccagaggcgatcctggtccaccacaccgggcgtccggacatcgcggtcgtagcgcgggcaagcagcgggcgcccccggttgttcttccagccagacggacgcagcccgggagccaacctgaccctgcgcatctgcgcgggtggccggctgcacggcgcgctggtcgtcaacaacggcggccgcacccgaagcgaacgcgcagatcgcaacgcaccctgctga

SEQ ID NO: 502426 - DNA, 225 bp, Stenotrophomonas maltophilia
atgacggttcccggcagcggcgggcgcttccgcctgagggcgagtgtagacctgtacacgcaccgttgcggtgaccgctggtcgggccggatgttcatccacaaccggtgtggaccagtgctcgacaaagctgtggacaaccgcgtccaggcctggccgggcaagcattgtgagcggctggtgaaaaaatcgcccgcttgcccgccgccgacgcaggcgggatga

SEQ ID NO: 502427 - DNA, 561 bp, Stenotrophomonas maltophilia
atggggtttctggcacgcggcgacattcatgcagttggagaagatgtgagcacagcaacggtgtgcatcggcctgcaagcgcaggtgaacgtggactgcagggtgctggtgctgggctcgatgccaggcgcggcgtcgctgcagcagcagcggtattacgcccatccgcgcaaccgcttctggccgctgatggccgacatctgcggtttcagcgtggacctgccctacgcagcgcggctgcaggcgttgaacgctgcgggcatcggcctgtgggatgtgatcggccgctgcgagcggcgcggcagcctggatgcggacatcgtgcgcggcacggaagtggccaatgcgctgccggaactgatcgccacgctgcctgagctgacgctgatcggctgcaatggcggtgcatcactgcaggccttccagcgctgggtgctgccgcggctggaggcgccgccaccggtggtcgcgttgccgtcaaccagccctgccaatgccgcgtggtcgctgccgcgcctgcgcaaggcctggcaaccggtcgctgacgcacgggcgacatga

SEQ ID NO: 502428 - DNA, 1983 bp, Stenotrophomonas maltophilia
atggccgaaatcaaggaagcacttgtccccgatatcggtgactacagcgatatcccggtaatcgaggtgcttgtcgccgtcggcgacacggtcaagaaggaccagggcctggtgacgctggaaagcgacaaggcgaccatggaagtgccgtcgtcggtggcgggcgtggtcaaggaactcaaggtcaaggtcggcgacagcctgtccgaaggcaaggtcgtggcgctgatcgaagtggccgaaggcgaagccgcctcgccggccgccgccgcaccggccccggccaaggccgctgccccggctgccccggctgccagcggcggtgcggttgaagcccgggtgccggacattggcgattacaccgacatcccggtcatcgaagtgctggtcgccgtgggcgacacggtcaagaaggaccagggcctggtgacgctggaaagcgacaaggcgaccatggaagtgccgtcgtcggtggcgggcgtggtcaaggaactcaaggtcaaggtcggcgacagcctgtccgaaggcaaggtcgtggcgctgatcgaagtggccgaaggcgaagccgcctcgccggccgccgccgcaccggccccggccaaggccgctgccccggctgccccggctgccagcggcggtgcggttgaagcccgggtgccggacattggcgattacaccgacatcccggtcatcgaagtgctggtcgccgtgggcgacacggtcaagaaggaccagggcctggtgacgctggaaagcgacaaggcgaccatggaagtgccgtcgtcggtggccggcgtggtcaaggagctgaaggtcaaggtcggcgacaccctgtcgcagggtgccgtggtcgccatcatcgaggccgaaggcgctgccgcaccggccccgagcaaggccgccgctgccgccgcaccggccgccgccgaaaccgcgaccaaggtcgagccggtcgcggtgcctgcgcagccggacaagctggcggcccgcgaaatcgcctcggccggcaccccgtccagcccgccggtgcagttcaacgccgacggcgtgctgccggccaaggtgccgtacgccaccccggccgtgcgcgtgttcgcccgcgagctgggcgtggacctgctgcaggtcaacggcaccgagaagggcggccgcatcaccaagggcgacgtgcagaagttcgtcaaggccgcgctcagcggcggcgtgccggctgccggcggtggcgccgtcgccgccggtggtggcctgaacctgctgccgtggccgaaggtcgacttcagcaagttcggcgagaccgaagtccagccgctgtcgcgcatcaaaaagatctccggtgcgaacctggcccgcaactgggcgatgatcccgcacgtgacccagttcgaacaggccgacatcaccgacctggaagccctgcgcgtggcgctgaacaaggagaacgagaaggccggcatcaagctgaccatgctcgccttcctgatcaaggccagcgctgcggcgctgaagaagttcccggagttcaacgcctcgctcgatgccagcggcgaaaacctgaccctgaagaagtacttccacatcggctttgccgccgacacgccgaacggcctggtcgtgccggtcatccgcgacgtggacaagaagggcgtggtgcagatcgcgcaggaaaccggcgaactggccaagaaggcgcgcgacggcaagctgggcccggccgacatgagcggcggctgcttctcgatcagctcgctgggtggcatcggcggcaccgcgttcaccccgatcgtcaatgcaccggaagtggccatcctgggcgtctccaagtcgtccatccagccggtctggaacggcaaggacttcgcgccgaagctgatgctgccgctgtcgctgagctacgaccaccgcgtcatcgatggcgccctggccgcacgcttcaccacgtacctgtcgcaggtactggccgacatgcgccgcgtgctgctgtaa

SEQ ID NO: 502429 - DNA, 1809 bp, Stenotrophomonas maltophilia
atggccacgattgaagtcaaggttcccgacatcggcgattacagcgatgtgccggtgattgaagtgttggtcgccgtcggcgacacggtgaagaaggatcagggtctggtgaccctggaatcggacaaggccaccctggaagtgccgtcctcggccgccggcgtggtgaaggaaatcaaggtcaagctgggcgacaccctgtccgaaggcgccgtggtcgtggtgctggatgctgaaggtgccgctgaagccccggccaaggccgctgcgccggcgcccgctgcggccgccccggccagcaagccgccggtgaccccgtcgcaccgtgccccggccgagccggccgcgccgaagccggcgctgtccagcggcaagccggccgacatcgaatgcgagatggtcgtgctgggctccggcccgggcggttacaccgccgccttccgcgctgccgatgtcggcctggatacggtgctggtcgagcgctacgccagcctcggcggcgtctgcctcaacgtgggctgcattccgtccaaggcgctgctgcatgctgctgcggtgatcgacgaagtggcccatgccggtgatttcggcgtcgagttcggcaagccgaccatcaccctggacaagctgcgccagtacaaggaaaaggtcgtcaaccagctgaccaagggcctggccggcatggccaagcagcgcaaggtgcgcaacgtgcagggcgtcggcaggtttgtttcggccaacgagctggaaatcaccgccgctgacggcagcacccagctcctgcgcttccagaagtgcatcatcgccgccggttcgcaggcggtgaagctgccgaacttcccgtgggacgacaaacgcgtgatggattccaccgacgcgctggagctggccgaagtgccgggctcgctgctggtcgtcggtggcggcatcatcggcctggaaatggccaccgtgtacagcgcgctgggcagcaaggtcaccgtggtcgagttcatggaccagctgatgccgggtgccgacaaggacctggtcaagccgctggccgaccgcctgaagaagcagggcatcgatgtgcacctgaagaccaaggcatcgggtgtcactgccgacgccaagggcatcaccgtgaccttcgacgccgccgaggaaggccaggcgccggcgctggcgcagggcaccttcgaccgcgtgctggtggccgtgggccgttcgccgaacggcaagaagattgatgccgaaaaggccggcgtgcaggtcaccgatcgtggcttcatcccggtcgatcggcagatgcgcaccaacgtgccgcacatctttgccatcggcgatatcgtcggcaacccgatgctggcccacaaggccacgcacgagggcaagctggcggccgaagtggcggccggccacaagaaggagtgggtggcccgcgtgattccgtcggtggcctacaccaacccggaaatcgcctgggttggcgtcaccgagaccgaagccaaggccaagggcctgaaggtcggcgtggccaagttcccgtgggcggccagcggccgcgcgatcggcatcggtcgcaccgagggcttcaccaagctgatcttcgacgaagagacgcaccgcatcatcggtggcgcgatcgttggcgtgcatgccggtgacctgctggccgagatcggtctggcgatcgagatgggtgcggaagccgaggacatcggccacaccatccacgcccacccgacgctgagcgagtcggtggcgatggcctcggaaatctacgacggcacgatcaccgatctgtacatgccgaagaagaagtaa

SEQ ID NO: 502430 - DNA, 816 bp, Stenotrophomonas maltophilia
atggaacatcccgcttcttcgcccaccggcaatctgatcaagatctatcgctacggccaaggggccatctacttcctgatggtctctggcgccggcaccctgctgctcgcggcatttctgttctccgtcaggaacaaggcgcctgctgatgcgcagtccgccattctctgggccattgcactgctcgtggcaatcgcctgcggcttcttcgcagtggtgccgtggcagaggcgcctgcgcgcagcccgtcatgaggtgtatgagcacggtctggtgcaggtcatcggctcgcagcgcagctatgtggcgtttgccgagatggaggatgtgtatctcttcagttctggtcagacggtgctcacagggttgatgagcaaccttgcctatcgtcgagacagcaccgacacgttccactggtcgaacgacagtctcaagcgcttctacgaattccagcaggtcgtacgcgaactacatgtacacgagcgactgcccgtgatgatcgcagcccttcaggccggtgagacggttaccttcaactatgttcccacgggggaagtctggaagaagcgggtatcgggccggttcctcgaggtgtccacccgccccatcactctcagccgggactgcttgcaggtcgagggccgcagcgtgcccatctcgaccctgcgtgacgtcgacgtcagcacatggacggagaaggtcaccctcaaggatgcaatggggaccaccatgttctccgcgatgggcgtgggcatcctcagcttcgacctctttctcgagacagtcggctggctggtgcaggacgcgcaacgctaa

SEQ ID NO: 502431 - DNA, 483 bp, Stenotrophomonas maltophilia
gtgccggccggcagcttcgtgaagggcgagctgaagtaccaggtggccagcctggtctacgactactcggtcgtcgataccgacaccttcgacctgggcctgcagatcggtggcgagtacgccaaggtcagcaccaagggctacgccgacctgggcactgtgtacgaaggccagtttctcaacgagaaggccgacggcgtggcaccggtggtgggtgcacgcatgaccttcactccgtccgagcgctggatgatcacgctgcagggccagtacctcaacacgcgctggggcagcttcgatgactacaagggcgacctgagccgcgccaatgcgatcgtcgattatcgcttcaccaagaacttcggcgtgttcgccggctacgactggttcaagctggacgtggacaagaagggcagcgacggcacggtcggcctgaagcaggagttcaagggcccggtggccggtatcagcttcgtgttctga

SEQ ID NO: 502432 - DNA, 327 bp, Stenotrophomonas maltophilia
atgagcgcgcagccaacgctgcccgtcgagcagcagttcgccaccggccaccagggcgagtcgctggtgctgatggtgtgccaaggctggttatgggccggcctctacaccgccgccccgcgcgagtcgctcctgaaggtcgccgccagcgccagccgcagcgtgggggtatcgcaccactcgctcaccctcggtggcgtctcgttctctctcaaccgacttgccgcgcaggccgcgcaccgctggctcgaccgccaaggcgtgcgcgttcgttcgatctcccccaacaaccgcgctacgcgccgcacgcgaggaatcgccgcatga

SEQ ID NO: 502433 - DNA, 240 bp, Stenotrophomonas maltophilia
atgaaccgttctgttgtcatctacgggccgcaacgctgcggcaagacctccaactcacaggaactgcgcgcgcactttggcctgcgtgaggtactggacgactgggacggccacaccgcgtatcccctggaggacacgctcgtcctgaccaacaatccggatgccgttgctcaccactcatcgcgcgtcctgcaccacggctgggcaatgcgcgaaatgctcgcggaggcccgagcatga

SEQ ID NO: 502434 - DNA, 714 bp, Stenotrophomonas maltophilia
atgaccgagaaacttgccactctccccacgaactgccgcgttctacgggacgcattcgacacgatcaccgcgattgcggtcgaggccgtgtggctgccgaaccaggcaaaggccatcacggtcacccaggcgcagaccgcgctgcgtgacctgcatcatcgcctgccccggcagcaggatttgcgcgtgttcgaagcccccgtagccgcgtatgtctcgacgctgcgtagcagcctgcaggacggcgacacgccgctctgcgataccacccgtgcccggctggcgcaggcgactgaattgctggagctggtcaggaatcagactcgcaccgtggtcgatccggccgacccgtggcgtggcctgtaccaccccagtcgcctcccggcgcgcaacgccgacggcgagatcccgtgccatccggatgtgccgatgtgggctgacggtcgggaggtgtcgctgcggccgttgttcctcgcacagggattcgacctggtcgtggtcgagggcgagttttccgaagagggcatcggatcgggcgtctacagcaccgcacaggaactgcacgactggaacccggaggcacctggagaggactggcgtctggcgtggctaggcgagacggaagacggcctcgctgcgtggttcgtgcggccgctggcaatcgctgcaatggagacgccgaccgcagtcccctccccatcggacgcagcctga

SEQ ID NO: 502435 - DNA, 240 bp, Stenotrophomonas maltophilia
atggacccaacgctgagcgagcggcaccaccgataccgggtcaaggccggcagagcaaaggccgcgctttacgcccgcgtggtcgagaacaagcgctacacgatgcgccagatcgctgacgaactgggcgtgtcgttgaccacagcagacacgcgggtgaagcgtggtccatatcccctcacctgggaatcgctgcgcctggcgcgccttcccgccaacaacaaggacatgcaggcatga

SEQ ID NO: 502436 - DNA, 807 bp, Stenotrophomonas maltophilia
atgagcaatgacatcaggaccctggcggacgtgcagcccggtgggagggtgaggctgggggatcaggccgagcgggcgcggtttgaggcgtgggcggagtctgagggctaccacgttgaacggcagcaacgcggaaacgtcggtgattacacccgcgatgaagtccgcgagttgtggggcatgtggctattgaatccgcagcagttgctggacgccgcaaagaagaaggcgacaagctacggtcgcgcaagtgtgcaggacggcgcttcctgcgcgggagccagccaagctggtcatggtggccacgtccgtgatgcacgaaaggcccttgataaggcactggcggtaatgtcagccaaggccgccctctccgcccagccctccccgggtggtcaggagtacgcatggaacatcgccgaactggtgcgcgtcgatcttgatcgccagtcttgcccggacgcctacatgcgtattgccatggaatcggtcgtcaagcacctcgccgcccgccagccggtgggagagccggtgggctacttgtttactgacgatcctgcggtctatgcgatgccgggctctggcttccactcaggtgccgagccgccgaagaatgcgattaacgtggtgccgctctacaccgccccgcccgcgcaggccgtggacctggaagaactgcgccgagccgtctgcgttgtcaacgtagtcggccagatcgatgggcacgacgtggtgcgccgcaactcggtgctggatgtgatcgactaccggcgacagcgactggtcgacagccaggcggtgggcaaatga

SEQ ID NO: 502437 - DNA, 252 bp, Stenotrophomonas maltophilia
atgatcctgaccaatctcaccatcaggctggaagaatacggcccgaacaaaggcaagcacagtggcaaggccacgttctccggagaggctggaaccgtcatcctcaacctcaacgatcaccacatcgaggagatctttcgcacttgcgccgagagcatcgtcgagacgtcgagggctgctgcgcggcacctcacgcacaacgtcattgagctccagaagagcctcgacagccaggcggtgggcaatggataa

SEQ ID NO: 502438 - DNA, 255 bp, Stenotrophomonas maltophilia
atggataagccagagatcatcggcggcgacgccgtctatgagacgaacgaaaagctctgctcgttctcgatgcgatgggaactggatggcgactacatgcggtgcagaatctgccagcggccacagctgaccagctacgcacgctaccccttcccgcatgttgacggctgcaagggcgcacaggcccatgaggcgcatccgtggatcacgtttgtgcagctgctggctccgctcagccaggcggtgggcaaatga

SEQ ID NO: 502439 - DNA, 1074 bp, Stenotrophomonas maltophilia
atgatccacgtcggagactgtctggaagtgatgcgcggcatggccgacaactcggtcgacgccatcgtgaccgatccgccctacggcttgtcgttcatgggcaagcgctgggattacgacgtgcccagaaccgaggtgtgggccgagtgcctgcgtgtgttgaagccgggcgggcatctgcttgccttcgccggcacccgcacacagcaccggatggccgtgcgcatcgaggatgccggcttcgagatccgcgacatgattgcgtgggtctacggcagcggcttcccgaagtcgcacaacgggccgtggggtggaaccgccctgaagcccgcgctcgagccgattaccgtcggccgaaaaccgcttgccggaacggtggaaaccaactggcgcgaacacggaactggtgccctaaacaccgatgcctgcggcattggagcaaagtttagcgagggcggacgctggccggccaacctgatccacgatggcagtgacgaagtcctttctgcgttcccggttacgccaggtcagatggccgatgccagcaccgatgctgacgcgaggaagacccagaacacttatcgcaacatgcggcgcggtcgcggcgaggcgcgtgcgggctccgcgaatctgggcgacgtggggttcaagatgcgccccggagcgcggcgcatggacaccggcagtgccgcgcgctttttctactgcgccaaggccagcaaggcagaccgcgatactggtctggatggcttcaacaagacggcagccggcatggtatccaataccagtgggcagcacatcacccggcgcgaggacggctatcaggccacggcacgggcgaacaaccaccccaccgtcaagccgactgagttgatgcgctatttatgccgtctggtcacccctgccggcggcattgtgctggacccatttatgggcagcggcagcaccggcaaggccgcagtgctcgaaggcttccagttcatcggcatcgaggaggaccccgcatatgccgcaatcgcagaggctcgtatctgtgcggtgcagcccggcctgtcactggaaggtgtcgcatga

SEQ ID NO: 502440 - DNA, 237 bp, Stenotrophomonas maltophilia
atgaccgcgtccatgactgagcagctgctcgctgtaccccccgttcgcacagtagtgaacgcgaaattcgtcgccagccccggagtatccgtactggagggtcgataccagtgcgaactggattgcggtcacatcgtcatccgcccaggagagcacgtgcgcggcaccagattctccattcgtgcgccccagagcgccacatgcaaccagtgcaagaaggagcccgcccatggctga

SEQ ID NO: 502441 - DNA, 180 bp, Stenotrophomonas maltophilia
atggctgatcgagagccgtacggacgcaacggcgacgacatggatctgcccgaaggaaagacctgcggcgactgcgttcattgccggcgttgcaccgccatgttcggccacatccctgcagacgaaagctgtgactggtcgccgtctcgattccgggcggccgaaggggccacgcattga

SEQ ID NO: 502442 - DNA, 222 bp, Stenotrophomonas maltophilia
ttgatcggcgagatcctccaattccgtgacctgcaggagctctgccagcccgggaagcgcccgcgtctggcaacggtcgaacgctgggcgcgcgatcgccacatccgctttcagtacgacgcttctggcggcatctggactacgacaacagccctgaacgaggccctgggcctcacagcacccgccagcaatggcgatacctattccaccgacctgctctaa

SEQ ID NO: 502443 - DNA, 1194 bp, Stenotrophomonas maltophilia
atggcacgccctcgcaaggttccatcgaacctacccaagcacatcgactacgacaaggtgccccaaggcctctactgggacgggaccggccgtgggcgatggtatgtgcgcgatccacaccccgaggggcacggaacgaagtgcaagaccgtggccggcccagccgcccgcctatcggatctgcatgcaatcgcggaagcgcgctgcggcgaggctcagagaggcaccgtcgcctacgtcatcgatcaacatgcaaagagcttcgccttctcccaactcggcgcaaccacgcagcagcactatcgcgactacgcgaaggcaatcaaggttttcccgctgaagaacggtagcaagctgggtgatgccgtcgtggaccgcctgtcccctgggttcatccgccgcctgatcgacatcatcgcccaaggccggccaggcacaaagcctggtgatgcagccattcccggctacccgaccaaggcgaatcactggctcagctacctgcgccgcgtctttggctgggcgcgcgagcacgaccatgtgaccaccaaccccgccgccggcatcaagaaggtcaaggagaagcgcgatcaccgaatgcctgagcgcgatgttttccgccgggtgcaggattacgcacgccgctgcagtgagcgcggcgcgcgcgaaaagggggcactgccggtctacctatgggcagccatggagctggcctaccaggctcgcctgcgcggcatcgaggtgcgcacacttaccgatcaccatgtggagggtgaggtcctgcagaccaaccgccgcaaggggagccgcgacaacctggtgcgcaagggcgagcagactgaagtcgcgatccaggttctgcaggatcgccgtgctgccatctgggccaaacgcggcattactcagttcaatgcacccctgtcgcccaagatgcgtccgctgttcgtcagcgaagacgggcagatgctcacccaccacggctggcacaccacctgggggcgtctcatgcggaatgctgtcagggacggcatcatcgacgagggtgagcgtttcgcgcttcacggcctaaagcatcgcggcgtgaccgacaccaagggcaacaagaaggaagctagtggccataagactgatgcaatgctgcacgtctatgaccattcgcttcctctagtgaccgaatctgacacggaccagggttag

SEQ ID NO: 502444 - DNA, 555 bp, Stenotrophomonas maltophilia
atgagcgaagcctatgagctgtacgtccgtgcgccggacgctagtgctcgctcaatggatgacatgatttgggtagttggtgaatatcttcagaagaaggtagaagtcaacgatctggatgtactcgcggatgacaaagtgatccgaggcatgttcgctgcattcgacgatgggcactatgagatctttctgctcggcgagctgaatgagcgcgagcgtcgagtggtgaccacgaaagagatgatgcatgttctcttggatgaagaggactgccgcaacatggacatctacgggcatgtgcaggaggccgcgtcttcgttcagcattgagaacgaggacgccaatccggagtcgccggttgcaaccgaatttctggcggaaatcgccgcaatggaattcctccttccctacgccaagcgcaaggcgatcttggagcacgggaacggggagcctgactacgcaatggttgctcgggtttacggcatcccacaggtatatgtcgaggaatatctcagcgaccggatgatgtcggaattcgcaaaaatcatggtctga

SEQ ID NO: 502445 - DNA, 225 bp, Stenotrophomonas maltophilia
atggggcaggcaatggtgaacgacatgagcgcaaagaatcgactgcaaggcctggaagccaagctgcgtgagcgcggggtcgtggacgtcaagttcttcttcgatcacacccgcaagccgctgctgactggcgccgtttcggacgttatcgaggtgctggatgccgtggttggtagccgtttcgagaaggccgccgccttcggcgactctgtgcacgctgcgtaa

SEQ ID NO: 502446 - DNA, 933 bp, Stenotrophomonas maltophilia
atgcaggacggggtcaggcgtcaagaatggcgtccgccggccgttgaggtcggggacgtggaggattcgttcgcgcatgaagccagccgactgcacaaggaacatcgaccgatgcccgcgctgaagcgggcgttggcccggccgttgcgcgccattacctggggcggcgtgctgctgggcgtgctgctggtggccggcctgaccctgatgctggtcaacgaccaccaccgccgcctggaagcagcgcagcggcagagccgcgcgctggcggtgggcagcgagcgcctgctggccctggagctgcgcaacctggagcgggccatgtccggcatcgccgccgacgccgcggaactgttccgcagtgtgccggcgcaggcgccggccctgctcgatgcgtccatcggcggcgtgctgcgccggcacgccgaactgcacagcatcgtggtgctcgacagctatggccgcgcattgacggccggcaagggcgacctgcagttgccgctgtggaccgatccgcaacggcgcggcccgggcagcgcgctgtacatcggcccgccgcagcgcgccagcgacgggggctgggtggtcccgctggcgctgccgatggccgatgggcgctggctgctggcacggctgcgctgtggcgaactgcagcgcatcgtcggcggcctggatgtcggtcccaacggattggtctcgatcagcgacgcccagggctacatgctggcccgcgtacccgatccgcatggcacggtgggtcgccgttatgacctgccgcgtcgggacctgctcggcacgcaggcagtggtcgagctgggcagcatgcccggcgtcgtcgacggcgtgccgcgcatcctcaccatcagcacgctcgaacgcagtccgctggcggtacaggtcgggttggccgacgaggacgtgctcgcaccctga

SEQ ID NO: 502447 - DNA, 1071 bp, Stenotrophomonas maltophilia
atgcgccctgccgtcgccctgttcgccgccgtgctgggactgctgcctctggccgataccgccgcgccggtgctgaccccaccggacgccggcgtcgacggcctgatgcaggcctacgatcgccaggtgcccggcgccgcagtcctggtgctgcacgacgggcaaccggtgttccgccgtggctacggcctggcggtggtggaggacggcaccgccgtcacccccgcaagcaacttccggctggcctcggtcagcaagcagttcaccgctgcggcggtgctgctgctggtggaagacggtcggctcgggctggaccagccggcccggcgctggctgcccgaactgccgccggctgccgccgccatcactatccgccagctgctctcgcacaccagcggcctgctcgactacgaagacctgatggatccggctgaccctcggcaggtgcatgacgccgatgtactggccctgctgtcgcgccaggaccgcctgaatttcgcgcccggcacgcagtaccactacagcaacagcggctatgcgctgctggcactgatcgtcagccgcgcctccggccaggatttcgccgccttcctgcagcagcgcatcttccgcccactgggcatggcccacaccgtggcccaccaggacggcatcgacaccgttgccgcgcgggcctacggctacagctggctcgagggccgctggcagcgcaccgaccagagcaccaccagtgccgtgctcggcgatggcggcatctattcctcgctggacgacctggcccgctgggatgcggcgctgtacgacgaccgcctgctgtcgaaggcctcgcgccgcgcgatgttcagcccggccacgtcgacgcccgaaccggatgtgccgcactacggcttcggctggcgcctgaatggtgcggtgcaatggcatagcggcgagagcatcggcttccgcaacgtgatcgtgcgccatccggaaaagcacctgaccgtgatcgtgctgaccaaccgcaattcccccgagccctacccgctggcgcagaagatcgcccagcgctggctggacgtgctgcaatga

SEQ ID NO: 502448 - DNA, 216 bp, Stenotrophomonas maltophilia
atgaccaagatcgacccgacatggctggaagccttcgacaaggagctcctccacctgtttgccatcgaccatagcgacgccggcatggatgagtacctgctgggctgctacgcagaccttcccccacgcgacgcggcgctggcgttcggcagcgactacgacctggagcgcgacgatgcgctgtggccacggccgggcgtggcgctgcaaagttaa

SEQ ID NO: 502449 - DNA, 705 bp, Stenotrophomonas maltophilia
atgagtaatcagctttgtgatgctcttttggcggtgagttggcaggagaatgttgaggcgttctgtcgagaagactcgcatattaaagatatacattcggctatcgcaaagattgccatgttggctcgtcaaattcaggtcgtagaagatggtaatccggcattgccatttgttcacgagatgcagttgtcaggtcacgatgtggttcgttgtatttcgctgtcactttataagcctgcagtatcggcgatgaggtcaatgctggagtgcgcgatttactattgctattttcggtcgcatccagttgagctgaagactttggtgagggatgaaaagttttacttgtccaaatcggaaataattgactatttccaaattcatgttgaaggctggaagaagaagcaatcggcaattgcgctagtgtcgcgcttggattcgtggtattcaaaagtttcggcaatcatacacgggcaaatccctgggcattggaataagtcactggcaataagtgattcttcgcatagtgaagaattgctgagggatacggttaatctagcggtgaactgtgcggacatttccagggatgtcgtgatttgctcatttatggatgaagcttggagatacgttgagacggatgcaaagcgagaacttctccacggcacatctgcagactatcgagagaagctgaagctcgatagggcatga

SEQ ID NO: 502450 - DNA, 873 bp, Stenotrophomonas maltophilia
atgggtaaagttgttacggtcatgaacatgaagggcggtgtgggaaagaccacagtggcgctcaacgttgctggagctcttggctactacaaatggcgagacaagccgacccgaaaggttctggtaattgactacgatccgcaattcaatctgtcgcaggcatatattccgcctgcagaatactttcgcttggatcaagagcgaaaaacaattctctctgttttacaggagagcgccaaggaccttgatccatacagaataaagatcccggaaacttcccagcctcctggcgtgggggatttaactaggggcgtgttttcttatgataatggttcttcgctcagcatagttccatcgacacttgatcttatgtatgtggcgctggggcgagctgagactcagatttctgttattgaaaaaagattctcaaaattcatcgatgaatgcaggcgcacatttgatcttgttgtgattgattgccacccggctggatcgctcatgactaaaaccgcacttggcaattcggatcatgttcttattcctgtcgtgcctgagagatacgcggtacgaggaattggtttgatgcttgacttcatcgagtctaagaaactgggtgggcatggccctgttcctcatattcttttcaataaggctcctctaactggaagtactgtggaggaattgacgattcgttctgatgctaagtattctaaatactgtatgagaaatacgctgaaaagatataaggcattttcggagccggagggtgggaaaggctttgtctggcacaataagaagccccatagtaagaaggctcgcgccaacctccagaatgtggcatttgaattggctgaaaggacaggggtttggtaa

SEQ ID NO: 502451 - DNA, 618 bp, Stenotrophomonas maltophilia
atgagtgattgcggctgccaccacgaggccaagaacgcgcaggagcggcgcgtgctctggatcgcccttgccctgaatgcggcgatggccgtgatcggcggcatcgccggctgggtcgcccattccacaggcctattggccgacgcgctggacatgctgtctgacgccaccgcctacgccattggcctggtcgccatcgggcgcacggcccgcttcaaggcgaacgcagcctgggtcagcggcagtgtattgctggtgctgggcgtgggtgtgctggtggaggtcggccgtcgcgtgatgtacggcgccgagccggtcagtggctggatgatcggcacggcgctgctgtcgctggtggtcaatatgaccgtgctgcgcatgctggcgccgctgaagtccggcgaggtgcacctgcgggcgacctggttgttcacccgcgccgatgtggtagccaacgtcggggtgatcctggccggcctgttggtgtggtggctggccagcccgtacccggatttcgtgatcggcgccctgatcggcctgtatgtgatcaaggaggccttcgagattcttggtgatgctcgccgggcacgtgccgacgcgcgcaagacccctgcatga

SEQ ID NO: 502452 - DNA, 468 bp, Stenotrophomonas maltophilia
atgaacgagatcaacctggaacaggtgcgtgcggcgatgtttaccgaccccagcgtgaaggcggtcgatgacctgcgcctagtccccgccaaagagcatggccgcgcgatcgcggccaccatcacggtcgctgcgccctcggtcgacctggacctggtgcacgcggtgaccgcccgcgtgctggctgaccgtggcagccaatttcgtagcggcgattaccaggattacctggccgccaatggcctgctctgctcgatgagtgcggtggggcattgtggcgacaatgcagcctgcgagggctttttcggattgctcaagcgcgagcggatctatcgcacaacgtatcccacactcgatgccgcccggtccgatgtgttcgaatacatgagcgccgccacaaccccaggatgcgacggcgtcgggtcaagcaggaccagaagttttcagccctttccaaacagtccgtga

SEQ ID NO: 502453 - DNA, 1278 bp, Stenotrophomonas maltophilia
atggctggccagtcaggctgcaatatcaactgtgccacttcagtgggtgcctcgctcaaccagcggtgtgcatgcgaagtagtcgacgtcttgcggctgcacgagtcgatccgggccgccttctcggagtccatgtctgacccggccgttcacgcacatctgttctctcggtacgccctgttcgtcgaccgtgcggcgttggacgccatggggcgagtcgcggcggcgctcttcgaagttgcagagaatccacgataccgcgagcgcgtcctgcaatgggcccccgacatcgcaacccattacccgggttcggcgggtggcgtcctggggctggactttcacctgaccgtcgacggcccgcggttgatcgaggtcaacaccaatccaggcgggctgctcctcaatgccgtgctgctcgatgccgtgagatcttgcgcgccggctgcgtggaccacctggaccacggcgacggaggcccatagcgcggctgtagccgcctggcttgacgatgcccggcagcagtcgggccgcgcgccgtcccgtgtggccatcgtggacagcgccccgcgggagcagttcctctaccccgagttcgagctgtacgcggacgcattccgggagcacggcgtggactgcgtgatacgcgcgcccgaggatctgaggttcggcccggaggggcttgcagatgccgacggcccgatcgacatggtctacaaccggttgaccgatttcgcgcttgaggaagcttcgcatgcggaccttcgtcaggcttatctcgcaggggacgtcgcactcaccccgcatccgcgtgcgcacgcgctgttcgccgacaagcgcaacctggcggtgcttggagacgcggctttgctcggcgggtttggggtcgatgcgggtttgacagccctgctggccgaggtgatcccgacaacggttgaagtcgtccccggaaaccgggatgcgctgtgggcagcgcgcaacggctacttcttcaagcctgcagcagggttcggcagccgtggcagctatcggggcgacaagctcacccggcgaacgtgggagtcgatggcgtcggcgacctacatcgcacaggccttcgtgccaccgagcatgcggatcgtgcatgggggccagtccctcaaggcggacgtgcgctgcttcgcgtccgaggcgggtgtgctgttgttcgcggcccggctttatcagggccagactacgaacatgcgcaccccaggtggtggattcgcagcggtgctcacgacgccactgatcggcgagtaa

SEQ ID NO: 502454 - DNA, 822 bp, Stenotrophomonas maltophilia
atggtcgagtccgccgattcccgtggccatggccgcgatggactgcgcgatccggactgcgaagaggtccacggcaagctgggcctgcgggccaggatcggcaagcagcacgcgcatatcgccgtgcccggcgatgccggcaagacctgcagtgcgggacaaaccatcttcaatcgcttgcgcgtccagccgttcgtgcctgagcaggtacagcaacgcaccgggatcgagatccccggagcgggtagggctcgggattccccccagcggagtgagcgccatggtggtgtcgcggctccgaccgtcctcgacggcgcagacgctgcaaccaccccccagatgcgcgaagacggcgcggctccgcaggattccggcgtcctggctggccacgactcgcagtgcagaggcgaaggcgagtccgtggaaaccgtagcggcggacgcccagcgcatcccatgcttcggggatgggcaggcgctggctccagggtgcgagtgtcacgtggaagtccgtgtcgaaggccacgccctggcgggcttgcggccaacgcaggcgcgcggcacgcgcgaacgcgagggcgaccggctggtgcaagggtgcgaatggcaccaaggcatccagtttcgcaagtacatcttcgtcgagctcgctggcgttgcgcaggtcgccgccatgtacgattcggtggaccaccacgtcggggccgggcgccggtatcgacaatatttcgagcagggtggcaagtcgctcttgcgcatccgcgccgacggcaatctgagggtcggccgggattcgtgtaaaaaacggccgaaagtgagctaa

SEQ ID NO: 502455 - DNA, 312 bp, Stenotrophomonas maltophilia
atgaagaaagcgggcttcgcgctggacgtgcacgacatggatgacctgggcccagtgaaggagcgactgggtgtgccctacgcaaaggggtcctgccacaccaccgagatcgccggatacgtgatcgaaggccatgttccagccgccgacatcaagcgcctccttgaggaaaggccggacgcccggggcctggtcctgcccggaatgccgctcgggtcgccgggcatggaagtcccggatgggcgccagcagccctacacggtcgaactggtccatcacgacggaaccaccgaaccattcgcgcagcactga

SEQ ID NO: 502456 - DNA, 510 bp, Stenotrophomonas maltophilia
atgaacgtaacacccgtcaccctcgccctcgcactggcatttgccgttgtgtcgcccgctatggcacagacaacccaggcgcatgcacatcaccccgccactgcggcagcggcgaacgtggatgttcctgccgccgccacggccgccgtcgccgtggtagagcggttcaacaccgcactgtccagcgaagacctggcaacggtcggatccctgctcgctcctgacgtcctcatcctcgagtccggtggtgccgagcacagccgcgaggaatatctgggccaccacgccatcagcgacgcggcgttcctcaaggacgcccatcgccaactcctgcgccagcgcgcacgaaccgctggagagttcgcatgggtgggaaccgaaagcgagctgcacgcccagaaggacggcaagcccctgaccgttctgagcaccgagacaatggtgctgaagcagaccgccgacggctggcggatcgtccacatccactggtcctcgcggaccaagcgctga

SEQ ID NO: 502457 - DNA, 768 bp, Stenotrophomonas maltophilia
atgggccatcaacctggtgtcagcgaggacctgccgccgacggccgagccgcgcgagccaatcccggttgtcacgccgacagatcgggctgcggcgttcccggacctcgacgagcacctgatgcatggtgaatcgatcaattcctactgggcgcttgaccggctagaggcgtgggacgcggacgaggacggcaccggcatggcctgggaagcacaaggctgggtgggttccgacttgaaccggctctggctgcgcagcgagggcgagcgtgcaggtggatccaccgagtcggcggatgtggaagtgctgtacggccgagcgatcgcccgatggtgggacgcagtcgccggtgtccgccatgacttcgccttcggcggcgggccgtcgcgcacctatgccgcgctcggtgtgatcggtcttgcgccgtacaaattcgaagtctccgcgacggcctacctaggcgagtccggtcagctcggggtaggcgcggaagccgaatacgaaatgctgttcaccaaccggctgatcggccagtggctggtcgaaggcgaggcctggagcaaggacgatccggcggtgggaatcggcagtgggctgagcaaggtcgaagccggtttccgcttgcgctacgagttccatcgacagttcgcgccctatgtcggcgtggtctgggagcgtgcttacggcggaaccgcagacctccgtcgcgcagcatcaggcgatgttgacgacacccggattgtggcgggcgtccgcatctggttctga

SEQ ID NO: 502458 - DNA, 1887 bp, Stenotrophomonas maltophilia
atgtcatccgattctttcggccgtgccggagggctgtcttccccgtcgcgccgccgctttgttcaaggacttgccgccggaggcgccgccgcggcgcttggcttctggccgcgcaccagctgggccgtcaaggctgaaggcgtgcccaacgtactttctggcaccgagttcgacctgaccatcggcgagacgccgatgaacttcaccggcgccacgcgtcctgccatcacggtcaacggctcgattcctgcaccgctgctgcgctggcgcgagggcactaccgtcaacctgcgggtccgcaatgccttgccgccaggctccatccatggccaccaggcatcgatccactggcacggcatcctgctgccagccaacatggacggcgtgccgggactcagcttcgacggcatcgaccgcggcgagacttaccagtaccgcttcaacgtcgtacagggcggcacctactggtaccacagccactccggtttccaggagcaggccggcctctacgggccgctggtgatcgagccactcgagcccgagcccttcgcctatgaccgcgattacgtggtcatgctcagcgactggaccgacctggatccgcagcgtctgttcgcccggctcaagaagcggtcggatttcgacaacttctccaagcagaccgtgggcgacttcttcgccgacgtgaaacaacacggcctggccgccacggtcgaagatcgcaagatgtggggccagatgcggatgacaccgaccgacctgtcggacgtcaacggcaacacctacacctacctgttgaacggcacgacctcgctcggcaactggaccggactgttccggtccggcgagaaggtacgcctgcgcttcatcaacgggtccgcgatgacctacttcgacgtgcgcatcccgggcctgaagatgaccgtggtcgcagccgatggccagtacgtgcgtccggtcacggtcgacgaattccgcatcgccaccgccgagaccttcgacgtcattgtcgaaccgaccgggcaggatgcgttcaccatctttgcccaggacagtggccgtaccggctacatcagcggcacgctcgccgtcaggcaagggctgcgggctcccgtgcccaacgtcgatcccaagccgattctcaccatggacgacatgggccacggcggaatgggtggcggcggccatgacatgtcttcgatgtctcacagcgcaatggccggtggtgcaaccggcggcatggatcacagcggtcacgacatgtcggcgatggctggaggcgcaatggccggcggaagcatggccgacatggatcatggcaccggcgggagcatggccgggatggaccacggtgccggcggcatgcaggaacaccctgccaccgaaaccggcaaccccctggtcgacatgcagacgatggcgcccgcgcccaggctggatgacccgggcatcggcttacgcgacaacggccgccgcgtgctgacctactccgacctgcgcagcacgttcagcgacccggacgggcgtgagcccggtcgcacggtcgagctgcacctgaccgggcacatggagcgtttcgcctggtcgttcaacggagtgaaattcgctgacgccgaacccctgcgtctgaagtacggcgagcgcatgcgagtcgtcttggtcaacgacacgatgatgtcgcacccgatccatctgcacggcatgtggagcgacctcgaggacgagtccggcaacttcatggtgcgcaagcacaccatcgacatgccgcctggtacgaagcgggcctttcgcgtgcgcgccgacgcgctgggtcgctgggcgttccattgccacctgctttaccacatggaggccggcatgttccgcgaagtgcgggtggaggaatga

SEQ ID NO: 502459 - DNA, 930 bp, Stenotrophomonas maltophilia
atggtcgccatgaaaccccgcgacagaccggccgaagccacgccggacctgaggaaatacgcctggctggccatcgtgaccgcggtgctgacggtgctgctcaagggcagcgcctgggcgatcaccggctcggtgggcctgctgtcggacgccgccgaatcgatggtcaacctggtggccgccatcgtcgccctggtctcgctgaccatcgccgcccggccggccgacgacgaccaccacttcggccacagcaaggcggagtatttctccgccgcgctggaagggatcatgatcttcgtcgccgcggcctcgatcatctacctgggcatcgatcgcctgctcaacccccggccgctgggatcgctcggcatcggcctcgccgtttcgatcatggccgccgtcctcaacggcatcgtcgggcggatcctgatcaaggtcggcacgcgccaccgctccatcaccctgcgcgccgacggcaagcacctgatggccgacgtgtacacctcggtcggggtcgtggtgggcctggggttggcgtggctgacaggctggaactggctggatccggtgatcgcgatcctggtgggcgtgaacatcctggttgtcggctaccggctgatgtccgaatccgcctccggcctgatggacgcgaccctgtcccccgaggacaacgcccggatccaggccatcctggacgcgcacgccgaaccgggccggatcgaattccacgccgtgcgcacgcgcgagtccggggcccgccagttcatggagatgcgcatgctggtgcccggcgactggacggtgctgcgcgggcatgacgccatggaagacctggtggagaagatcgtggcggagtttcccgccatgcgcgtgaccgggcacctggaaccggtctccgatccccgcagctacgaagacatggccctgtag

SEQ ID NO: 502460 - DNA, 873 bp, Stenotrophomonas maltophilia
gtgatcgaacgttgccgcgatgagtttccgattcgcctgatgtgccgctgcctgcgggtatcgaccagtggctactacgactggagcaagcgcctgcccagtgcccgccagcgcgacaacgagcgcttgctgggccgtatccatgcgctgcaccaggacagccggggcacgctgggtgccggccgcatgcaggaggatctggtcgaggaagggttgatggccagtcggaaccgggttgcccggctgatggcggtagccggccttcagggctggccacgcccgaaacggcgtggtcagcgcgcccaaccggcactgacgccgccgggcgtgcgcaacctgctggagcgtgatttcagcgccctggagccggaaaccaagtgggtgaccgacatcaccgagatcaagacccagcaggccaagctgtatctgtgcgtcgtgctggacctgtttgatcagcgcattgtgggttggtccatgcaccaccggcaggaccggcagatggtgatcagggccgtgcagatggcggtttggcagcgtcaggagcagcatccgctgatcctgcattccgatcgcggcagccaatttcgtagcggtgattaccaggattacctggccgccaatggcctgctctgctcgatgagtgcggtggggcattgtggcgagcgcgtagcctgccctcggggcacaatgccgcctgcgaggggttctttggtctgctcaaacgcgagcggatctatcgcacaacgtatccaacactcgatgccgcccggtccgatgtgttcgaatacatcgagcgccgccacaaccccaggatgcgacggcgacgggtcaaacaggaccagaagttttcagccctttccaaacagtccgtga

SEQ ID NO: 502461 - DNA, 246 bp, Stenotrophomonas maltophilia
atgcgaaagacagttcacttcgagaagcggatgtcccagcggggcatcaacaaggacatggttcagctggtcatggagtacggcgagcagcagggggacaagctcatccttaatcgcaaggccgccgagcgcctgatgcatgcggcacgcaccctggccaagatcctggacaagggcggtttggtcgttgttgctgccggcgaatcccagctgaccacttacaactacgaaggccggagtcattga

SEQ ID NO: 502462 - DNA, 1842 bp, Stenotrophomonas maltophilia
atgaccgacagcaaagcagggcaggtactgtttcagttgaccgatcagctgcgcgggccgctacgcacggaggacgcgcaactgctggcatttcaattgctggtctgggcacatctcggcgaagagcatcagattcatccagccgatatggcagagacggcgctctacggtggctcccgggaaattgtcgaagcgctcaaccgtctctccatgtctgacggtctgctggggcatgcattcagcggggcggcaagccatgcccgtgcggcgggtacggatatcgagagcgccttgtctgctgccaagcgtctggccgatggtggcatcttcgagcgtttcttgccggccgatatcgcggcagaactggcaacgccacgcgatgcgtcacttggattacccaaggagctggtcgccatggtggccgaattggccgtcgggttcgaagctcgttctgtctactgcccgtgggagatggaagggcaactgatcagtgctacgctctgcgaagcgattgaagttttcgtggaaacgccttatctgtcgccgttggttgcgctttttgccctcttccacaaaggcgaaatcctttgcgaggtggctgatccgttggcaacgcccacagcgatcaaaagcggtcgtctgaaaaaatttgattcggcgatgtctttcccacccttcggaatgctaccgaagagcgaggtggcgaaccaggacatttatggccgtttcccgatcaagcaggcaacggttacgggcctgatgatccagcacatcctggcacaaaccgatggccgtgccgtgattgttgtgccaaacagtttcctgtttggtcccggcagggatcgtgacttgcgacagtacctgctggaaaatggctgggtgacggcggtcgttggcttgccaggtgggatctacaagaacactggcatcggcagtggcttgctgcttcttgatacccgtcgttcccatgatcgggtcggcttcatcgatgcgggccagccctatttttgccaatcgatcaaccgcacccggaaggcgctgatcaacaccggcgacatcgttgcctactgcaatgcactttctgaaggtgacactgagcgggcaagtgccctgctaggccaggatctggcagtgactgcctccttcgaagaactccagtcgaacgatttttcattcgctgttgagcgctatgtggtctcggaatcgcagaggcgtctgcagggccagatgcagcgattggaaacggctgagttgggtgaggtcgcggagttgttgaaccctgtgcccaacaaggatcgcaaccaggaaggcccggaggcgatcgaggtgctggaagtaggggcccaggacctacctgctaacggctacatcaagaccccggagaaaaaggtcaatatcgttctgcctgtgcgccgcagtggcagttgtaacgatgtctttctccgtccgggcgatgtggtgctgatcaccaagggtagtaccggaaaggttggcatcgttccggaggatgttccgccagctgggcaaggtggctggattgccgggcaatcggccatcgttctgcgcagttccgatggcaaggcagacctgcgctggctgggactatggctgcgttcgaagatgggtcagggtgtgctgtcaggtattacttccggttcgaccattccgatgatttccattcagaccctgcgcaagctggaagttccagtggtggccttggctgagcagccacgtgctggcgaagtcctgcagcacgagatgcagctgcaagcacgtattgatgagctgcgcgaagagcagtctggcttggcagaaaatctctgggctgagctgctgagctga

SEQ ID NO: 502463 - DNA, 240 bp, Stenotrophomonas maltophilia
ttgagaagccggctggagggcgggctgctcaatcagatggagagcggggacgccatggccgcgcgctacgccatctgggccaatactgtccgcgacaacatcatcaccggcatgaatgcattgaaggctggcaagtcggacgagggctatcggcacctgattcacgcggctaacagtttgtccgctttctcggacgctcaggcctaccttgatccgctcaatatggggaagcgcgcatga

SEQ ID NO: 502464 - DNA, 387 bp, Stenotrophomonas maltophilia
atgagccgcatcagccaacaagaactcgaaagttacctctggggtgccgccgtgctgctgcgcggtctcatcgacgccggtgactacaagcagttcatcttcccgctgctgttctacaagcgcgtgtcggatgtgtgggaggaagaataccaagcggccctggccaactcaggcggcgacctctcctacgcgcagttcgcggagaaccaccgcttccagattcctgagggcgcgcactggaacgatgttcgccaggcacccaagaacgtaggcgcagccattcagaaagccatgcgcgctatcgagaccgccaacccggatctgcttgacggcatcttcggcgatgcaccctggaccaaccgcagcgcctgcccgacgaaacgctga

SEQ ID NO: 502465 - DNA, 723 bp, Stenotrophomonas maltophilia
atggtacttatgctccgtgccatagaggagagcctttttgctctggatgcggcatttgcgtcaacgaatgctttggagtggtcccgactagataatgcgctcagtgctgtttcagatgagcaccttcatcccgtagagaagctggtcataacagcgccgagaaatggactttcacccaaggtaaattcagacaatcgaggatatccaaccctgagcattagctcggttcgcgacggacgcatcgtcaccgaaggcaacgtcaagtatgccgaggtaaccgccgagcaagcggtcgcctttgcactgaaacccgacgatgtccttgtggttagaggtaatggaaacaagctacttaccgggaaatgtgggcttgtcgaaaccataccgcaggggtgcttctatcccgacttgctcattcggctgcagttcaacgaaaagatcatgcgacccaggttcgccgcgctgcaatggaattcgccaaacgtgcacgagcgattgatctcacgcgccaagtccaccaatggcatatggaaaatcaatgggggcgacatccgacaacacaccctgaaagctcctccgattaaagaacaggatgcgctgctggaagagatgggcgagattcggcaggcgcgggctgatattgagaaacgcaagaagaagactcttgccctcaaggcattggccttgagcgagattacattggggggcggcaatggcatttaa

SEQ ID NO: 502466 - DNA, 273 bp, Stenotrophomonas maltophilia
atgcataacgagagcccgctcccgatcggtagcgtcgagccatgctcggcggatgagaagcagccgaccagcggtcggctctacaacaacgaaaagcagccgaccagcggtcggctctacaacaatgaagagcagccgaccggcggtcggctctaccagggcggaagcatcgagcagcagcgccagcgtgcgaagcgcacggcgatgtgggtcggcgccatcgccgtactggtctatgtcggcttcatcctgagcggggtgatcgggcgatga

SEQ ID NO: 502467 - DNA, 453 bp, Stenotrophomonas maltophilia
atggcggtggcggcggtgatgggctcgatcgcgctgcacatggtgatccgcgtgtctgcctcgttctggatgacggcgcttgtgaacaagttcccgcttatgggcgcgttcagtgacggtatgaccagtcaggcgatgcagcagggcggcatgggcctgattctgacgaccttgattctgactgcgcccccaatggcggccatgttcttccagggcaccttgggtagcttcatggcatattcgcagataggtggtagcccggtggctcaggcaccgggaccgagtgggcagccgccgggtagctactatacgccagataagccttcggcgagtggcggcagtcaatcgggcggttcgacttcagttgggagtaatgtcgtagtcacgggcagtaactccacagtcgggtcaggaagttctgatactggtcgtaaaggcttagcttcgcactag

SEQ ID NO: 502468 - DNA, 126 bp, Stenotrophomonas maltophilia
atgagtgggaacttgtttacaagcgccgtcatccagaacgaagccgacacgcggatcaccatgtccagcgcgatcgagaccatcgccgccagcaccgccatggagaacatggttccaatgccgtag

SEQ ID NO: 502469 - DNA, 198 bp, Stenotrophomonas maltophilia
atgtcacttttcttttcgcgcgaaaagaaaagtaaccaaaagaaacgcgccgccagccgcgagccggtgctgtgcaccggtaccctgcgcttctcggtgaaccaggggacggcgccgaactcgctgcgctcagacatcggcgcctcttcgcccctgattcacctgcgatgctcggctcgcttgaaggcggactggtag

SEQ ID NO: 502470 - DNA, 636 bp, Stenotrophomonas maltophilia
atgacgcggtcaccgcggcgggggctgatggtattggcggtgctgggcgcgctggcggcatgccgtgcgtcaccagcgcctgaggttgcgccgcccctgctgacgcgcgcacaggccgaggcccgcacggttgtgccgttcacgcgggccgtgcaattgcagaaggccggtcggattgccgaggtcacgtttgatttgccggcaccccagaagcccgccattccgatcctgaacatcgggttgcggctgcaggataccgacgggcgctcgttgttggacgcgtgggagaagatcaggctgggaaggccacccacgcgattgcgcctggagcggattgatggcggcgcacctggtcctgtacagctatggcagagcactcctgacgggcgcgactcacagagaattccagaagatgaggttgtgcgatatctgtccgatacaagcctggatgagggcgcactgatccaagccggtctgcactcgcgtgagatgctgtatcaggtactccaggtcgcggatgtcggttggctggagccgggccggtatcggttgacagtcgacctgatggaggaccgtccgcagctggaagggctccaagccgaacttattgttggatatcaatcgctagggaagtaa

SEQ ID NO: 502471 - DNA, 1011 bp, Stenotrophomonas maltophilia
atgagcaaggaagcagagcgctatacggtcacgattcatctcgccgcaccgggcacgccgagagtcgatgtgggcaacgcgggccagaagagattgttggatccgtcatttgccgggcacatgtttctttcgctgacacgatcaaatgacccggtacccgtgagcaggggattcacgatggggaacgaccgtgcgaatccttcgctgggcaaagtcgatgacacggatctgcgggtctacgacaaaccccgcttcgagcgcacgatcgagatcagcaaggatcagtacgaccgcatcctcgagttctcggcagacccgaagaagcacggcttcgacatgaactacgacttcttctccaacgcctgcaccgatttcgcatggggtgccctgaaccacgcaggcctgcgcccggttgggctggccggggagatcaacaactacgagggcgccaccaaggtcctggacaacattcgcgccatcaatgccattccgcagcaggtgaaggacagcgagctggacagggtgcagtggaacccgatgccgaagcagaccttccgcgagtggatgttcaccgagaacggcgagcagtggcgcggcaacagcaccctcgcggcaagcggcacgcccgcagacccggcgcacgatgatcatgcccgcctcaaccagatccaccagcaggtggccgacctcggcgctttcggtgcacgcaacggcaatgtcagtgccagcctgctcgcgctgtcgaaggagcagcagttctcgcgtgtagacgaagtggtgctgggcgagccgcgcggtgataccgcgccgaagctgttcatcgtgcagggggaccgcagtgacccggcgcaccagcgcgccagcatgccggcggagctggcagcgcaggcaccggtagaggcctcgttcgaacgggtcgcgcagttgcagcagaacccgccgcagcgcgatgtgcagcgcgtgcaggaagagcagcaactgcaacagagccacggcccacggatggcatag

SEQ ID NO: 502472 - DNA, 675 bp, Stenotrophomonas maltophilia
atgagcaatcgcacgctgatcctgtgtctggcaatcgccacggcctcgcctgcgttcgcagaagcaccattgagtatcgacagaacggagctcggcaccaagggggagatcatcattgttcgccgtacaacttggccggacttcgacggcgggcagcttccagttgatcagcatctcaagccggatggatttggacgcctgatctatcgatacagcgaccagccggaggcgaccaagctctatcatcaagccttctgcgcttccatggatatggaaccatctcaaggcgaagggacgattgaagggccggcagcaggctgggtatgcactcgtgaaaacacacctggtaatccaacctcaaaattgaattcgaagagtattgactgggttacggcaacggcgccgagtggacgtgtgcctgtgggtgtttcctattactcaacaggccagatgaacgcagagagctccgtcgccggagcccgaacagccaagattggtgttgacagcggcagatgctaccttagcgatacacgtcattactcatcccccttctatctcagcgagggaattggcgtcgtctgcaccgtaatggagtcacgattcgtgagcacctccctggacgtgtgcataccaaagcaatgcgcatccaatcgcggaactcagttcgcccagtag

SEQ ID NO: 502473 - DNA, 768 bp, Stenotrophomonas maltophilia
atggacaacaacacgcccctgcccgccggcgacgtgccggccccccgcaatgaccgctcgcgcatcctgcgggcgttcaatgtcagcctggcggccgtgctggtgctggtggccgtgttcgccctgcagggcacgttcgactggcgaccgtgggcggtcgcgccgctggaagccaagggcctgctcggcctgatcggcggcccgatgctgcatgcctcggtcgagcatatcgccgccaacagcatcgcgatcctgatcctcggcaccctcgccggcagcgtgtatccgaaagccaccgtgcgtgccctgcccctgctgtggctgggttcgggcctcggcgcgtggatgctgggcaatccgggcagcgtgcacctgggcgccagtggcgtcacccatggcctgatgttcctgctggccagcctcggcctgctgcgccgcgaccgcgcggcgatcgccaccggcctgatcggcatgctgttctatggcggcatgctgatgaccatcctgccgcatgccgatggcgtgtcctggcagtcgcacatgggcggcgccttcgccggcatcatcgccgcgctgctgttccgcaacgccgacccgctgccgccgcgccagcgttacagctgggaagacgaagaagacgtcgagcctttgcccgacgacgagctggagccgccgtcgccgcagcgcgtgccggtgttgtggcagccgcgcgagggccaggactacgtggtgatcccgttccgccgcccggacgaaccgcgcggttga

SEQ ID NO: 502474 - DNA, 192 bp, Stenotrophomonas maltophilia
atgaactggctgaagctactgcgcttgtacttccctgccctgctggccgctttcttgtccttgatctgcgcgctcatagtgtcctcgctaagcggcaatagcatgatcagagggttcagagcgggcagcggtgaacaagatcggggagacgaccggctgccacacatgcggtacaaccaaccccggcactaa

SEQ ID NO: 502475 - DNA, 300 bp, Stenotrophomonas maltophilia
atgggcgagacacccgagcagctgcaggacgagattgacttcctgaagcaagagatcgaacgagtcaaagctttgcaggaccagctcagtcctgccgagtacagggccaagattgatgagaaccacgagcgcattaacgaaatcgatcagattttggccggcttgggagaggaagacctggaggaggagaacgacctgctcaatgagcgcgactctctcctgaacgaaggtccgggcggcctcgattctctcgatgaagagattgaggagcgcgaggaaaagctgaagaagctcggctag

SEQ ID NO: 502476 - DNA, 975 bp, Stenotrophomonas maltophilia
atgaaactacagaaggaactgcaggtatctgacgtatctgaccttgcacgcgcgcgcattgcattggctttgccagtgctgaagggtgtcttgtttgccctacagcgggagcgcgtggaacggctcggtgggtacgagaaaatcaccttggctgatcttgcgcgtgagtacagggagggcagtggcgactgtggaatctgctttgaatacgccgtgcacgattcgttggtcgctaaagacaagaatgtctacgatcttctcagtaatgttttgaacgacttctgtggcatcaagacgggtgcagagtccattctgtttggagctgagaagaccggaagcatttcgctgataaatacgtcgcaaagtcttatcactaacgattcgcgagtcttgtcaggaaaggtggggcaacccgcaaagttgaaaaagcagtgggatacgatccaaaaggcgctgcgtgataccaaggcccgtgatcgtcttccgtctagtatcaaggggttgtggaaggcggatctgttccttggttcttcctccgagtctcggtgggtcggaacttcattgaagctcaataagtctgacttccaaaaggcggctggaattcggctcggtatctaccctgagacgaagcttggtgagtcgccccggagggacgatgacaacaaccttgtactgtgtccactgccctacgatgccagttttatggaggcattctattcttccttcttcgccgtcaagcagttcttgctggcggacgccaaagtgcccaagcctgtcgctcttcctagcaacgcggatcgctttctcgcccagcagtttgaggaccgtcgaagctttccaatcctcgacgtaattgaagtgatgtatagccttgggcagcccaacctgaccgctgaaagcgtcgtgggccccgcaaaagatgatgaccaggctcccatggacgcagtggcacccgttgcccttaagtccgaatag

SEQ ID NO: 502477 - DNA, 861 bp, Stenotrophomonas maltophilia
atggatcgtcgcgttaatacgttgtcagcatcttatcggcgtggcctagcgatccttgctggtcttgtgtttctgttgatatcgacgatattctttcttcgctggcccgagaggcgggatgatcgtgatgctgggcaagtggccgatgctgggcgggcgcactcggaagtcgtcaggacgggagctactccactgcaacgtcccggtgctcttggtgatccggaagggctgcgtcatcgcgctgctttgggggagtcagtggcggcctgcgagtgggcattgccaaatttccagtgctcccgtttacaggaaagcgcagcgtcgattgagcgtttcgctggttcttcgtcttcctctaagaggaatgaaagggctcggcacgttgacgatcttctgcaaaaattggacgagcgtcgtgaagcgtgccggatggtcggtctagcttcgcctagggaaatctacgataactatgaaagagcagctcggctaggtagtcgtcgggctcagctggtgtatgtgtctgggcagctaatgcttggtccaatggaatcgcatgaactagcccaagtctcggatgcctatgcgcgtgatgtagagcgtttggcgcttgaatggactgggcagggcaatatggaggtcgcgctcgcgcttgctgacgcttatgcgaatcgtcgaggtagtggctttcttggctccgtggtttcacccaatttgcctgctgcaaattccatctatgccacgctgctggaacaggcggttgagtcgaaggatgttggggtatcagcagttgttctcggagagcgactttctgctttgcagggtaagaacggaaaggaggcgacgtccccccgccctcagtag

SEQ ID NO: 502478 - DNA, 750 bp, Stenotrophomonas maltophilia
atgcgcttcgaaggcttgtacggcgtccctcaccaactgatgccaccgctctttcagcccacgagagagtcggcgcttgaaattgccggcgctcttgctgtcggtgtgccagtgccgcctatatttggtcggggtttgtctgaggaggagcgcatttcaattgtcgggcgcctgttccctgacaaaatttttgatgtgacttctccgctgggctacaggcttcagtctatcaatcgcgatgaaatcttcgcgcaatttgttcctaggcttgcgtctcatcgggatgacgtgaaaagtgtgctgcaggctaatcagtggataatgaggcgatctggtgttcgattgccaaaggctgtttttcgatcggccgaggtaatggttggggtgaattcgatcaatgcgcatggatttgtagcccctcgatatgacgttaagtccgaagtcgcatggttgttgaacgagttgcaaacgggggtacacgactttctggcctccgttgccctttttgtttggttctttctccatgtgcatccgttcgcggatggtaacgggcgaacatttcggatgctcctcctgagatttgtggggtggaggtggggggcaaaatccccgtgccacgatgccgtccatcgcttgcttgatgccatgcaggctgaaaagaatgaattcatctatgcaatgcatcgaagtcggctttctgacgcgcagccgctgcgtgcctttattttgcgtgcgatagcggagcattga

SEQ ID NO: 502479 - DNA, 1233 bp, Stenotrophomonas maltophilia
atgcatgcactgatgaaatgggggatggggatactgatggcggcggcaggctcggctggggcggcgtcggatcaggcagaggcctggcctgcgtatcaccaggcacaggcacgacagccgtggtcatatgaagtggtcgcccgcacgcgcttcgagggcggggaacggcgaagtttcatgcttgcctcgcagtcctggcccgacccacagcagggaacggtctggcatcatcgggtcgagctgctgcagcccgatgtggcacaacccggtcctgcgttgctggtcatcaacaacggcgtggcgcatgacggcggaggtcgcccggtcggcgctgccaatgatctgccggacgacgtgctggagacgctggtgcgcacgctgggcatggcggtggtgtcgatggccgatgttccgccgcaggcgacagcgctgccgggcgaccctacgctgcgtaccgaggacgatctggtcgccgccagttggcggcgttacctggatgcacccgcaggacatgcgcattggccgctgcacctgcccatggcgcaatcagcgatccgcgccatggatctggccgaccgtgaactgcccgtggcacagcgcccgtcctacattgttaccggtgcctccaagcgcgcctgggccagctggttgctgcccctggtggacgagcgcgtcagccatctggcgccgttcgtcatcgacatgcactggcaggcgctggctccgcatatccgtcatgtctacggcggtcgctggccgatcgcgctgggtccctatgtggaacatggcatcaccgatgccattggcagcaagggcttcgccgatctgatggccatcgtcgacccgtacacctatctgcagggaccgcgcgcgtcgcggctggcgttgccgaagctcctggtcaatgccagcggcgacgacttcttcccgccggatgcgacgattcactacctgtctgcgctgcccggtccgaccacgctgcgggtggcgcccaacagcgaccacggcggtatccgtcggcacacactggagatgctggttccggcactcaggcgatggcggtccgatcttccgctgccgcaggtgaatgcgcactgggatgcggcaaccgcccggatgcgcgtgcagacaggaaaagagcggccggtgagtgctgtgctgtggcaggcctacaacccggatgcgcgggatttccgccacgcctgtggcatacctatgtgccgacaatgttga

SEQ ID NO: 502480 - DNA, 294 bp, Stenotrophomonas maltophilia
atgcatttttttcagctggaccagttcgcaggccatctcaacgaaaccttcagtgccgacatcgagaacaccggtgtccccttcgtgctggtggaagccgcgccgatgcctgatcggcagattgccggccagatgcgcgcaccgttctcgttgctgttccgcaatgaatcggcggtgctgttcccgcagcgcacctacaccatgcgccaccacgggctcggcgagttcggcattttcctggtgccgatcgcgcgcgaccggaccggcttcatctaccaggcactgttcaactga

SEQ ID NO: 502481 - DNA, 558 bp, Stenotrophomonas maltophilia
atgacgtcgaacgtggcactggcctttccctcgctgcgggcagcctggctgcccgcagcgagggacggtcttcccgcaggtgtgagcgtgcgcgaagcacaggatggcgacctgcccttcctgcagcggctctatgccgaatcacgtgcggccgagctggccaatgtgccgtggccggacgccttgcgccaggcgttcctcgataaccagttcgcgctgcagcacctgcactacacgcggcattaccagccggcgcactatctgctggtcgagcaggcgggccaaccgatcggtcgcctttacctgcattgcgacgagcacgaagccaccctcatcgatatcgccctgctggacgccgtgcgcggccgtggcatcggctcggccctggtgcgctgggtacaacgcgcggcgcatgcggtgccgctgcacagcgtcgtcctgcatgtcgcctgggaaaacctggccgcgcgccggctctacgaacggctcgcgttccacaccgaaggcgataccggcagccacctgcgcatgcgctgggtggcgacagcggtcagttga

SEQ ID NO: 502482 - DNA, 534 bp, Stenotrophomonas maltophilia
atgagcgatccctttaccggcgaaatccagatcttcggcttcaacttcgccccttacaactgggcgatgtgccaaggacagctgatgccgatccagcagaacaccgcgctgttctcactgctgggaacgaccttcggtggcaacggcaccagcaactaccagctgccgaacttcaccaacaacatcgcatgcggccagggcagcggcccgggcctgtcgcagcgcgacatgggcgagacctttggcagcgacaatgtcaccctgttgatcaacgagatgcccaaccacacccatggcgcacgcatctacaaccagcccgacactgcgcatcgcagtggcatacctgccaatggaaatgcactgatcacgccggagtcgagtccgatcctggccgtgacaccgacagtcaacagtaccttcccgctgacgacggtgggcatcgcgggtgggagcctgccgcatgagaaccggcagccctatctcgccctgaacttctgcatctgcctgtcgggcgtcttcccgcagcggccatga

SEQ ID NO: 502483 - DNA, 531 bp, Stenotrophomonas maltophilia
atgtctcaaccctttgttggcgaagtccgtctgtttccctacaacttcgcgccggcgggctggttcgattgtgatggccgactgctgcccatttccgaatacgacgtgctgtacaccttgctgggcaccacctacggtggcgatggtgtgaacacctttggcctgcccaacctctgcgggcgcgtaccggttcaccagggcaccggcattggcctcggcacctatgtgcttggccaggcaggcggcagcgaatcggtcaccctgaccaccgcgcagctgcccgcgcatacccatgcgttcaatgcggtgaactcggcagccacgtcggcggcacccgggccggcactgcagctcggcgcggtcagtggcgacacgctgtataccgacagcaccaccgaccttggcagtggcaccctggtggcagcatcggtgagcgcgatcggcggcggccagccacacgacaacaccatgccctcgctggtcgcccgctactgcatcgcatgggcaggcgtcttcccatcgcaaggctga

SEQ ID NO: 502484 - DNA, 504 bp, Stenotrophomonas maltophilia
atgtcggaaccctttctcgggcagataatgcccgtggcgttcaacttcgcgccgaagaacttcgctttctgcaacggtcagtcgatgtccatccagcagaacaccgcgctcttttcgctgttgggtacgttctacggtggcaacggcacgaccaatttccagcttccggacctgcgtagccgcacgccccggggatccaccaatggcagcaacatgggtgatcgccaggggctggagagcgtgaccctgctgacgtcacagattccccagcacgcacacgttttcggcggcaccaccgccgacggctcaacgcgtatcccacagggcaacgtgctgctcggcaaaaccggcacgcagaatgtctacggtgcttcaagcggagcgcaggtgcccttgaacgtgcttgatgccagcggccagacgcagccacacgcgaacctgcaaccgtatctggtcatcaacttctgcatcgcactttatggaatctacccttcgcgcggctga

SEQ ID NO: 502485 - DNA, 5598 bp, Stenotrophomonas maltophilia
atgtggcacgcagagtcgatgcatcgcgacgcgatgcgctatgggctcggccgtcgtttttggggccgccttggggcaatcctgctgctgggcgccacactcgcgctgcccgcgatttcatatgcagcatgctcggttttcacgccggccaatgccagcgcgggctcaccgatggccgccggcagcaccattaccatcgacgcctcgagctgccagggcgtgcccggtttcggcatcggcaatgtgaccacgccggcgggcaacggtactgccaccatcaccagccatgcggcctcgagaatctcctatgcccacagcggcaacggatcgacgatcgataccttcgccttcgatgatggcaccggctcgcacaatgtgcaggtcaccgtgtacatccaggcagcggcctcgccgatcacgatttcgccggccaccgtgcccggcgcaacggtgggcgtgtcctatgcaggtgtcacactcagcgccagcggtggcaccgcgccctacggttatgccgtcacttccggtgcactgccggccggaatgacgttgagtggcactggcctcctgtccggtacgccgaccacgcagggaacgttcgcgttctcggtgaccgccaccgacagtgccggcacaccgttgacgggcacggcgagctactcgatcagcgttgctgcgccgaccatcacggtcaccaatgtgccttccgcagcagccatcaatacgccgtactccttcacgctgacggccagtggtggcaatggcccctacagctttgcgctcgacgccggtactactttgccgaccggactggtgctggccagcaacggggccatctcgggtacgcccaccgcattgggggtgacgaacttcagcgtgcgcgtcaccgacagcagcacgcctacgcctttcttctcggccaccagcctgtcgatcaacgtgcagaacgtggtgccgccggtcgccaatccggtcagcgcgacggttgcctacggcagtaccagcaacccgatcaccttgaacatcaccggtggcgtcccggcatcggttgcggtcggtacccaggccgcgcatggcactgcaaccgccgcgggaacctcgatcacctacacccccacgccgggctatgcggggccggacagcttcacctataccgccaccaatgccggtgggacctcgagcccggcgaccgcgaccctcacggtctcgccgccaacgatcacctacgcacccgccagcccgcccgcaggaaccgtcggcgtggcgtacaaccagtcactggccggtgccagtggcggcaccacgccgtacagctacacgctcaattcgggcagcctgccgcctgggttgaccctggccagcaacggcagcctgtccggcacgccgaccgccaacggcagcttctccttcaccgtccgcgccactgacagcagcgccggcaccggcccgttcagtgccaccagcggcacgctgacactgaacatcgctgccgcgaccgtcacctatgcaccgggcaatccggctgccgcaacggtcggcacggcgtacagtggctcgctggccagcgcagcgggcggcaccgcgccctacagctatgcggtcacctcgggcagcctgccggcgggcatcacgctggccagcaatggcagcctggcaggcacgccgacggcgggcggtaccttcaccttcacggtgaccgccaccgacagcagcggtggcaccggacccttcagtgcgagcagcgcggcgctggcactgaccgtgaacgacccgacgatcctgatcgcgccgagctcgctgcccaatgccaccgtggccgcggcctactcgcagaccgtgaccgcttccggcggcaccgtcggctacagctacgcggtcaccgccgggtccctgccgccgggcctgagcctgtcgagcggcggcgtgctcagcggtacgtccactgcaggcggtacctacaacttcacgcttgccgccaccgacagcagcacgggcacgggcccgtataccggcacccgagcgtacgcgatcaccgtgagcgcacccacgctgacattgacaccgacaccgggcagcgtgctcaacgctaccgccggcgcagcggtgaccggactgagcttcactgccgccaatggcaccgcaccgtacagctacgcgatcaccgcgggcgcattgccacctggcgtcaccctggcctccaccggcagtctgtcgggtacgcccagtgccaccggcaacttcaccttcaccctcaccgccaccgatgcttccagcggtccaggcgctcccttcactgtgtcgggcagctacacgctgtcggtggccgcgcccaccatcacgctgtcgccggcaaccttgcccgcgccgacgatcggcatcgcgtacagccagacgttcgtggcttcggaaggtcatccggccacgttcacctatggcgtcaacgcgggtgtgctgccggcaggcctgtcgttgaaccccagcaccggcgtgctgagtggcacgcccacccaggcgggcgccttcagcttcaccatcagcgccaccgatggcggcggattcaccggcagccagtcctattcgggcgccgtggcgggcggtgtcgtcgtgctgccggcgggaatcctgggcgatgccagcgccggcaccgcctacaaccacagcttctccgccagtggcggaacaccggcttatacctacgtgctgctgagcggggcattgcccgcaggcctgtcgttgtccagcgccggcgtgttgtccggtacgccgaccgtggcgggcacgttcaacttcaccgtgcgggcaaccgacagcagtaccggtaccggtgcaccgttcactggcagccagagctacacgcttgccgtgttggcaccgacgatcacgctggcgccttcctcgctggcggcggccactggcggccagccctacgcgcagaccatcagtgccatcggaggcaccggcggctacacctacagcctgtccagcggcgcattgccgccgggcatcagcctgagcagcgctggcgctgtgtccggtacacccaccacccctggcacctacgccttcacgatcactgcgaccgacagccacgccttcaccggcagccagacctacagcttcacggtcactgcgccggcgatcacgctcacgccggccacgttgcctgcggcggcgggcagcactccctacagccagacactgaccgccagcggaggcaacggcggttacaccttcagcctgactgcaggtgcgctgccaccgggtatcgcgctgagcagtggcggcgtgatcagtggcacaccgaccaccgtcggcagctacaccttcaccgtgcgcgcgaccgatggtttcggcttcaccggcagccaggcctacacggtggcggtgaatgcaccggccattgtcttcatacagaccacgctgcccggtggccaggtcgcaacggcctacagccagacgttgagcgccggcggcggaagtggcagcttcacctacagcctgagcgcaggcacgttgccacccggcatcgcgttgagcagtgccggtgcgctcagtggcacgcccacggcggccggcaactacagcttcactgtcaccgcgaccgataccttcggcttcaccggaagccaggcattcacagtgggtatcaaccagccggtgccggtggtggtcaatgatgcggccactacgccggccaatgcggcggtgaccgtcaacgtcaccgccaacgacaccgggccgatcaccagcatcgcgatcgtgcaggcgcccacgcatggcacggcggtggtcagcgggctggacgtggtgtacaccccggccaccagtttcttcggcaacgacagcctgacctacaccgccaccggccccggcggtacttccacggcggccacggtgagcatcaccgtcacgccgctggcggtgccggtggcggcgacgcacagcgccaccgtgctggccgggcaatcggtcaccgtgcaggccgaggccggggcgaccaatggtcccttcaccgcagtgaccattacccgggcaccatcgtcaggcactgcggtggtgcagggcaccggcatcgtctacagcgccgctgccgatgcgtccggtgtcgtcgatttcgactacacgctcagcaacccgttcggcgcatcggccccggcgcggatcagcatcaacgtcaatccacgcccggtggcaccggcactgaacgcttcggcgattgccggcaccgtggtcaacgtggacctgaccacgaccgcacgcggcggaccgttcaccgccgccaacgtggtgtcggtctcgccggccgaagcgggtaccgccagcatctccgccagcgacaccggctacacgctggccttcaccgcggcggcgacgttcgggggtgcggtgcgcatcacctacacgctgagcaatgccttcgccacctcggcgcccggcacggtggatgtgatggtcaagccgcgcagcgatccctcacgcgatgctgaagtgctgggcgtgctcgacgcacaggtggagggtgcgcggcgcatggcgatcggccagatcggcaacttccagcggcgcctggaaagcctgcgcgccggtggcggccgcagtggcttcagcaacggcatcaccttcagctcggccagcagccagcgccgtgcgcagcagaccgagctgcttcagaagggcatcggcgccaccggcgaggcactgtcgatggtcgaggaaccggcgctgcagggcgataccgcgcctgcggccacctcggccgacggcttcgcgttctggaccggcggtgcggtgaacgtcggcacgctgaagccgggtgcaggcagcaacggcatcgacttcaccacctccggcgtcagcctgggtgcggaccgccagctgggtccgtcgttgagcctgggcgcgggcatcggctatggccacgacgcgtcggatatcggtcgcaatggcagccgcagcacggtcgatggctacagcatcgccggctatgccagcttccatccggaaggcgggttctatgtggatggcctgcttggctatcagtggctgacgttcgatgcacgtcgcttcatcactgacaacggcaataccgcctatggcagccgcgatggcaggcagtggttcgcctcgttctccaccggcttccagcaccgtctggacaacctgttgctgaccccgtacggacgcctggacctggcccgcgcaacgctggatggctatcgcgagcgcggcgatgcggtgtacgcgctcgactacgggaagcagacggtgaacaccagcaccgccaccgcaggtgtgctggcgcagtggtgggtgaagcgcgactacggcatgtggacgccgcagctgcgcgccgagttcagccatgacatgcagggctccagcgaggccttcatgcgctacgccgacctgatgtccggcccggtctatcgcaccagcctgggccggcagtcgcgcaaccacacgctgctgggcgcgggtatcggcctgcaggcgctgaagggctggtcgctgcgcgccgaataccagagccagttcgacagcagcagccgcgacaaccagggcatccagatcagcgtgcagaaaaccctgccaccgtga

SEQ ID NO: 502486 - DNA, 375 bp, Stenotrophomonas maltophilia
atgaccacaccggacttcccgcgcctgcatccgcatcgcttatccgccactggcggtgagccgtcagagcacgcggctgcgaccgatccgaacgccttcatcgccacgcttcaccgcatcggcaaaggcgcggccgccgatggccaaccctggccggagcgtcaccagatgccgggccgttgcatggcgctggccgatgcggactgtgcactggccggccaacgcgtgacactggagctgctgctggcggccgagcgcgtgcgtcagaacggcgcggaggccgagtacgtgggcgaccgggtgatggaagggctgatcctggcgtgcctgaccatgaacgcacaggccagcgcgcgcatgcagcccgaaggatga

SEQ ID NO: 502487 - DNA, 2391 bp, Stenotrophomonas maltophilia
atgaccccagatcagctgagggatcatctaagaacgctagatctatcagtagaagataggtccttcgcactcgagctctttggccaggaaccagggcgcagcgttggcgcctatgcactggacaatgtggtcgtcgacttctattcaagaaagtgtcgcgatgttcgcaggctggaaagccatacagtcgagcaaacatttgcatatgagctagaaattgatcctgacgtcatctcatatgtttgccaggtcacttgtcgtggcataaggcgcggcaatcatgtgtgcaccgcccatgcagacttctttgtggttcgacggtcctccgtggaaatcgtggaatgtaagcccatctccaagctcagcactcttgtggagagaaagcccgaagagtgggtgctggacggtgggaaatatcgcaatctggtgtatgagcgatgggcagcatcccatgggatcgagtacaagatctgggcctcacccagcaacatcagccgataccataggaacttgcagttcatctaccaaaactgggatgaagatctctcaatggtgcgccgagagggctttgctgcggtggaaaagcagctttacatggggccaaaaagcatcgcgtttcttatggaagagatcccttggttcaacgctggggtcgcagcaggactcttggcggataggctagtccacgggcccatagggcacataccgattaccgatacgcgcaactttctcttaagcctaagtcaagagcaggcggaggcgattgcggccgagtgctgtaagaacatcaacaacctgtatgccgaagctagcggcccagttgcgctcgcaagttcagttgatgtggcaaaggcagttgcaaggctgaagaagcttgaatgccttgctcgtgaaggaaagcgagcgacacccaagatgaggaagttggaggagcgggtgagactagcgcgcgcagagggtcgcaatcctctagatgatctcatcaccaactacgcaaagtgcgggaaccgatccagtcgtctcactcacgcgcaatcagaacttgtacgcggagtcattggctcacattggctaaagggtaaggttgcgacgctagccgatctgtatcgtgagctagccctgcagtgcgagtgcgctggcgttcctgtgcctggccggaaggcgctcgtcagaagagttcgatccgtttcaagggggcaacgtgatcttgctgtcggcggtaagcgaaactatcaagcaaataggccgcgttccgacgctcgggttagatcaggccaagcgcttgctgtgcactctgtcctgcacatcgatgcaaccaaggttgacaaccgagtctttacacaagaagacgaagggcagcaagaccactgcccggtactgtactgcggccgtgacgaagcgtcgtctaaggttatggcccatgcctttgtcttcggtcccgctcggcgcgaagggccactaattttgctgaggaactatgtgcgcgagcacgcgaagcttccacacgcaatcgtgatcgatcgaggcactgatctgaagtcagccttaggtgatctctgtcgaacctatggcatctccatactcacagtgccgacaggcgcgagtcgcttcaactcacagtgtgagacggttcaagggcttatcaattccatggtcagccacaaattgattgggagcacaaagccagataaagccggtagaagtgtcgatggaaaattcaaaagcagatcgaccgcgcgcctagatttctcgaccgtagaatccgaaattcaccaccttctgtacagcctgatgcccgagatgcccgtggatggcttcgcaggtgcgcgagagcgatttgagaacagtcagttgactgctccaaactctggaataccaacggttgtagacgatgacttcctatttcaaacttcagtgaaattgaaatcatgctcttatgaaagaacaagggggatcagacactggaggagaagctacacgaacgcggatctcgcgtcgcgcgcgcatgaagagaagatcctcagtgctcggcgtgatcctgaggatatttcattcgtttggattcagaccacgaagagacgctacaaggcatggtgctcgaaggtctcggagattggtcactactccgagcaggatcgtcacttcgaggcaatgtgggagcagttcatcacgccggatgttgagagcaagaaggaggagctgcagcgtaagaactatgagaggacgagcatggccaacgccaggcagcgagccaatgatatggggctagcaagtggaaaggaaacgcaagccccgccaaatgcgagtcgatcgaaggttcaagcgagattggtcgtcaactttgatgagctccccgatctcattgtggaaggggattcgcatggacgctag

SEQ ID NO: 502488 - DNA, 399 bp, Stenotrophomonas maltophilia
gtgctggaagacggtccgctgccgaagcgtctgctcgaagcgggcgctgcgggctacatcggcaagggctgcgatgcacaggagctgctgcgcgcggtgcgcgatgtggccatgggccggcgctacctgggcaccagcatcgcgcagaacctggccctgtcgaccgtggagggcaatggttcgccgttcgacaacctgtcgccgcgcgagctggaggttgcattgctgctgacccagggcctgcgccaggaagacatcgcgcggcgcctgagcctgagtgcgaagacggtgaacacgcacaaggcgcgactgttcgagaagatggggatccacgacaacatcgcactggcgcgcatggccagccagtacggcctggtggatcaggcacggccgttgtaa

SEQ ID NO: 502489 - DNA, 174 bp, Stenotrophomonas maltophilia
atggagctgctttatctgagcttcagcttgctctccggcgtcggtctgagtgacgtcgtgccactgcatccgcaggcacgtgcactggtcatgctggagcagttttccggcgtgatgtacgtcgctttggtggttccgcgactggtcggactgaccatgttgcggcgtgtatga

SEQ ID NO: 502490 - DNA, 477 bp, Stenotrophomonas maltophilia
atgcgcatcttcccggcacgatggctggcctgcgggctgctgatggcaagcggcgcccaggcgacccctcaatttgtcgatgcccgtgaccatcccgatccggcggccgggcgcgagcgcttccttgccgctgagcgcctgttggtgcgcggcttcgacgatatctgcggcgataccttctgcgaagggcagtactacaacctccggcccatgcgcctgcgctgttccgtgcatcgagcctccggcgtcgtgggtagctgcatctggactttcgctggaagctatacccgggtgcaacagaccgggcagatcgacgtcgaccatgggacctacgcctgcgtgctcccgcttgcaccgggaacccgtctggccgagctgctggctgtgtgggatgcagcaaccgggtacgaagccctgcatgcgatgctgcccggcacccggacccacatctatgacgggttgaccgaatgcctatga

SEQ ID NO: 502491 - DNA, 318 bp, Stenotrophomonas maltophilia
atgccacggacccgcgcgcggcccggcagcgcgccgcgcccccgggcgatgagtgaaaccggaacgatgctgcctgctgacctggccgctgtggccacgcccgcattgacgccgtggggcatgtacctggccgcccacgtagtggtgaagtcggtgatgatcgtgctggccctggcctcgctggcgacctggaccgtgctgctggccaagggctgcgaactggcccgcgcgccgagcctgcccggcgagcgcgccgcatcttcatggtggccgcaccgctggcccgtgccggtttcgctcttcctgcgtggccgctga

SEQ ID NO: 502492 - DNA, 300 bp, Stenotrophomonas maltophilia
atgaacgccgccgcccctgccgccgccgccgaaggcaaggccgacgctggcgcatggttggccgttgccgcgggcacgatcggttcgttcatggccacgctggacatctccatcgtcaacgcggccctgcccaccatccagggcgaggtcggcgccagcggtaccgaaggcacctggatttccaccgccttcctggtgtcggagatcgtgatgatcccgctcaccggctggttcgtgcgcaccctgggcctgcgcaccttcctgctgatctcgaccacgtattcgttgccgctctggtag

SEQ ID NO: 502493 - DNA, 378 bp, Stenotrophomonas maltophilia
atgcttctggcagatgccgaaacggttgtggccgtcgaccagtacgttgccccacagcaccagtgcgtcacggcagccttcggccaggatgctgcgctccagcgcgtcatgttcgtccgcggtcagcgggtcgatgtaggccttgagttcttctttgacgacgatatccatgggcacggcagcgagcaggagcggaaccgcccattgtacctgctcgccaccgccggcccggctcaggcggtggcccggatcatctcgcccagggtgccggtgatctggtcgatctgcgccttgtccacgatcagcggcggcgacagcgcgatgatgtcgccggtgcagcgcaccagcagccggccgtcgtggaagcagcgccggtag

SEQ ID NO: 502494 - DNA, 903 bp, Stenotrophomonas maltophilia
atgaaaaccaccctggatgagctgaaggccttcgttgcggtggtcgacagtggctcgatcaccgcagcggccgaagggctggagctgaccatctcggccaccagccgtaccctggcgcggctggaagacaagctgcagaccaccctgctgcggcggaccacgcggcggctggaactgaccgaagagggcgcggcgttcctggagtacgcgcgcacgatcctggccacggtggacgaggccgaggaacagatggcggcgcggcggctgcagccggtcgggcgcctgcgcgtggacgcggccacgccgttcatgctgcatgtgatcgtgccgctgctggagggcttccgcgagcgctacccgcgggtggagctggagctgaactccaacgagggcatcaccgacctgatcgagaagcgcaccgacgtggcattccgcatcggcgtgctgcgcgattccaccctgcatgcgcggccgatcggccacagccgcatccgcgtcgtcgccagtcccgagtacctgcgctggcatggcacgccgacacgcgtggagcagctgcgcaagcacgatctgctgggttttacccagcccagttcattgaacgagtggccgctgcacgatgccgatggcgggcctttcgtgatcgagccggcgatcgcttcatccagtggcgagacgctgcggcagatggcggtggccgggctcggcattgcctgcctctcggacttcctgacccgccaggaccggcgcgagggccgattggtgcagctgttcggcaaacagacgcaggacgtgcggcagtcgatcaatgcggtgtactaccgcaacaccgcgctggccgcacgcatcacctgtttcgtggaccacgtgacgcagacgctggggcagcgcccgtttgacgaataa

SEQ ID NO: 502495 - DNA, 804 bp, Stenotrophomonas maltophilia
atgagcgttccttcctttggcgtcggcactttccgcctgaccggccagaccgtcatcgactcggtacgcaacgccctcgacgtcggctaccgtgccatcgacacggcgcagatctacggcaacgaagccgaggtcggccaggccatcgccgaatccggcgtcccgcgcgacccgctgttcctgaccaccaagatctgggtcgacaactacgccgccgacaagctgatcccgagcctgcgcgacagcctggccaagctgcgcaccgactacgtcgacctgctgctgatccactggccggcgccgggcaatggcgttgaactgcgcgagtacatgaccgcgctggccgaagccaagcgcctgggcctgacccgccagatcggtgtgtccaacttcaacatcgcgctgacccggcaggccatcgaggtggtcggcgccggcgagatcgccaccaaccagatcgaactgagcccctacctgcagaaccctgctctgaccgccttcctgaaggaacagggcatcgccgtgacctcctacatgaccctggcctacggcaaggtgctgaaggatccggtgctggccggcatcgccgacaagcaccaggccaccgtggcccaggtcgcgctggcgtgggcgctgcacctgggctatgcggtcatcccgtcctcgaccaagcgcgagaacctggccagcaacctgctcgcccaggacctgcgcctggatgccgacgacatggccgcgatcgccgcgcttgaccgcaacggccgcgaagtcgatccgccgggcctggccccggcctgggactga

SEQ ID NO: 502496 - DNA, 177 bp, Stenotrophomonas maltophilia
atgaagatgaagaccctggccgcgcttgcgctggccaccctgccgctgtctttccaggccaccgccgaggactggtatccctctgcctatggcgccaacgatgagatcggcgcggccaacctgctgaccgcggacgtggtcaagcgcgcggtctcgctggtcaggaccggcagttga

SEQ ID NO: 502497 - DNA, 150 bp, Stenotrophomonas maltophilia
atgagtcggcgactccgcctcgcttgggcagccgtcgtgctggtagccgcggttgtcgtgccgctgcgcatcgctgagattcaccaggcgcacagcgaccgggacgcggccaaggcacgctgggcgctcagcacctcggtgaggggctga

SEQ ID NO: 502498 - DNA, 294 bp, Stenotrophomonas maltophilia
atgagcgcgactgaaaccgccctggcaaccttggaacgcattgcaggggtaaacgccgagtttggcgccgtcgcagcagcaacgccggatttcatgattcgcgtgggcgaatcaatgctgaagaagcaggccgtcgatctgcgcgctgcccacaccgcgctctctgagctgatcgaccagggcgaccgcctcactgtggcgttccgtgcgcttgtcaacgcgcaccgcgagtgcgaagcatcgatgctggcattcgccgctgccctcgcccgtgccaaaggcggtgccgcatga

SEQ ID NO: 502499 - DNA, 225 bp, Stenotrophomonas maltophilia
atgtcccatcgctatgccgatccaagtccctgcctgctgccgctgttggccgtgaaggccctgcgggcggtggcagcacgtgatcacagcaccgcccggaccctctgggttcgcagcaagggcgaacacagccgcaaccagctgcgccgctcccggcgcatgggcgtcgccagcctccgcctggaagcctgctcgcgcgacatgtctgcggaggtacgggcatga

SEQ ID NO: 502500 - DNA, 219 bp, Stenotrophomonas maltophilia
atgctccgtcgtattcgctggctccgcgatcactacaaccttggctgcttgatcgatcaggctactttcaacacgccgggcatcgactgccttgaaaacgatgcactggtgcgtctgcatcgggaaatggaagccgccagggaatgctgcatggacggcgtccccttggatgaagctggcttcatcagagacgtttccatccgggacacctggctctga

SEQ ID NO: 502501 - DNA, 555 bp, Stenotrophomonas maltophilia
atggatgccatcaccgccagacacctcaacctccaggccctggtcgccacgctcaaaccccagctggggacgcagaaagcgatcgccatccacctggacatggcgccctcctatctaaatcagctgttgagcggcaagaagatgggggatgacgttgctcgcaagatcgagcgcgcagccgggctatcacatggctggctggaccagccaaggtccaacgacggggctggtgctgagcctactgccggttctcaggatctgcgaatcgaccctgagatcattgcctccgcgatccggctcgtaaggcttacgttcgccaacctcggaatcgatgacttcagcaatgaagaagacggtacgccactggcttatgcctacgagtacctctatcaccgaggtgaggcgacggtaacgcccgacaacctgatcgacttcagcaaagcgcttgcgcaaaggctcagggagaaggatggagaaccagaagaaggaacccccggccgccgggacactcgaagcattggcccaggtgatcgcccagcgcgtcgcaaggcgtga

SEQ ID NO: 502502 - DNA, 237 bp, Stenotrophomonas maltophilia
atggacctactgaccttcatttcggaccccgaacgtaagcggcgcctcgctgccttgaccggcagttctgagggctacctgtggcagtgcgcgaccgggtggaggaacaagaagcccagcccgatcttggcgcgaaagattcaggtggcatcggtcgagatcggggtcgcgctgggatgcgagccgttggcgctggctgcgatccgtcctgacatctggccggccgaaaccccatga

SEQ ID NO: 502503 - DNA, 231 bp, Stenotrophomonas maltophilia
atggcagagatcatcagtttcccgcagcgaatgcacttcaccgccgtccgtacctacaacgccgacgggggcgtcggcggagtggtcgcggtgctgtttgcccccgtagaccgggctcatatctgccgaggccctcatggggtttcggccggccagatgtcaggacggatcgcagccagcgccaacggctcgcatcccagcgcgaccccgatctcgaccgatgccacctga

SEQ ID NO: 502504 - DNA, 531 bp, Stenotrophomonas maltophilia
atgacgtgcctccgctctgacctgtactggcgggatgcgctgcacaatgcggtggcgcgcgcccctggtggtctgcaggacgcggccgcgcacatcagcaagcgccgaggcaagtcgatatcggcggagacgctgcggaagaagctgaggggaatcgacggtgagtcggtctctatggagatggccgagatcctgacggactaccttctgctgttcgtcggcacgcaggacatcgccactgactgggtgtgctcgctcgcaggccagtacggcctgatggtcgattacgtaccgccgccgcctcgcggcggttggcccgatgagctggctgcgatccaggcaaagctgctggagttgcacaagctgacgggggcattggccggtgcgggaattgacgcgttggccgaccagcgtctgaccgtcccggaggcggatcgaatccaagatctgtcgcgtgaggtacgcaagctctgctaccgactcgagcgcaacgcatgccgtgcggctggacagcaggggatggaggactga

SEQ ID NO: 502505 - DNA, 1062 bp, Stenotrophomonas maltophilia
atggcgaacagttgcgttgacaccgatgcagtacgcgagtcggcaaacatcgctgatgtcatcggccgttacgtcaagctcaggccggctggtcgtggggagtacagcgggctatgcccgtttcacgatgagtcctcgccgagctttactgtcaatgaagtcaagggcttctaccactgcttcggctgcggtgcgcatgacgacgtgatcggcttcctggtgcatcacctgcagatcggattccttgaggcatgtgcacagctcagtggcggtcagttgggcgtcgcggcagagcgcgagaaactcccgagccaagaatcgttgcgggtgaagtgggtgcccatcctacccgtgcctgatgatgcgcccgcattgctgaccgacagcggctggacggtgccgatctggaacgccaagcgcgacaagctccgtaggatgaagccggccagggtgtttccctaccgcaacgcggtagggcagatccttggatacgtgctgcgttgcgagttcatcgatcgtgatagccgcaagctgaggaagtggacgccgcaggtgacctggtgtgtcgggccggatgggcagaagcaatggtgccttgagagctttccgggggcgcgtccgctgtatgggctagatgccttggccgcgaagcccgacgcaccggtgttgatcccagagggagagaagtgcagggatgtcggagcggctgccttccgtggttatgcagcgattagctggtcgggcggcggcaaagcagtcactaaaactgactggtcgccactggctggccgggattgtgtgctctggcccgatgctgacccggccgggatgcaggcaatgctggggtggaagaacgatgccaatcagttcaaacccggggtcgctcaattgctgaagcgggccggcgccaggtccatccgctttgttgatgtgacgggccagcccgatggttgggacattgcggacgcactggaacgcgatggctggacgcctcggcagctcgcggcctgggcggcgagtcgggtgattgaggtcgatgtggtggctgccaatgccacatga

SEQ ID NO: 502506 - DNA, 1401 bp, Stenotrophomonas maltophilia
atgagcgtggggacaaggcgcaggatgacattgatcgatggtggcggtgcgccaccgccaggcggtggcggggtagaccccaacgcctggaaggagcacctcactagaaatcgcgatggcaatgtcgagggcacgctgcacaacctaattctgatcatggagaacgatgatcggcttaaggggctgtggtggctcaacgactccagtaatcaggtaaagctgcaccgagatccaccgtggacaggcggaagcagggatgagttcatcgactcggatgcctacgagctggcagcgtggctgcaacacccggatcgctactggatgaagtgcagcgatgatctggtgctgaaggctgtcatcgctgtcgcgcgccggcaccgccgtcatcccatcaaggactacctcggtgccttgcaatgggatggagtgcctcgcgtcgagcgcatgctcgttgagctattcggtgcggcggacaatgcctacagcctgcgcgcagcgcagtgcttcatggtaagtgccgtggctcgcatcttgtgggtagacgccaagcagcccagcgtgggcgcacaggtggacttcatgctggtgctggaaggtgagcagggcaagcggaagtcgagcgccctgcgcgcgatcttcggcagcgaatggtttgttgagaccagcgaatctccgagcggaaaggacttctaccaggtcatccaaggtgcgtggggcgtcgagatcggcgagatggattcgttctcgaaggccgatgtgaccagcgtaaagaccgccatcaccaggcgcgtggacaagttccgagcgccctatgagcgcgtgcctcgctcctaccgccgcgaatgcgtgttcgccggcaccacgaacgagcatcagtacctacgcgacccgaccggtgggcggcgcttcctccccgtgcgaactgatggcgacgtgcaaatcgcagagatcgcgacgttgcgcgaccagctgtgggccgaggctgtgaccatgttcaacgctgggttcgagtggtgggagctgccggcagacgcgaaggaagagcaggccagcaggtacgtgggcgacagctgggaaggacgagtcgagcagtggctcgaccttcggatggagccgagcaagtacccgacacggctggcgatggcgccgcagatcgactgggcgaccaccgacaacctcctgacgtacgccatcggattggaccctggcaagcatggcaagcccgagcagatgcgggtcgcctcgatcatgaagacgctgggctgggagcagcagcgcaggcgttggcccgatgacggcggtcgggagcctcggtggttcaggcctggcctcgcaatcgatgactggctggcaaccgtacagcggtcaaggcaggagggccccagtggacctgacttctga

SEQ ID NO: 502507 - DNA, 510 bp, Stenotrophomonas maltophilia
atgaagcagggtgcattcggcgatctggtgggtatttcccagcaggcagtcagcgacctggtgcgtcgcggcgtgctggctgacggtgcggctggcgatgaatggctgctcgcctattgcgaccatctccgcgaagtcgctgccggccgtggcggtgaggctgggaaagacctgaccgccgaacgcgccaggctggcgcgagagcaggctgaccgcttggcaatgcagaacgctgtaacccggggcgagctggcgccagcgcacctcatggaacaggtgctgtcgaaggtcggcgcacgggcgggtcgcattcttgaaaccatcccagggacgctgcgccgtcgtttgccgcagctcgcagcctccgacctcgatgtggtcacgcagattgtcgccaaggcccggaatctcgccgcatccatgcgtctggctgacgtggatgccgacgacgatgcagatgcggacgccagcgcggctatgcccgtcactactgaggatgatgaccagtga

SEQ ID NO: 502508 - DNA, 2091 bp, Stenotrophomonas maltophilia
gtgaccttgctgcgaggaatcgaagccagccagctgcaggccgtagaacggcatctgcagcgcggactagcgtcgtgggcggtgcacgagcccatcacgctggaggcgtgggctcgggagcatttctacctgtccgctgagtcaagctacgttgagcagaagtggacaccctggccgttccagcgcggcctgatggcggtgatcagcaacgacgacgtggccgaggtctcggtaaagaagtcggcgcgcgtgggctacaccaagatcctcctggccttccttggctacaacgcagagcaccgacgccggaaccaatgcatctggcagccgactgacgacgactcagacgacttcgtcaagtcggagctggagcccatgctgcgtgacgtggagtgcatgcgggcggtgttcccggcctacctggcccggcacaaggacaacaccctgcagcagaagaagttcatcggttcgcttctgcgcgtgcgcggcggcaaggccgcgaagaactaccgtcgaatctccgtggacgttgccctgctggacgagctggacgccttcgacaacgacatcgaaaaggaaggtgcaccggactcgctggctgccaagcgcctggaaggcgcgacatttcccaagcttgttgctggcagcactccgaagctcaagggcttcagcctggtggatacgcgctactcgcaggcggatgagcgattcacctaccaggtgcgttgcccacagtgcgatgcctttcatgccttgacgtggggtggcaaggacgaatcgcacggcttcaaattcgagcgagacgcaactggcggcgttgtccacgtctaccacctctgcccgcactgtacctacccgatgacgcagggcgattatctgctggccgctgagcagggcgaatgggtgaactcgcgcggcgacctctggctccgcgccgatggccgcttcaccacgccggagggccatgtggtccaggctccgcgccatgtggcgcttcacatctggaccgcctacagcccggcagttgcgtggcagcagattgtccgggagttcctggaggcgtacatcaagcaccaggaaggcgacgacagcaagctgaaggcgtggaccaacacgactctgggtgaggcctgggagggagaggtcgaacgcacggacgctgatgagctggcgaacagggccgagccattcccgctcaagacgatgccccgcgactgcttgctgctcctgtgcggtatggatacccaggacaaccggctagaggctggcgtatggggcgtcgggcgaggggggcagatgtggaccatcgaccaccgcgtgttcttcggcaatcctgcacagatggaggtttggactgaggctgaggcgttcctgcgggagcaggaatacacacacgccagcggcagggcgcaacggatctatgcgaccgcgatcgactcgggcggtcaccatgccgacgctgtgtacgccttcgcacacaagttgaaggcgttgcgcgtgcacgcagtgaagggcgcgagcggccaggagcgctccatcgagaacggcaacagccgcgtcggctaccgcttcaatgggcgtatcgagaagcacggcccggtgctctggcacgtgggcacgaacctcgcgaaggatcgattccagtcgcggctggacgttgccgttcccggcccgggctacgtgcatctgtcggatcagctctcgcccgaatggttcaaacagctggcgggcgagatccgcgctacgcggaggatgaagggtgggtcggagtccaggtggaccgcgacgcgcaagcgaatcgaggtcaaggactgcctgacctacgaaatatggctggaggaacggctcgacctgtggggacccaagaaggcgaagtggtgggatcagttggaggagcaggtgcaaccggaaaacgatctattcagcctcccgccggccgctgcattgccggcggcggacgttgcattgcctgcgccgccggtgacccaggtcgtgaaaaggcccccgccgcccccggtgcgggtcgcgcgcgattcccgtgaaacgtcacgcgatgactttgggtcgagcggttggagtagccgcctatga

SEQ ID NO: 502509 - DNA, 330 bp, Stenotrophomonas maltophilia
atgagcaactcgcgcgacatcgatgctgccgagcagctgcgtcgcctggtgattcgaggcatcgtcgagcaaaccggcttgaacgaggagcacgcgatgccctatgcgacggcggtactgaccgttctgcaaaccgagtatggcggtgagcgactgcacattcccaaggcggctgtgcaggacaaaccgtgtgcacgcgtggaggcaattcgcgccgagcttgccgagggacagaactggcgattggtctgccgcaggcacgggatatcgagagccgctctgtatcgcttgttccctggtggattgcctaaaccatcgaaagcgagctga

SEQ ID NO: 502510 - DNA, 198 bp, Stenotrophomonas maltophilia
atgctgcagacgtacctggccgccgaggctgcggtactgcagggtcagtccttccgcatgggggagcggcagctgaatcgtgccgacctggcggagattcgcgcaggccggcgcgagtgggaagccaaagtgaacgcgcaggcgcgaggcggtagccgcatgtccgtggctcttgccgatttccgggggggcgagtga

SEQ ID NO: 502511 - DNA, 1527 bp, Stenotrophomonas maltophilia
gtgaaccgccttgaccgcgccatcgccgctgtggcccccggctggggcgcaaagcgtgccatggcgcgcgcgcgaatcgctgcctacagcagcgcttacgacggcgccacgcccagccgcctgcgggaggctgcgcgtgagtttggctccggtaacacggcggtcgccagtggcgcgacgcgaatccgcacgcaggcgaggcacctggaccggaaccacgacattgtggtgaacggcttcaatcagatggtccagaacgtgatcggccgggatgggatcggcatcgagccgcagccgcgcgacgagaacgggaacatcgtggagtccctggtcgatcagatcaccccgctgctgcgggacttctggaaacgcccggaagtcacctggtgccatgacttcggtgcggcacagcggctgatgacccggaccctgttccgagacggcgagtgcttgtaccaggatctgatcgggcccgtgccgtacctcgaccatggcactgttgtgccttacagcatcgagatgatcgagcccgaccttctgccaatggatctgaacgatcccggtcggaacatcatgcagggcgtggagcggaacgcatggaaccgccccatcgcctatcacctgtacaaacagcatcccggcgacccgaacgcggtcatgccggaagtgaaacgcgtgagcgcagacttcgttcatcacgcaaagatggttgatcggatcgggcaggtgcgcggcgtcagcctgctggcgtctgtccttactcgcctggatgaccttaaggactacgaggaatccgagcgtgtggccgccaagatcgcagcaagcatggcggcgttcatcatcaagggtgatccgcagagctatggcgagaacgagacagttcccgagcggcgcagcatgcggttccagcctggaatggtgttcgatgacctggtgaagggtgagagcgttggtaccgtcgataccaatcgccccaaccccaacctggagacctaccgcaacgggcagctgcgagctgttgccggtggtatgcgggtgtcgttctcgtcgctgtcgaagaactacaacggcacctattccgcccagcggcaggagctggttgagcagtacggtgcatatggcgttctggcctatgaggtgatctcgcagattgtccggccgatctacgagcgcttcatccaggcagcgattgcatccggcgagctggtcgttccgcgcggcgtttcgatgaccacggtgaccgatgcgatgtacatgccgccggtgatgccgtggatcaacccggtccatgaggcgacgggccttcgcatgatgatccgcgcgggcatccgctcgctcacctcggtcatcagcgaacgcggtgggcgcatgtacgacacgctggaagagatccgcaacgaacgtaagtgggcgcgtgacctggggatcaccctggacagcgatccgggccaggtgagtgacgcaggcgtggcccaggccagcgctgatgccagttccattccaaccccttctgaggatctgcaatga

SEQ ID NO: 502512 - DNA, 2307 bp, Stenotrophomonas maltophilia
atgaattacctcacccgtaacgccatggcagcggcgcttggcgctgtattggcagcgacctttgcattcgacgcaagcgacatcgaggcgctgcagccggaggcaaagggtaagtcggtcctcgcgttgaacaccaccagcggcggtgaggctgagctgctgatctacggtccaatcggtgactacttctggggtgaaggcgtcactgctgccagcgtagtcgagcagctggccgggaccaccgcgagcgtgatcaacgtgcggatcaactccgatggtggcgtggtcaccgatgggttggcgatctacaacgcgctgaagcagcatccggcgacgatcaacgtcaccgtggacggtgttgccgccagcatcgccagcctgatcgccatggccggcagcacccgtcgcatgcacgagaacacgatgctgatgctgcacggcccgcagggcggtggctggggcttcgctggcgatctgcgcgagcgggccgatcagatcgacgtgtatgggcgtcagatgctggtgacgtactcgggtcgcgccaagaacccggccgacatcgagacgatgctgaccgatcgcaaggaccactggcttaccgcagccgaggcgctggcgctgggcctgatcagcgaagtcattcccgacgtgcagccagagcctgcggactccgtagcggcagcagcgctgctgtcctatgtgagcgcgatctccgggaccgagggcgccgtgcatgccctgctgcgcaagcacatccaggcaaccaccaccgcttcagccttcgcctcgctccgcgaggttcaccagcgggccgttgtggcccaccttgaggaaaccagcatgaaacagcagtgccaactgatcatggcgcaggcgggcaccgctccggctgcaccgacccccgccgccccggcatcgcccgtacccgccattccggctccgccggtcgcagccgctgctgtcgcgcctgcgtcctcggcgccggctgcaacggtcgagcaggtgatggcggcaatctcggcccgcaacgcggccattcgtaccgtcttcgccggattccgtgaggtcagcggcgtccaggcgctggaggccgaatgtctggctgatgctgcgatcaccgaggacgtggcgcgcggcaagctgctggcgaagctggcggcgagcgggcagccgctggccggcggcttcagcatcacggatgtggtgccggaggaggataatcagcgtcgcgcccaggtcaacgcgcttctggcccgtgccggcgtgttgaccggtgcagaagccgaatccgcgcgcaacggcaaccccttcacgcacaccacgctgttggcgctcgccgagcgctcgttgatccaggccggtgtccatacccgtggcatggatcgtgagcagattgcgcgcggtgtcctcgctgtgcagaccaccagcgacttcccggttctgctggagaacgtgctgcaccgggttctggtcggggcctacaacctgcagcagttcacctggacccgattctgcgcgaccggcacgctgtccgactaccgtccgcatagccgctaccacctttcctcgttctccgacctgaagccggtcaatgaagcgggcgagtatgagaacggcgtgttgggcgacggcgaggccgagacgatcaagggcgctcgcaaggggcgcatcctgcagatcaccccggaagtgctggtgaacgacgacctgggcgcgttcgtgcgtatcaccacggcgctgggccaggccgccggccgcacgatcgaaaaggacgtctacgccgtgctggcgcagaacgatggcatgggcccgaccatgaaggatggaaaaaccctgttccatgcggaccacggcaacatcgccaccggcgccgccgtgtccgtggattccttcgacgcgatgcgtcagctgatggcgctgcagaaggacccgggtggcaatgactatctggatatctcgctgtcgcgcttcctgggaacggtcgcgatgcatggccgcgcgaccctggtgaacaacagtgagtacaacccggacgtgactggccggttccaggtcaacaacacctcccgtggcaccttcagcgacatcatcacgtccccgcgcctgggcacgggtaaggcctggtacggcttcgccgatccgaatgtggagccggtgatcgaagtcgcgttcctcaatggcgtgcagacgccggtactggagcaggagaccaactaccgcacggatggtctcagctggaaggtcgtccacaagtacggcgtgggcgcggtgggctggcgcggcgcttcccgtaacccgggcgagtaa

SEQ ID NO: 502513 - DNA, 360 bp, Stenotrophomonas maltophilia
atggcgaagaactacaaatttccgggtgcggtgatcgacatcgtcgcggcctccgacctggtcagtggtcaggcgtccatcgtcggccaactgttggccgtcgcattggtggacattccggccggcggcaagggcagtgcccagatcgagggtgtgttcgaactgccgaagctcatcagcgccaacattgctgcgggtgctggcctgacctgggatgcccaaggcggacgactgatcgtcaccggcgccgatgctggcgacctggagggctgcgccgtggctatcgctgctgctggcaatggcagtgcaaccgtgcttgcaaagctgatcccgggctcgggttcggtgaagtcggcgtaa

SEQ ID NO: 502514 - DNA, 432 bp, Stenotrophomonas maltophilia
atgagcgccaccagcacgccgcgcggcgtacgcaacaacaatcctggcaacatcgatcgcaccagcacgccgtggcagggcgaggatcgttccgccgctgccatcgcccgcgagggccggttctgtgtgttcctgaccccgcaggccggcttccgcgccctggcaaagacgctgatcacttaccagcgcaagcacggcttgcgtacggtgaaggagatcatcagccgctgggcgccgccggtggagaacaacacttcggcttatgtgcaggaagttgccaaggcggtcggggtaagcccgagcgaggtcatcaggctggacaacgccgtgacgttggaacggctcgctaccgcgatcgccaaacacgagaacggcggcatgtactggcgcgcggatgtgatcgccgccggcgttgctgaggccctgagctga

SEQ ID NO: 502515 - DNA, 342 bp, Stenotrophomonas maltophilia
atggtcgggggcgaggtcaatgcgcatgcaccctggtgggcggctggcagtgtagtggccctctggctcctgcgtgagacttggacggttctgctctcacgcaggaaggagcgcaccgagacggacgccaacgttgaactcctgaacgggcttgtccggcgtgtggactcgctggagagtagcctcaccgcaaccacagagaagctcatggaagagatcaagctgcgcatggctgctcaggaggaagcgcacaggctgcgtctgcgcatcatgtccctggaagcggcgatgcgaagcgtgggcgcgatcatccctcccgaaagtccggtggtgtcggcatga

SEQ ID NO: 502516 - DNA, 492 bp, Stenotrophomonas maltophilia
atgatccgcgccctcatcatcgccgtccttctgctgctgggtgtcattgtctggcagcgtggttcggtgtccatcgctcaccgtgcggccgacaaggctgtggcgagccgtgacgccatgcagggtgagcgtgacgctgcccgagctgaggccgatgccgcctacgaaaccctgaaggtagagcgtggcagcgccgcagcagcgaacaacctggcgtccaagtacgaaaaggaaaagaacgatgcacagaaggcgtctgatctcctcgtcgctgatcttcgcgctggcaaccagcgcctgcaccagcgttggcaagcgtccctcgccaccgcagagctgtccgcggccgccgctgccggcagccagcctgatggtcgagccgacgaccgaattgaaagtgcgggccgagctattggcgccgccgcccagtgcgacgcccaggtgagggcgctgcaggcttacgcgatgctgtgttcgggaggtgcgcggtga

SEQ ID NO: 502517 - DNA, 336 bp, Stenotrophomonas maltophilia
gtgagcgaggtcgacttcctccgcgatctggatggcaccttgcacgccgcctttgcgctggcgggcatggcgtcgcgaggtcggtacacggccaaggatggtccgaccaccgagggcgtgcgcgcctatgtggagcgcgacgttgagaccatcggtgaactgcgccagttcaggtcaggccgtgtggagatcgcgtacctgcggtcggacgtagcgcctgaccagggcgatcgcttcgagttggtttcgagcgcgttcggtactgaggtcttcgtcaacagtaagaagatcagcgatgacggctcgcagagccgctggctggtgacacgtggctga

SEQ ID NO: 502518 - DNA, 483 bp, Stenotrophomonas maltophilia
gtggctgacctggcagagccgctgtcgtggcagctggtggagttcttggctgcccgcgtccgcctgatctcgcgcagcagtggcttccgcaccgacatcggtgcgggcgccgtaatcatcgatgaaaccgagatcggcgaggacagcaccgagccagcaacgatcatctcggttcgccagctttcgcgcagtggtggcggtgtggcccagtccacctccgacgcggccatcaccatcgagttcgaagttccgcgtggcagcgacgaggcgaatcccaggctgctcgttcaccgcgcgcgccacgacctgatccgcgccctgacgttcaaagagaagtcgctgccgctgggggtgaccagtttcgagttgctggaaacccagctggcgaccctggaggacgatgccgggcataccgccgtagtcgctcagatcaccgcgcgggctggtctgaccgagacctttgagcccgtccccaacctgtag

SEQ ID NO: 502519 - DNA, 420 bp, Stenotrophomonas maltophilia
atgatccaagccagcgccggattcctcaccgacataggggcggggctgatcgtggtcgacgatgccgagctgggtgaggatcagtcgggaccagccacgctcatttcggtccagcagctgtcgcgcaccggcggtgggtctgcccaggtcacctccgacgcctcggtcacgattgagtttgaggtgccgcgagagagcggtgaggtgaaccctcggctgctcgtgcaccgggccaggtacgacctgattcgcgtgttgaccttcaacgacaagctgctgcccaagggcattaccacgtttgagttgcttcaaagccagatggcaaccctggaagacgacgcagggcattccgccgtcgtcgctcagatcaccgcgcgggctggtctgaccgagacctttgagcccgtccccaacccgtag

SEQ ID NO: 502520 - DNA, 336 bp, Stenotrophomonas maltophilia
gtgagcgagctggagttcctccgcgatctggatggcaccttgcacgccgcctttgcgctggcgggcatggcgtcgcgaggtcggtacacggccaaggtgacggcggtgaaggacgggactgtcactgagggtgtgagggtctatgtcgatcgcgacgtagagacgatcggcgagctgcgccagttcgtcgccggccgtgtcgaggtgtcctttctgcgtgtagatgtcgaacctgagcagggcgaccgtgtagaggttggcggtgaggtgttcgtgacttcgaagaagctcagtgacgacggctcgcgcagcgtctggctggtgcgccgtggctga

SEQ ID NO: 502521 - DNA, 204 bp, Stenotrophomonas maltophilia
atgcgcagaaggcctctgatcgtctcgtcgctgatcttcgcgctggcaaccagcgcctgcaccagcgttggcaagcgtccgtcgccaccgcagagctgtccgaggccgccgctgccggcagccagcctgatggtcgagccgacgaccgaattgaaagtgcgggccgagctattggcgccgccgcccagtgcgacgcccaggtga

SEQ ID NO: 502522 - DNA, 339 bp, Stenotrophomonas maltophilia
atgaccgggagcggcgtgggggatggcgcaccttggtggctggctgccagtgcagtcgcgctatggctggtccgggagacgtggggtgcggttctggcgcgccgaaaagagcgcaccgaaaccgacgccaacgtggatctgctgaacgggctcgtagagcgggtgaagtcgttggagacgtcccaggcggaggtggtcaagcagtacaacgaagaggttcgcttgcgcatgaaggcgcaggaagatgctcatcgcctgcggttgcgtgtcatctcgctggagtcggcgctcaagcagttgggagtggtggtcccgcctattgaggagtctgtggcatga

SEQ ID NO: 502523 - DNA, 432 bp, Stenotrophomonas maltophilia
atgggtaccaccggcacgccgcgcggcgtacgcaacaacaatcctggcaacatcgaccgtaccagtacgccgtggcagggtgaggatcggtcagctgctgccgtcgcccgcgaggcccgcttctgcgtcttcctgaccccgcaggcggggttccgggccttgggcaagaccctgctcacctaccagcgcaagcatggcctgcgaacggtgaaggagatcatcggtcgctgggcgccaccggtggagaacaacaccaccgcatacgtgcagcaagttgctaacgccgtaggcgtgtcgccgtccgaagtgatccggttggacaaccctgtgacgctgggtcgtttcgcgaccgccatcgccaagcacgagaacggtggcatgtactggaacgccgacgttgtcgccgcaggcattgccgaggcgctgaaatga

SEQ ID NO: 502524 - DNA, 366 bp, Stenotrophomonas maltophilia
atggcacagaacttcgtatccgatggggacgtgatcccttggaccaacaccaccgatcagccggttgcatcgggtcagccagttgccgtcgggcaccagctgggggtcgccctggtcaacatcgcagtcggcgcgaccggcagcgtagccctgggcggcgtgttcacgctgccgaaggtgccggcggcggtcttcgagcaaggtgaaaagctggtgtggagcgcgagcgccaaggcattcgacggaagcgccgcgaccgccgctgccggcgacatcaccggtgcggcgtttgcctgggctgccggctctgccggtcaggcgacggccgaggtgcggctctcgccgggcaacgccaccaaggcataa

SEQ ID NO: 502525 - DNA, 1977 bp, Stenotrophomonas maltophilia
atgccccagccaatccaggctccaacgcaggacggtacgacacgcctcatgcccccgcagttgcgtgaggccgagctgcagccgaccagcttcgatagcgaggcacgcacgatcgaactccagtggaccgccggaacccgagtgcgccgctacgactggtggaacgacacgtacttctgggaggagctggtcgttgatgagacggcctgcaacatggagcgtctgtcgtccggtgctgcaccggtcctggacagtcataacacctggggcatcggatcacagatgggagtggtggatcgcgcctggctcgccaatggtgaaggccacgccctcatccgtctctccggtcgcgaggagctggccggcgtcatcgccgatatcggcgcaggaatcatccgcaacatctcggtcggctacaccgtgcagcgctatgagatcgagcgggccgtcaacccgggcgatctgccgatctaccgcgcagtggagtggactccgagcgaaatcagcttcgtcactgtcccggctgatccggcagcaggtacccgtagcaatcaacccgcacaggggaccccctgtgtattcacccgtagcgcatcgtcgcaggagcacaccatgcctcagcccgccgcccgcgccgccgaatcggcggtccagcaggaacccatcaacaacgccccggctccggcagcgccggccgcagctcaggcaccggaaggtgacacgcgggcagccgacattgtggagctggcaacccgccacggccaggcggagcatgccgctggttggattcgcgcaggtcactcggtcgatcacgtgcgcggcctgatcttgacgacgttggagcagcgtgatgccgccgctggcggcaacatcaaccgcatcagcgtcaccgaggacgagcaggatctgcagcgctccgccgtgacgcacgcgcttctgcatcgtgctcaggtgatcgatcccgcgaccaagcgaatcttcgcgctcaccggtgacaacccggtgcgcggcctgaccctgatggacctggcccgtcgcagcctggagcgttgcggcgtacgcaccgatgggatggccaagctggaactggtcggccgcgcattcacccagagcggcagcgatttcccggtgctgctcgaaaacacgatgcacaaggcactgcaggcggcctatgccgttgcgccggacacctggtcccgctggtgcgtcacgggcacggtcagcgacttccgtgagcactcgcgctaccgcgtgggcagcatcggcaacctcgacaagctgaccgaggctggcgagttcaagaacaagaagatcccggacggtgagaaggcaaccatcagcgccggcaccaagggcaacaccatcaacctgacgcgtcaggcgatcatcaacgacgatctgggcgcgttcctcggcctggccaccgccttcggtcgtgccgcaaagcggaccattgaggccgatgcgtatgcgttcctggccagcaatccgaagctggattccaacaagacgctgttccacgccgaccacggcaacatcctggcagcagcagtgccgagcgtcacctcggtagacgcgatgcgcgtccagctcgcccagcagaaggatgtgggcgggaatgatgtgctggatctgtcgccggcgctctggctcggcccgaccaagtacggcagtgccgcgcgtgtcaccaacaaggccgagtacgatccggatgccgaagggaaactgcagcgcccgaacgcagtgcagggcctcttccgcgacatcgtggacaccgcgcgcatcaaggacgacaagtggtacctgttcgccgatccgaacgactgcccggccattgaggtcgcattcctcgatgggatcaccgaacccttcctggactacgaggaagggttcaccgtcgacggcgtgcgctggaaggcacgcctcgatttcggcatcgccgccctcgactatcgcggcgtgcagcgctgcggctga

SEQ ID NO: 502526 - DNA, 1491 bp, Stenotrophomonas maltophilia
atggcggcctcgctgctggacagggtcatcggcgcaatttctccgcaggcagccctgaagcgtcaccgcgccagggcaacgctggacgctgtgcgtgcctacgagggcgcctcgcgcactgacggttggcgtgttcgtagggcgggggctagcgcgaacaccgatcacttggcagacgcccgcgagctgcgcaaccgcgctcgggcgctggtgcagaacgttccgtactgcgcacggtccctccaggtactcgtgagcgccacgatcgggactggcattactcccaaggccgaaggcccgaacgcttccgcgctggacatcctgtggggccgctgggccgatgtagcggatgcggatggaaagtcggacatctacggcctcatggctaccgcgtatcgcgcgatggagcaggacggtgaggtcatgattcgccgccgcaccaggcgtcagtcagacggtctcgcggtcccgctgcagcttcaggtgctggagatcgactggctggacgggaacaagaacgggtctgcgtcgggcggtggtcagatcatcaacggcattgagtacgacgcgatcggtcggattcgcggctactggttgttcggagctcatcccggtgatgctgtgcgtggctctgtacgcctgagcagttcgttggtgcaggcatccgacatcattcacctctacaaccccgtccgccctgggcagggacgcggcattacgcgcttcgccccggtgatcgcgcgagtgcgcgacttgatgctgtacgaagacgccgagctggcgcggaagaacctggaagcgcggcttggtgtgatcgtcagtggcgacatcgactcgatggccaatgcggacgatgacggcccttcgcagctcggctcagatcgtgaccaggtcaccgaccttgggccactgcccagcggtggtgtcacccacatcactggcgccaccgccttccagactgtcgagccaaagccagcagggggctacgtcgaatactgcaagtttaacgcgcacataatcactgccggcattggtgtcccgtacgagtcggccaccggtgatatgcgtgaggtgaacttctccagtgcccgcatccggcagatggagtttcgccgtgattgcgagcagatgcagtggctggtgctagttccacagatgtgtaagccaatctggcgctggtttgacgaagcagccgcgcttggcggtggggtgcgttctgcgggaagcactgccgactggagcacgccgcgctgggactacgtcaaccccaagcaggacatcgaatcggaaatcgcagcgatgggcgccggtctcaactcgcccagtgaggcgctgcgtcggcgtggctacgacccggatgcggtttacgtcgagatgggcaaggacttcaagcggatgaaagagaccggcgccctcggtctgatgactttccttcaatccagtggcgcccggaccggcctggtcgacgcctcaacaaccaacgaggaatga

SEQ ID NO: 502527 - DNA, 216 bp, Stenotrophomonas maltophilia
atgagctggaccaaagacgatgtgcagaggctgaaggccgccatcgctagcggccagttgtccgtccggcatggtgatcgtcaggtcacctatcagtccgtcgaagcaatgttgacggcattggaccgcatggaagctgaggttgccgccacgacggctgggcgacggaagtcagccacgcgccactaccgcttcacgacgctgaggggcttctga

SEQ ID NO: 502528 - DNA, 318 bp, Stenotrophomonas maltophilia
gtgagcaggaatacagtccgaaacaaggtgcgaatcagtgagctgacggaggagctcgctgtcggcgccgcgctgcgcctgagatgtgacagcgacgacatacgcaacgttgtggaggccgtggtggcctaccttgtcgaggagtacccagcccaggatctgtacattcccgccagcatgcaaaacagtgcctaccctgtggatgcgatccggaaaggaatgcaggaacaggagtcggtaaggtcgctgtgtaggaggttcagaatcgacagacggacgctgtaccgcttgcttgatgagccttgcgccaatgggtag

SEQ ID NO: 502529 - DNA, 1926 bp, Stenotrophomonas maltophilia
atgacgcaggcacagcactgcctggcgtcggtgctggcacgctcgcttcagccgcgacggccgatgagcgtgtcgcagtggtgcgatgagcacatgcgtctgtccaccaagagcggtagcaagcccgggcgttgggtgacggatcgcaacccgcccctgcgtgagccgatggacaacatgtctgcccgaagccccgtccacgaccaggtctgcatgtttccgatccagttcggcaagagccagctggcgaccaatgccatggcgtactggatggactacgcgccgggcccaatgatgtatgcgctgccgggtgaggtgtccatgaacaagtggattgcccagaagctcaaccccatgatcgaggtctgtgcagcggtcaagaaggcgctgacgagcaccgccagccgcgacagcgccaaccagcgcacgttcaaggacttcgccggcggccagctgttcgtggagcacatgggcagcccgcaacgcctgaagtcctcgacggtgaagtaccttcaggtggatgagatcgatgaggcgccgcagcagctctccactggcgacgacccagtgaagatgctggacggccgtacatcgtctttcccgaccacctacaagcggcagtacatcagcacccctggtatcgccgggctcagccggattgcgaagctgtacgacaagagcgatcagcgccggtatcacgtgccgtgcccacactgcggtcactaccagccactccagtggagcggcctggtgtggtcgcccgacaagagccacgcgtggtacgcctgttgcgaatgtggggttgccatcgaggaacacttcaagaccgaaatgatcgcgaaggggcgctgggtggcggccaatcctgactcgccgattcgcggctacaccatcaactgcctgtactaccagtttgggctggggccgcgctggttggacctggtgaaggagtggatggaggcgcagggtgaccctgcctccctcaagacctttgtgaatgaccggctggccgagacgtgggaagacccggcaatgcgggcggtcaagcacaacgtcattaaggatcgtgccgagccctatgcacttcgctcggctccgcagggtgtgctggctatcaccgtaggtgtagatacacaggacaaccgccttgctgttcacgtcgtcggctgggggcggggtatgaccgcctggacgctggactatgtggagctgcagggcgatccagccgaagaaacggtgtgggtagccctgaccgatttgctcaaccgcgcaatcgagcgcgaagatggcgcgctgctccggccgatggcagtggccatcgacgctggtggccaccgcaccgaggctgtcaaaaactacgtccgtcagcggcgcatcacccggccaatgtgcatctttggtgctgtacccaacaacgctcctgtgctgtccaagggcaagttggctgatgtcacctggaagggcaagactgacaagcgcggcatcaccatcaaccacgtggggaccgttgcagccaagcactacctctacagccgtctgtcggccgacgccgagcgcaaacccgagaatcgcatggtccacctcagtgaccagctaccggaggagttcttcccgggcttggtgtcggaggtctataacccagtcaagaatcgctttgagaagaaggtggcccgaaacgagccattggacacatgggtgtatgcctacgcggcgacccatcacccagaggtccgtatcaaccgcttcacgcgttccgattgggaccttttggaacaacggctggctgcgccgccaagcgtgagcgtttcacgcgaaacgccagctgctgcgtcggaggccgacgcttccactgattcccgtgaaacatcgagtttgcctcgccggcagcggcccgcgcagcctcgcagcatggggaggcagtggtga

SEQ ID NO: 502530 - DNA, 645 bp, Stenotrophomonas maltophilia
atggctgaggatgacgtgacgatcactggcaaagagctggcctccctgatcggctgcaggccgtcctacgtggtcgagctgaggaagaggggcagggtggtggtgggtgctggcggaaagggattcctgaaggccgcctccctggagctctacgcacgtaccgcagatccggtctatgcaggcgtatcccagcgccacgcagatgagcgtggtagctcgctggtggggagcggggagggtgccaatgccctcgacgccgacatcgatgacgatgaaggggatggcgacgaggacgattccaggccctcacgggccggccggccgcagaccccggattccgcgcgcaaagcaaaggcgctggccgacaaggcagagaccgacgcgcacatggcgcacatcgcgctgcagaaggagctggggttgctgctgcctcgcgcggacgtagaagccttccttgcagagcacgccacgacgttccggggggccatggagcggttggccgatacgctagcgccgcaactcgctgcaacgctggacgaggctgggtgccgccgtctcgtgtgggatgaggtgagccacgctctggaagagctcagccagggctttcgcacgttggcggccaaggcggcggagggtgcggaatga

SEQ ID NO: 502531 - DNA, 2415 bp, Stenotrophomonas maltophilia
atgtctgagaattatggggatgtgctgcagcagctgcagtctgccggcctgctggtcaccgaactggacaccaccggacgcatggtccggtgccgcgtcgaaggctcacgcgagcgccggggctggtacgcgctccacgaactgaacacctcggccggcgaggtgctggtcgtcggtacctacggcgtctggcacggtaacgaaaacggcgcgaccaaggttgatctgcgtaagcgcgacaaggccttctccgatgaacagcgcgaagcgctgcgcaaccgcctcgccgaggatcgtcgcaaggcggagtccgcccggcaggcccaagcgaagcgtgcggctgagcgagcatcgtcggcctgggccaaggccaacgcagtcggcgacgccgactacctggtcagcaagggcgtgcagggtttcggcctgcgctacggcacaacgggtgccgcgcttgtcccgctactggacgtcaacggccaagtgcatggcctgcaggtactgcgcagtgcgaagctggcggccgcaggacgcaagccggccaaggaatactggccggcaggcatggccaagaagggccacttccacctgatcggcggaagcccgcagtggatcttgctggtggccgagggctatgccactgcggccacgctgcacatggcgacgggctacccggtagccgtggctttcgatgctggcaacatgctggccgtcgcatcggccctgacgaagcgctatcgcggcatcaagatgctgctgtgcgccgacgacgacgtgctgcagaagtgccggcactgcaagagccgcctggtgctggccgaccatccgcagttctgcccatcgtgcgcgcagccgcatggcgcatctaatgccggcctgctcggtgcagaggccgcagcgctggacgtgggcggggcagtgctgcacccggtcttcgccgatgaggcggccaggcgcgagcgcttcatcgagaacggccgtaaggtcagcgacttcaacgatctgcacgcacaagagggtctgcatgtcgtgcggtcgcaggtggaagcccgtctcacggaactgtcatggcgagtgccggccgaaaaacgcgcggcttccatcaccagcgatgggggcgcggggaatgatcgcctagcgccgatccactcgctgaacgagctgcttgagcgcttcgcgcttgtttatgggcagggcggcacggtgttcgatcacaaagagcacatgctggttgccttgggcgacatgcgtgatgcctgcgtgcgcaaggagctgcatcgtgcgtggatggagcactcggatcggtccatcgtgcgtgtccgggaagtggactttgacccgtcgtgcgagaaacccggggtgacgtgcaaccttttcgccgggtggccgaccgtaccgcaggagggcaactgcgaacggctgttgcagctgctctggcacatgtgcggaaacgaggccaaccagaaggcgctgtacgactgggtggtcaaatggcttgcgtatccgctgcagcatcctggcgccaagatgaaatcgaccatcgtcattcatggtccgcagggcaccggcaagaacatgttcttcgatgagtacatgaagctctacggtgactacggtcgcgtgcttgaccaggcggcgctggaagacaaattcaatgactgggcaagccgcaagctgttcctgctggccgatgaggtggttgcacgcaccgaggtgtaccacctcaagaacaagctcaaggcgctcatcacgggtgaccgcatccgcatcaacccgaagaacattcaggcctacgaggaagacaatcacgcgaatctggtgttcctgtccaacgaggcgatgcctgtcgtgctggaggaggatgaccggcgccacgcggtgatctggacgccagacaagctcagtcaagagttctacacggaggtgctggctgaaatccgcgatggcgccacggcggcgctgcaccactatttgctgcaggtggatctgaccggcttcaccaatggcaccaacccgcctatgacccaggcgaaagaggagctgattggcctgagccaggatagcccgcagcggttcctggacgagctttacggcgacgacatccccgggctcaagccaatgccggcgctgtcgaaggagtggtacgaggtctacaaggcttggtgcgcgcgagagggcttaccccgcccagcaccttctcccaagttcatcaacgcgctggtgcgcaagcggcagatcacccatcccgatcgggctcgcaagcgctaccagatcgagcagagcgtgaacgggcctcacggcttcctgatgctcggcaactgcaccgtgcctgacgggaagacagaggctgcatggctgggagaccaggtcgtgtcattccgccgcatgttctccgattacaaggggcgcgcgtga

SEQ ID NO: 502532 - DNA, 555 bp, Stenotrophomonas maltophilia
atgctcggcatttcagggggctgcgtgacctgtctccgatccgacctgtactggcgggacgccctgcacaatgcagtggcccgcgcccctggtgggctgcaggatgcggcggcccacatcagcaagcgccgaggcaagtcgatatcggcggagacgctgcggaagaagctccggggcatcgatggtgagtcggtctctatggagatggccgagatcctgacggactacttgctgctgttcgtaggcacgcaagacattgccacggactgggtttgctcgctcgcaggtcagtacagcctgatggttgactacgtcccgccgccgccgaaggccgggtggtccgacgagctggcagcgatccaggcaaagctgctggagctgcacaagctgacgggggcattggctggtgcaggtatcgatgccttggccgaccagcgactgaccgttcccgaggcggatcgaatccaagacctgtcgcgtgaggtacgcaagctctgctaccgcctggagcgcaatgcatgccgtgcggctggacagcaggggatggaggactga

SEQ ID NO: 502533 - DNA, 327 bp, Stenotrophomonas maltophilia
atgacccctctgcaacgggcaatcgcgatctgtgggacccagagtgagctggcgcggcgcgtgaccggcaagcccgcgactggctacgtctatcactggcgaaagaacggtgtgaccgaggaggtggcgattgccatcgagagggcggtcgcctcggcgatggctgagaaccaggacgccgcgaagcgagccgacaccctcggaggcagagtgaccgctgacgagctgataccggatgtgcgctgggagcgtgatgcgggtggtgccattgtcggctacttcaagcgcgtcagcggaccggcgggggtggctaatgtcagcccgtga

SEQ ID NO: 502534 - DNA, 354 bp, Stenotrophomonas maltophilia
atgaaggaagcggcagcactggaagctctcgcgctggcactcgctagcaaggttcggcagcaggctcggccgcccgacggaaagtgcctgcgccagtgccttacgactggacctagcgacgccatcgccctggcatacattcggaggattcgccttctgcgcgaagccttccagctcaactggctggtcgaccagcacctaatcctgagacaacgtctcagcgacctatccccgacagagctgcgcacgctgctgtgcgagatggaagaagcgagggaagcgatcatggaaggcttcccccttgaacaaactggcctcatcaagaacatggccgaagtgctgccacgcccttag

SEQ ID NO: 502535 - DNA, 294 bp, Stenotrophomonas maltophilia
atggacgtgttcttcagcacgatgggtgcgttgggtgtttggcttgtggcgcttgccgtgtttgcattggcagtgctggggctgctcatgcccttggcggtttttggtatcaagcccctattgcgagtcctgatcgaggagcagcgcaaaacgaaccgcatgctcgcaaagcaagggcttcgggatcagggcatagagccaagggacgtggcaagtgttgccacgtccagagatgacggcgagccgcagacgctggaggaattcattcgcgagcgtggtgagcgtaggccgtga

SEQ ID NO: 502536 - DNA, 234 bp, Stenotrophomonas maltophilia
atgctgctactcacagctgacggggcgttggctcacgcgatcgccgaaggcgacaagggctacatccaggaaatatctggagtaaatctgatcgcattcgcctatctgggcgcaaaacacatggccaccggctatgaccacatcctgttcctcctgggcgtggtgttcttcctgtaccggatgaagcatgtcgcgctgtatgtgacgctgtttggaccggccagcctttcgtag

SEQ ID NO: 502537 - DNA, 1353 bp, Stenotrophomonas maltophilia
atgcgcttcatcgccggcccgctcaacaaacaactgctacaaaacctgctgggcgaggtgattgaatcctgcacgcgcgttcgcgcggccgtcgcttacgccagccgcgacaacatgaagttgttcgaggcctgcgcgcagcacctgaagcccctggagttctttggccgctacgaccacacggtggctgtcgatcccgccgtgttgaagtggtttctcgacaaggccagcccgaactacgactgcaagctcgtgcccgacatcctgcacgccaagatcatctggtgggtggatgccggtgcctacatcgggtctgccaacctgtctgaccgggcctggatatcgaacatcgaagcgggcacctttctgccccacgacgaactcgtcgaaacgggtatggagcgtgagctgcagcgcttctttgaggaagtggatgaccgtgcccggcctctgaccaaggagatctaccaggagcagctgcgcttggcggaccggcggtctgagttgtcgaagcgcgaatacggacttgagcagcagttcgacaaggaccgcttgctgccgaagaaccacggtctggtgtttgtcgacacgaagcgatcgtctgagaagcgcttccagaagttcgagcaggattggaacgacacgctgcaggtgatgcgatcgatcgcatccagggtttcggcgcccggcgccaaaccgggctggattgatgcgtcggtggcccccggcgttcaagcggatcagttcctgcacgcctattactacaagcaggtcaaggatggaaaccgtcatccttacgaggagttcttcgacaggaactcgaagaaccctgagctggcgctgcgcgacgcgctggagtggtggcatgacgccgacttcgaccactcgtttgaagaacgcaccatttacgagtggtcgccccggctgcgtgagctgctggcacgcgatcgcattctcaaattgaccgagcaggagttcgtggatgccgtttcccgggtgcacgcgatccgagaccacgccatcaagcaggaaaacgagcacttaggcttgcccgaccgaccgcaggccggcgacgacaaggtggaaaagttcggcgagtggctctggcggcagcgatctcgcgaagggcggacggtgcttgagctgttgaactacgtcgtctggggcaacggaagtgtttcagcccggctctggaacgcgatccgcagcgacgactgggccattccgcacattggcctgagcagtctcggggaaatcgtcggctgggcgcgcccagacgagtatccaccaaggaacatgcggacgagcaaggggctgcgggcgctcggttacaacgtgaggatcggtgtttga

SEQ ID NO: 502538 - DNA, 363 bp, Stenotrophomonas maltophilia
atgaaatcgtccctgtacccggcgcaggacttgcgacgccgcgcactggcctgggcggtcaagttgaaggtgaatccccgcgtggttcgggtgcaggagatgcgcaggaagtggggttcctgttcatcggcgggaaccgtcaccttggccactgacttgctcgaccaggatgagcctttccaggattacgtcatcgttcatgaactgcttcatctgcgttacgcgaaccacgggaggatgttcaaggcgctgatgagtgcacatgtcccgggttggcgcacgatcgagcaacgccagataggcgatgcagatggcgcatccgttgagcggctctcccgcaaaccgagcggtcatgcccgatga

SEQ ID NO: 502539 - DNA, 2943 bp, Stenotrophomonas maltophilia
gtgagcacactcaagatcagcgaagccggcacagtgcagttcccgatggtcaagcacgcagtggagatcggctggacgtccattacgcccgaggacgcacgcaccaagcgtggtggcgaggcgggtaccttcttccgcgacgtgctggaagccaagctcaccgcgttcaacccctggatgtccgccgacgccgtgcgctcggtggtggaaaccctggacgcgctgccggccaccatcgagggcaaccgcgagttgctgggctggctgcgcggcgaacgtcagtggtacgacgagaccgagaagcgccatcggcctgtcgccgtgatcgactttgagcacgtggcggagaacgttttccacgtgacctgggagtggaagatcaagccgcccgcgcgtaaaggcaaccgggccgacgtgatgttcgtcgtcaacggtgtgccggtggtgatcgtcgagcacaagaacccgaaggacggcgacgccatcgaacgcgcgatcaagcaactgcgccgctacgagctggaaacgccggagctgctggccacgacccagctgttcaacgtgacgcacctgctcgactactggtacggcgtgacctggaacgccaaccggcgcgacatggcacgctggaagcaggcgccggaggaaacctatcgctttgcggtgcaagccttcttcgagccgaccgagttcctgcgcaccctgcagcactggatcttgttctatgtgcaggacggcgagacgcgcaagtcggtactgcgccagcaccagcggcgcgccatcgacgcgatcctcgaccgctgcgccgacccggccaagacgcgcggcctggtgtggcacacccaaggctcgggcaagaccttcacgctgctgacggcggcgcgtcagatcctggaggacaaggcgcgctacgccaacgcgacggtaatcctcgtggtggatcgcaccgaactggaaggtcagttgaaaggctgggtggagcgcctgctgggcgagatgcagcagcaggacatcgcggtcgaacgggccaacaacaaggccaagctgcagtccctgctggatgccgacttccggggcctgatcatctcgatgatccacaagttcgaggcaatccgcaaagacagctgcctgcgcgacaacgtctacgtgttcatcgacgaggcgcatcggtcggtggccaaggatctcggtacctacctgatggcggctgtgcccaaggcgacgatcatcggcttcacaggcacgcccatcgcgcgcacggcgcagggcgaaggcacattcaagatcttcggcacgcaggatgagctgggctacctggacaagtactccatcgccgagagtatcgccgacgagaccacgctgcccatcaagcacgtgatggcaccgagcgagatgacggtgcccgccgaacggctggacaaggagttcttcgcgctggccgagagcgaaggcgtgaccgatgtcgaggagctgaacaaggtactcgaccgcgcggtggggctgcgcaccttcctgacggcggacgaccgcatcgagaaggtgtcggccttcatcgccgagcacttcaaggagaacgtgctgcccctgggctacaaggccttcgtggtggcggtgaaccgcgaggcctgtgccaagtacaagaaggcgctggacaagcatctgccacccgagtggagcgcgccggtctacaccgagaactccgccgatgtggtggatcggccgctggtggccgagttgcagctctcagacgacgccgaagagcaggtgcgcttgctgttcaagaagcccaccgagaacccgaagatcctgatcgtcactgacaagctactcacgggctacgacgcgccgccgctttactgcttgtacctcgacaagccgatgcgcgaccatgtcctgctgcagtcgattgcacgggtgaaccggccttatgtagacgcgaacggtgtgcagaagcgcgtcggcttggtggtcgactttgtcggtgtgctgcgcgagctaaaaaaggcgctgcagttcgattccagcgacgtcagcggcgtgattgaggacctcgacgtgctgctgcaggacttcctgcaacgcatcgagcaggccaagaaggactacctggagtcagacgccggcggcacccccgacgagcggctggagcgcctggtgttcggacgcttcctgacgcccgaggcgcgtaagaccttcttcgagagctacaaggaggtcgaggcgctgtgggagatcctctcgcccgacccggcgctgcgtgaccacatcgcgacctacaagcagctcagtcagctatatgcggccgtgcgcaatgcttacgccgaaaaagtcgggttcgtggctgacctggcctacaagacgcggcgtctgatcgaggaaagcgccgagcaacatggtcttggacgattgaccaagaccgtgacctttgatgtggcgaccctgaagtcattgcgcagtgaggatgggaccgatgagggcaaagtgttcaaccttgtgcgcggtctgcagcacgagattgacgaggaccctgccgcagcaccggtgctgcaaccgctgaaagatcgtgccgagcgcatcctgaaggatctggaagagcgcaagacgaccggtctggcggcgatggaccaactggcggcgttggctgccgagaaggaagcggccatgaaggcggcgcgcgacagcggcctgtctgctcgtgcctttgcagtcgcctgggtactgcgtgaggatgcggccgtcaaggcagcgggcatcgaccccatgacactggccaaggatgccgaagagttgctcgggcgtttcccgaatgcctcggtcaacgccgacgagcagcgacggctccgtgcgtcgctctacaagcccctcctcgcgctggcgcaggacgagcgggcacgggtcgtcgatctcgttgtgcgtttgctgctcacggagggtggcgaatga

SEQ ID NO: 502540 - DNA, 1290 bp, Stenotrophomonas maltophilia
atgacaaatccgcactggaattggcgccccttgggcgaactgtttgacatcggtgccggaaagacgatgtccgcagcggcgcgagcgggggccgacaaaataccgtttctgcgcacatcgaatgtcctatgggacgagatcgatctcacccaggtcgacgaaatgtcgatctctccgaacgagttggtcgacaagagcctcaaggccggtgatctgttggtctgcgaggggggcgacattggacgatcggcggtctgggatggtcgcgtaccggtaatgtcgttccaaaaccaccttcatcgcctgcgccccattcaggacgacgttgatgcgcacttctatgtgtactttctgcagagcgcgttcactcagcttggcatcttcgagggtgcaggcaacaagacgacgatcccgaatctttctcgcaatcgactggcggccttggatgtaccccatccgcccaagcccgaacagcggtcagttgcacaggcgctcgccaaggtgcgcgagagcatcgccgttcatgacaaagctgccgcaaccgcgcaagaactcaaacgcgccgccatgcgcgagctattcatgcgcggtctgcggggagagccccagaaggacatcgagatcgggccggtgccggaaagttgggagcttgcgactattggcgcgcatcactcagtcgtttccggcggcacgccgtcgcgtggcaatcctgcgttctggtcgggcggcacgattccctgggccaagaccacggaagtggactactgcgtcatcaccgaaaccgaagaacacatcacaccacttggccttgaaagctcggccgccaagatgctacccgctggcacgttgctgatggcgatgtatggacaaggcatcactcgaggtaaggtcgcgatcctgggtattgaggcgacctgcaatcaagcctgcgcagccatcacgccgaaagacgatgccgtgttgccgcgctatctgtaccacttcctcacttggcgctatgaggccattcgctctctcgcccacggtggacagcagcagaacctcaatctcgaaatcgtccgtgacttgcctgtggtgtatccacagtcgaaggacgagcaagacgaaatcgtcaccatcctcgacgctatcgaccgcaagattgacctgcaccggacgaagcgcgaagtgctggaggaactctttgagtccctgcttcacaagctgatgaccggcgaagtcgccgtgtcggatctggatctgtcggcgctgtccccggcctcgacgcaacccgaggaggccacggcgtga

SEQ ID NO: 502541 - DNA, 1824 bp, Stenotrophomonas maltophilia
atgacaaaacaaaacgactttccagcgatactccgcgccacccgcgcggccctcaacctgactcaggagcagcttgccgagcgcctgggcgtctcctttgccacggtcaaccgatgggaaggtggcggtaataagccgcagcgtgccgcgcaggagaccatcctcgcgctggcgcgagaggccggggtcgagggtgctgaaagccccccgcccgctgaagcggctgctcaggtgacccggcgtcgcaccgggcgggcggcggcagcgcccaccaccaagccgatggagcagatgctgtgggacgccgcctgctccatccggggcgagaaggatgcggccaagttcaaggattacttgctgccgctgctcttcctgaagcgcctgtccgacgttttcgatgatgagatcgagcggctggccgaggagtatggcgaccgcaccaccgccctggagattgccgagtcggaccactcgctgctgcgtttctacctgcccccggaagcccgttgggcggtgatcagcgggcgtgaatcgttcgactggccgctcgacgaccgtggccgcccgaccgcaccccgggacatcggcgagcacctgaccaaggccgtgcgtgccgtggtcaagcagaacccgacgctgtccggcgtgatcgacgtggtggacttcgccgccgaacgcaatggcgagcgcgacatcaacccggccaagctgcgtggcgtggtcgaaaccttctctgacccgcgttaccgccttggcctcgccgacgtgcagcccgacttcctgggccgcgcctacgaatacctgctgcgcaagttcgccgaaggctccggtcagagtgcgggcgagttcttcacgccgactgaggtcggcttcttgatggcgcacatcctgcggcccaagcccggtgagacctgccacgactacgcctgcggctcggcggggctgctgatcaagctccagcttgtcgcccgcgaactcgaccccaccagtcgcgtgccgctcaagctttctggccaggagttgcaggccgagagttatgccgtggcacagatgaacgccatcatccacgacatggaggtggagctggcgcgcggcgacaccatgatcaacccgaaattccgcgatgccagcggcaagattcgcgggcacgacatcgtggtggccaaccccatgtggaatcagccgtttgcggccgatctgtttgccaacgatccgttcgaccgtttccgcacggcgggcggcatcaccaccggcaagggggactgggcgtggctgcagcacacgctggcatgcctggatgaccacggtcgtgccgccgtggtgctcgacaccggcgcagtgacacgtggctctggctccaagaacgaggacaaggagcgcaacatccgcaagtggtttgtcgatcaggacctgatcgatggggtgatcctgctgcccgagaacctcttctacaacaccacggcggcgggcgtgattgtggtgctgaacaagcgcaagcctgcgactcgcaagggcaagatcgtcctgctcaacgccagccgccacttcagcaaaggcaggccgaagaactacctgcccgaggaagatctgcgcccgctcgccgcaatgtacgtcaagggggagccggtcgagggtgagctcgctgtcatcaccaggcagcaagcggaagaagccgactacaacctcagccctggccgttgggtcgcgcaaggcggcaatgctgaccaccgccccatcaaggccatcgtcgcggacatgctgttgctcgacgagaaagcccacgagatcgatcaaaccctcgccaagttgcttgcaccgctatga

SEQ ID NO: 502542 - DNA, 510 bp, Stenotrophomonas maltophilia
atgagcgggaaccgatgggacacggctggcgtgccgcacaaggggtggacgtgcgttgacgtcgtcgacttgcgagccgatggcggtccggcagacgaaaccgattacgccacctgccagatgtgcggcaacgagaagatccgctacgtccacatcatggagcatccggatctggacgagcacttcgacgtcgggtgcgtctgcgccgggaagatgagcgacgactacgagggaccgaggcgccgcgaggcaaggctgcgtaaccgggcggcgcgccggacccgctggctgcagcgcaagtggcgggtctccgccaaggggaacagcttcctcaacctcgaaggctacaacctggtggtctatccgacgaagacgaagcgctggggcttcaagatcggggaccgattcggtccgaggacatacccgacagccaacgaagccaagctggcgctgttcgatgacttctgggcggcgacccaggatgatgaccgactgtggtcatctgactga

SEQ ID NO: 502543 - DNA, 213 bp, Stenotrophomonas maltophilia
atggaagtcgctcacctcaaccaaaaacaactggctgcccgctggagcatcagcgaggccaccctggaacgctggcgcagcgaggggatcgggcccaagttcctgaagctctgcggccgagtgctctaccggcaggtcgacatcgaggcctacgaggagtcgtgcctggcgacgtcgaccaagatggtcgcgacgcaggtcagtgctggctga

SEQ ID NO: 502544 - DNA, 465 bp, Stenotrophomonas maltophilia
atgaccacactctctcccacccatccgttgccgacggccgaagaagttgccatcgcccgcgagagcggccgggcgctgtccgccttcctgcagacccgtgcggaaacccagcagatcgagatcttcgacgacaagggcgcgtcccacccggttcgcgtcccggtgtcggcgctgcggctgctcgtggatgtcctgaccgaaatcggtgagggcaacgcggtcagcatcatcccgatccacgccgagctgacgacccaggacgcagcggacgtgctcaacgtctcgcggccgttcctcgtgcagttgctggagcgcggcgagatcccgttccacaagatcggcacgcaccgtcgcgtccgctaccaggacgtgatcgcgtacaaggagcggatcgacgctgagcgcagcaaggccctcgatgcactggccgagcaagcccaggcgctcaagttggggtacgaatga

SEQ ID NO: 502545 - DNA, 573 bp, Stenotrophomonas maltophilia
atgagttcgaacttcaccgtcatctacgacgcgtgcgtgctctacccggcaccgttgcgcgacctgctgatgcgcctggcactgaccgatctgtatcgggcgcgttggacggacatgatccacgacgagtggacgcgtaacgttctgaagcagcgcccagatctgaaggccgaagacctggagcggacgcggtcgctgatgaacgcccacatccgcgacagcctggtcaccggcttcgagcatctgatcccgtccgtcgagttgccggacgccgatgaccggcatgtggtggccgccgccattcacggcggcgccagcctcatcgtgaccttcaacctgaaggactttccgccggaacggctcaagccctacaacctgaccgcccagcacccggacgacttcatcttcgacctactggatctgcacgccgcccgggtttgcgaggcagccgccaaccatcgccgatcgctgaagaacccgcccaagacggttgatgagtacctggacacgctgctcaagcagggactgacacagaccgttggccagttgcgggagtggaaggtagcgatctga

SEQ ID NO: 502546 - DNA, 279 bp, Stenotrophomonas maltophilia
atgagcactgccaatctttcaaaaaccgaacgcatcgacgttcgtgcaagcacgctgatcaagcagctgttgcaggatgccgcacgtgccagccacaagaatgtcagcgagtttctgctcgatgcaggggtgacggcagccgcgcagacgctggcggatcgtcgtcagtttgtgctcgacgaggtacagtggcaggccttccaggaagcgctggatcggccggtgcaaagcaagccgcgcctgaagaagttgctgagtgaacccggggcactcggttga

SEQ ID NO: 502547 - DNA, 504 bp, Stenotrophomonas maltophilia
ttgagcagtagttatgcacccgttcgcaagctgcttgcgacggatcaggtcgatgcttttgactgcggccaggccgcgctgaaccagttcctgcagcgctacgcgctcgtcaaccagaaggccaacagcgcgcagacctacgtctgctgccagagcgaggtggtggtcggcttctacagcctcgccgtcggcagcgtcgatccggaatcggcgccgtcaagagtgatgaaggggctcgcgcgtcacccggtgcccgtgatgatcctggcccggctcgcggtagacaaggagcatcagcgccaaggcctgggccaggccttactcaaggatgcgctgctgcgcactgctcaggctgccgacatcgccggcattcgctgcctgctggtccatgccaaggacgatgcggcacggcagtggtacgaatcctgggagttcgagcccagcccgaccgatccgtaccatctgttcctgatgctcaaggatctcaagaatttgctgagctga

SEQ ID NO: 502548 - DNA, 447 bp, Stenotrophomonas maltophilia
atgaatgaggtgcgcatcgaaaagactggccagccggatgtggtcagtaccagtgacggtcggttgaccctgtccgttccgatccagatcaagcggcgtggcggccgcaaggtggtgcggctgcctgacggcaacaccctgaagcccaggccgatcaatgacaaaccgacgcccatccaaatggcgctggcgcgaggtcaccggtggttggcgatgctggaatccggtgaagcagagagcctcacggaggttgcggagcgcgagggcatggatcgggcgtacgtgagccggatggtgaacctgaccacgctggcgccggacatcgttgccgccatcctggatgaaacgctgccttcggaggtgacgctgtttgatctggcatccggcacgccgctgctctgggaggagcagcgggcgctgattggggtcagctcagcaaattcttga

SEQ ID NO: 502549 - DNA, 648 bp, Stenotrophomonas maltophilia
atgtacgcgctgctccataaccggacctacctcggcgaactgcgccacaaagatcagtggtatccggccgagcacctccccattgttgaacaggagtggtgggacaaagcgcatgcgatcctgtcgaccaacagccgtgtccgtggcaataacacccgctcgaaggtgacattcctgctcaagggcatggtcttcggcaatgatgggcgggccttgtcaccgtggcacacggtcaagaagagcaacgggcgacggtaccgctactacatcccgcagcgcgatgccaaagagcatgctggcgcctcggggctgccacgcctgccagctgccgaactggaggccgccgtgtttgatcaggtgcgatcgatcttgagctcaccggacttgttggccgacatcctgccgcgtgcggtcaagctggacccgacattggacgaagccaaggtgacggtcgccatgacgcgcatcgatgcaatctgggatcagctgtttccggccgagcagacccggattttcaaattgctgatcgagaaggtgatcgtctcgcccaccgatcttgaggtccgactgcggccgaacggcattgagcgactggtgcttgagttgcggccggagccggccaaggaagcagcggaggtgacagcatga

SEQ ID NO: 502550 - DNA, 420 bp, Stenotrophomonas maltophilia
atgtcccccgcgttgctaaccgtcgaacaggctgcccagcagctcagcctgcaccccaaaaccgtcctgcggcatatccgtagcggccaactgcgcgcgacccgcatcggcaagtcctatcgcatcaccgctgaagacctcgacatgttcaccggcaccgtgcgggagccctccgctgcgcgcccacagatgaccacggtggtggatattcccggatgcggtgcggcacgtgccgccgacctggtccgtgccctgcatgcgcgcgtcaccggccgcgaggccgacgatgagccgctgcgcatggagacgatctattcgcctgagcacgatgtgctcaagctgatcgtgatcggtggcctggcaggttccacagcactgctggtcagcctgcagcgtctgctgcaggaccgcagcgcatga

SEQ ID NO: 502551 - DNA, 867 bp, Stenotrophomonas maltophilia
atgaagcggcagcgccccggcattcccacgcagcgcgtacttgccgcctaccgccgggtgctttcggactggccggtaccacacgaatcccaccatctcaccacccgcgccggttcgacatttgtggtcagctgcggccccgaacacggccctgccctggtgctgctgcatggcaccgtcagcaatgccgccagctggatgttcgatgccgcacgttggagcgagtactaccgcgtgcatgccgtcgacatcattggcgaaccgggtctcagcgaaggcacgcaacctgcgctggacagcgatgcgcatgcgcaatggctggatgatgtcctcgacgcactcggcgtgggaagcgctgcattcgtgggcctgtccttcggcggtttcctggcaatggattacgcgttgcgaaggcctgcccgggttaacgcactggttctggtcagcccctcgggtatcgggcgccagcgtgcattcctgctcaaggcgctcccactgttgctgcttggccgatgggggcgtgagcgcctgcgccgtgcggtcatgggccccgcgccactgcgtgcacctgcacgtgcgcagccgctgctcgacctgctggcattgatccgtgccgaggtccggccacgtccgctgcgcattccccgtatcagcgacgagcgcttggctacgttgcatccaccggcagcccttgtcatgggcgcgcgtgatgccctcatcgatacccctgccgccgccgaacgcatgaaacggctcgtcccgacggcggacgtcaccctgctggcagacgcctaccactacatccccggcctgcgcgaagacatcctcgcccggctgcgtcgactgcagagcctccggcatgaatga

SEQ ID NO: 502552 - DNA, 216 bp, Stenotrophomonas maltophilia
atgccgttcgacgacgcgatctctgcattggaaggcaggctcggaacgttcatcatggaggcacggagtgagcttgccgctgccgaagcggctgggaatccccagggtattgccaatgcacttgaaaaagaacggctaatgctcagggcgcgcctacaaagccaatggataggagatgagtcgatgtactcctattttcaggagctagagcgttga

SEQ ID NO: 502553 - DNA, 252 bp, Stenotrophomonas maltophilia
gtgctgctggacaagctgcggagcgtcacggtgcatctcccgcagcgcgtcgggatcgatgggaatggcatcaccagcaagctctcgaatcgccgcaccggcaaccccgctcttacctgcgcctggctgtccagcgagtacaattgccttggggcgctcctgaggagtggtactgtccagaccactatggggaagcaccttctccgcaaacacctgcgcatgcgcctggggcgcgaggctccaatcggctga

SEQ ID NO: 502554 - DNA, 285 bp, Stenotrophomonas maltophilia
atggctgtcgtagacctgagcgccttcgcgtccgtagagtcgaatctggatgccggtctcggcctggaccttgtccagatttccgggcagggcatcgtaaacgtgcttgcgcacgtcttcggggacgtagcggccgaagccttcgtcgtccagcttgtcagtaaaccttcggtcgacaccaagctcgctttccaaccgatgtgcgacaactccccgaatctccacttcgtagccctcggcctggagattcttgatcagattaactgcggcgtcgccatttcctag

SEQ ID NO: 502555 - DNA, 399 bp, Stenotrophomonas maltophilia
atgctcctgcaccaagggtggtgcgttgggcgccagtgcagcgcgttcaacggtgcgcgtatcgatcactacttgtggcgtcaggcgttcttcggcgtgctctccgcgaacctcggccacggcagcggcggccatctgctgcacctgcggtgcagcgacgccaagtcgattggcttcctgcatggcctgttcgtgggcaccgcgctcgttggcggtcaatgcctcgatactgcgttcgtgggcgctgggtacgggcgcctccatctgttggatggcccggatctgcgggtaggtactgttcaactcgtcgcggatgttgccctcggccagcgaatcgtagatccagccgtcatgcagccactcaccatcgccctgatgctgataggtgcgtccgtctga

SEQ ID NO: 502556 - DNA, 1389 bp, Stenotrophomonas maltophilia
atgcgcgcacgcagcaccattgggatctgcatgctgctcccgctcatactggcgttcgttttcgtgggtctggcggtgccagctacagtgcaggcagccgattgtcctaacgctgcgtcttgcgatcagggcaaagccttcagcatgtgccgagcagcaatcgaccgcacaatggagcggtatcgcaggcagaatccgccgaatgttcagccggtgatcgcggagaactgcatcgactataccgggcgcattgcctgtgccgtccaggagactgcgaacggcggatcggttcgttgctggaatgcggatggaacgaatgggaactcgttctactacggccagaggtgcgagcagaggcaaccaaattcggcgacttcgatatggtcgcagctcagggggccaggcggttctgttggctgcatggatggatgcaacgtctatcactcatggaatgttgatgggacgttcgagaacaactttggcataggtggcacgtgcgataaggagcccgactgctcgaaggtcggcggcacgttgaatcagattacctggacttgcgattcaccagagcccaaatgccccgatggcgccaagcccaattcacttggcaagtgcggccctgagccatgcccggagggcaaggtgcagcagcccgatggcacgtgcaagtcgaaggaaaacgaatgtccagccggaactgtaaagtcgccggacgggaagtgcctaccgggcgatgggcagtgcgcgagcggggaggtccgtggcgcggacggcacatgcaaacgagatagtgatggcgacggtagtcccgacccagttaccgacgaatctttcagcggtggcgacaattgcgcttcgccgcctgcctgtagcgggtctccaatcatgtgcggccaggcgcgcatccagtggcgcattgactgcaacactcgaaaaaaccgcaacatcgccggtggcgcgtgttcggttatgccagtgtgtacgggtgagaaatgtgatgcgatggagtatgccggtctgcagatgcaatggcggtccacctgcgcgctggaaaagatggcgagcagcaccggaaccggtggtggcgataaccctgatgttaaggctattcgtgatgcgctcaccggcacgggcggtaccgttacgaccgccccggatcgcccatcatcagacgtgtggtctccgagtagcggccaaccaacgcgccctaatgcttccggctatggctggggcaggggatgcccgcaaccgccagcaattgaggtcatgggtcaaaccatcgcgttcgacactacaccgctgtgccggtggctcggtctcggtagctatttcgttgtgggccttgctgcgctgttttgccttcgagtcatcgccagtagggatgcttaa

SEQ ID NO: 502557 - DNA, 234 bp, Stenotrophomonas maltophilia
atgcacaagatcttcaacgccctgaagggcaagggtgccgctctggcggctgttggtaccgctgcgctggcttcggcgccggcatttgcgtcgggcggcagtggtggcgtcgacgtgggtaacgtggtcaccgcgattcagggcgctgccgctcccatcgccgctatcggcggtgccgtgctgaccgtgctggtcggcatcaaggtctacaagtgggtgcgccgcgcgatgtaa

SEQ ID NO: 502558 - DNA, 300 bp, Stenotrophomonas maltophilia
atgaacgctccgaagatcacgatcaacagcaacgtcgaaacccgtactgtgactaccaagactggtatgcagaagcccgtgtatagccagcgcgcaacgctcgaaaccgaagccatgcgcatccagattgaggtcgaagtggatgggcttgacaggggctacccggttggcgcggtgaaggagtgggatgttgttgctgatcttgtcccgggccggtttggtgtggaactggctcgtcgcatgacgctcgttgatccgcagagcgcaaagcccggcactcccgctaagcaggccgcgtaa

SEQ ID NO: 502559 - DNA, 534 bp, Stenotrophomonas maltophilia
atgcacgaggaagcggctgataaagcgttccgctacttcgtcagctgcctcaatcgcagcatctacggtcccaagtgggcatcgcgctggcacggcggcatccagtgggcgcgaggtcaggagttccaccgcgatggccgtctccacttccacgccgttgcagctgcacctaccgatgacctcaaccgcctcgccagccgttacgagtggcacgaatggtggtatcgcgagttcggtcgtaatcgcatcgaagcgccgcgcagccaggcagacattaccggctacgtaagcaagtacgtcacgaaaggcggtgtggtcgatttctcgcggaacttcggggcatggaacccgccgcccatcgactacacgcgccgcccagagcaagacgccctgatcgcaggcgacagcaacacgcgatccgaccggccagggcgacacctggtcaccgggcggactgatgcaagcatcgcgcaacggggcaacaagcggtccaccacgtctccctgcgggggggtagggggggacttagcttga

SEQ ID NO: 502560 - DNA, 285 bp, Stenotrophomonas maltophilia
atgatcgatccgctcattgccttcgtgctgctggcggccatcgtggtcgtgtccattggcggcgctcgcatcgtttcgtggctgctagaccggcgtgaccatgccgccgtccggcgtgccaaggaagcggccatcgtcgcccaggcacgcgccgaactggccgccaccgggtggagcccggatcacgaaatgctctatcaggccgaaattgctgcgaccaaacgcggcgatctgttggccgcagcggaactggcttgcatgcgcgggcagggcgatgagccatga

SEQ ID NO: 502561 - DNA, 171 bp, Stenotrophomonas maltophilia
atggatcaccttgagtacgcaaagcactgcgagcagcacgcgcagttcgcgcgcgatctggccgtgtatttccggtcgatcaacgaaaccggcatggcaaggagctgtgatctcgatgcggagcattgggactacatggcatccgtacaccgcaagcggggtgaatcatga

SEQ ID NO: 502562 - DNA, 396 bp, Stenotrophomonas maltophilia
atggacaccgccaacgatctgctcgacaaagtaagggccgcttgcaacctgccgtccgacaacgctttggcgcagaagatcgggctcacgcgagcgatggtcagttcctggcgacatggccgccatccgatcccggatgagcgaattgcgcagatgtgcgccttggcaaagctcgacggaccgacgtggattgcgatgcttcacgccgaacgtgcgcagactgcaaccgagcgtgccttgtggcgactcatgctggacaggctgagcgcggcggctgcggtcgtcgcgctggtagcgctgtcgatgccgggtctcgcaaacgcaaaaaccgcccaaattcaagcggttagcgctgccgacaacggcggtatgcatattatgttcgctgcttcgtag

SEQ ID NO: 502563 - DNA, 339 bp, Stenotrophomonas maltophilia
gtgcgtgatcggaacctgaccggcccttgggccggtttttcgtttaaggctggccgactggtcacacccgaaggccgcgagctggaaccgcaggatctggcctggctgtcgctcacggctgcacaggcacaggaatggcgtcggatgatggagagcggccgcgcgatcggcaagccccgaaaagccttgtcgttcaacgccgccagcgtggtgaacctctccgatgctctggcacagcgccggaaaaagcggtcatcggtggcgatggctggtcccgacgccgagccaccagcggcaatcctgccgccaccggggccgaaacgccgccagcgcgtgtga

SEQ ID NO: 502564 - DNA, 1185 bp, Stenotrophomonas maltophilia
atgatcggtgataccgcagcaatttcgttacttacggggcttcccggcgcgggcaagtcgctgcgcatggctgaggcgatcagtaagctagtcgagaagggcgagcatgttttcgcctgcaacatcgacgggctaaagatacctggcgttaccctgtgggaagacgcgaggaagtggcgcgacttgccagctggctcgatcttgtttgttgatgaggctcaggcattcttccccgagcgccgtggcggtgacgctcctgagtatgtgcgaatgaacaagattcgccatgacggcatccgccttgtgctggcaacgcagcagcccaactacctggacacgtacctccgtggcttggtgggctatcacgagcatctgcttaggcgctcgggcaggcaggagagcttcctgtttcgcgaaaatcaggtcatggacgtggtgcggcagaagctcgccacgatcaagcgcaactacgattacgagatgtacaagttcaagccgcgttatttcgcgtgctacgactccgcgcaaacccatcagatcaagtatcagatgcccgcgttggtcaagcgggcgctgatgatccttccggtggctgcgctactcgccattggcgcttggtacaccgtcttccgtgacagcagtctcgcgcaggccgcgccggtcgaggtggaggcgccgtcctcgacggcgccgacttcgaccggcgcggcaggcgcggaacgtggcaaggttccggtggcgagcgccgaggcgtacattcagagcatcacgccgatggttgcggatgtgccatggtccgcaccggcattcgttaatcgcccggtggtttccgatccgcacgtttactgcatgagcacggagaacagttgtcgctgcgtaactgagcagatgacgcgtgtggtcctgcgtgatgacgtgtgccgcgatgtagcgcgctggggtgagccatacaacccgttcaagcagccaacgaccgcgcgccaagaacggcaagtccaggacacttcgagcgaacagcaaagttcggcaacaccggctggcggcggtcgggtggagcagagtggggtagcggtgcagggtgctgttctgaatcgacagcagcggtctatgggcagtttccctgagtcgcctcaatttcagacaaccagctacatgaccacgccgacgatcccatcgaagctctaa

SEQ ID NO: 502565 - DNA, 318 bp, Stenotrophomonas maltophilia
atgtttgagtgggcacggtcgttcgctgacaacttcttcgagaacgctgcggacacagttcataagctggtcaagctgaaggcggctatctggcttgggcggctactttcagctgtcggcctcgggttcgccgcacagcatttcatctatagcccgctgatcgagtatgcgcagaacgcatggtcatccattccggcaggcatcgcgaattgggttcatgcgttgggcattgatgccgctgtttccatcatcctcagtgcctatggaattcgaggcgctgaacgcatcttcattcagcgaaggaacgatagccaatga

SEQ ID NO: 502566 - DNA, 1173 bp, Stenotrophomonas maltophilia
atgcggaatggtaaggcgttggctgatgcggcgctggcgtactcgcctccgcccacttgcgtcaccggctgcaaagttcaaggcgaagcattcacgtccgcaactggcggcgtgaagctctatggcatgcgtaaccggtcgtacaacggcgatacctgtgatgctcagaacatcaacgccaacgatatcaatcagcccgatgagaagcagaagaccgaggacgagacgaagccgaaggggccagagtgcactgcgcttggcaatgggcaaacaggctgccagaaaccggatggcgactattgcgcgacgtcatcaaccggcaaaacgttctgttggaagcccaacgagaagggcaagaagaccgacgcccaggacggtcagactcgcgacgaaaagggcaagccagttatgccgcccgacacgccaccagcccccgacaaggattggcagcgcaaggaagggcatcagcaagaggcgtgcattaacaacacatgcgtcacctacaacgtgaccaacttcggcggcactagcaaggggggcgctaagaacggcagcggggataacaacccggatggcagtggcaataccagtggaaacggaacccccggcaacggcactggcggaaccggtgggggcggcaaggatgaagagggcgattcggccagtgagagtggcaactgtcagcagcccccgacatgtgtgggcgacacgctcaaatgcttgcatctgaaattcacatggaagatcgaatgcaacaccaagggaaacaagatcactggcggtgatggttgctcagacggcgatgttccagtgtgtgcaggggatagttgcaaggccgagcagtacgcgcaggtgttgcagcagtggaagcagcgttgcgctgtgcaagcgatgggtgagggcatggcgagccgggccggcaacatcagcaatcccgatgacgcgggtgtggtggatgggatctggatcaaagaaggaaacggcaacgggcctaaattgcgccaggacttggtgaacgttggaggcggcggctcactgctacctgatgtcacgctcgaaggccagaagtgggaagttccaacacagttttgggacatcatcgctggcatcaaggttctgatcattgcgatggcaacggtcctggcgatgtacatcgtagggaggaacatctga

SEQ ID NO: 502567 - DNA, 240 bp, Stenotrophomonas maltophilia
atgcagaacaccaccatcaagcgcctgctgaacaccgtgagcagcaaggcaaagtcggccgcaatcgtgaccggtagcacgctggccgtctccccggcgttcgcgttcgccgcgggcgacttcgacggcaccgaggtcatttccaagatcgtcacctacaccgcagtgggtgtatcgatggttgcggcgttcatcctcggccgttggacgctgaaggcactgggcgtgatcggcaagtaa

SEQ ID NO: 502568 - DNA, 1059 bp, Stenotrophomonas maltophilia
atgaccaacgattcccctcgcctgtccttcctggaccggtaccttacgctgtggattttcctggcaatggccttgggcgttggcctgggctcgatgttcgaagaagtgcccaacgcgctccatagactgtcggtcggctcgaccaacatcccgatcgcgattggcttgatcttgatgatgtatccaccgttggccaaggtgaagtacgaagagctacctaaggtcttcgccgacaaacgtgtactgatgctctcgctgctgcagaactggatcatcggtccgttcctcatgttcgggttggcggcgctgttcttgcgtggccacccggaatacatgacgggcctgatcctgatcggcctagcacgttgcatcgcgatggtgctggtgtggaaccagctcgcccggggtgatgggcaatatgtggcagggctggtggccttcaactcaatcttccagatcgcgttgttcggcgtgtatgcgtggttcttcctgtcgtggttgccccccgtctttggccttcagggtagcgtgattgacgtcagcttctggaccatcgccgaggcggtactgatctacttgggtattcccttccttgctgggttcctcaccagccgctggctgaaagcgcgccggggggcgcgttggtatgaagagatgttcttgcctgcgatcagtccgatcaccctggcagcgctgctcttcacgatcgtcgccatgttcagcttaaaggggggcgacgtactgcggattccgggggatgtactgcgaatcgccgttccactgacgctttacttcatcattcagttcgtcttgagcttcttcctaggcaaactcattgccaaggactacccgcgcacgaccgcgatcgcattcactgcagcgggcaataactttgagctggccatcgccgtcgccatcgccgcctttggcctcgcttcgccggtcgccttcgctgcggttatcggcccgctagtggaggtgccggtgctgatcctactggtccatgtcgccctacgatggggcaagcgttactttcctgtccacgcaaggggccattga

SEQ ID NO: 502569 - DNA, 741 bp, Stenotrophomonas maltophilia
gtgcaacagcttcccaacatagtccccagcgccctggaaattccctccatcgaaacgctgagggagccgaatttcctaccgcaccggccacgcatcctgatcctgtacggttccctgcggccgcagtcgttcagccgaaagctggctatggaggcccagcggttgctggaacattttggggccgaggcgcgcctattcgacccacacgagctccccctgctcgattcggcgccggcatcccacctcaaggtgcaggagctgcgtcaggcttccttgtggtccgaaggtcacgtctggatcagtccagagcgccatggcaccttgactgctgtgttcaagaaccaaattgattggctgccgctggaagaggggagcgtacgcccgacccaaggccgcaccctggcagtgatgcaggtctgtggcggctcccagtccttcaatgtggtcaacgctttgcgcgttctcggccgctggatgcggatggtcacaattccgaaccagtcctcagtggccaaggcctggcaagagttcgatgacgaaggacgtatgaagccttcggcctactacgatcgcgtcgtggatgtgatggaagaactggtcaagttcacccttctggtgcgtggccgcagtgactacctggttgatcgctacagcgaacggaagggggctatcgaagcggtcgccctggccgccgcgaccggcgtcgtcgaggctgcattgaatgaaaaggaaagcgcatga

SEQ ID NO: 502570 - DNA, 420 bp, Stenotrophomonas maltophilia
atgaacgctgtcatctatcacaaccccaagtgcgggacctcgcgcaacactttggcgctgatccgccatgccggcattgagcctgaagtcattgagtatctggtcgacccacccagtcgagcgcgccttgtcgagctgattgccgccgccggattgaatgttcgcggtgcaatccgccagaaaggcacgccgtatctggagctggggttagacaatcccgggctgaacgacgacgctctgctggatgccatgctggacaatcctgttctcatcaatcgacccttcgtccagacctcgatgggaacgcgcctgtgccggccctctgaggtggtcctggacatcctgccagcagtacgcgggccgtttacgaaggaagatggcgaagtggtgatcgatcaggacggcaagcgcgttctctga

SEQ ID NO: 502571 - DNA, 1893 bp, Stenotrophomonas maltophilia
atgcaagcatccgggaagcttggagatctgatcgtgggtctgaccaagctactgtttgatgccaaccacttggccgatgtgggaccactctaccctgcccttgcagccgcaagactgcagcctagaaccactagacggtccaaatttctgaactctcacgaggagattcggcacaacctggtggatcgtaagcgctctgagcgcctgcccgagcgtcgcgcgttttgggagctggttcggatcgtcatgaccgaggagccccaaacctttgtggacgagcttcgctttgcggcaattcgcatcatgatcttgacgggcttccgaattggagaggctacgctcttgcctgctgattggcggacagaccgacactactacgactcacgacagcggcctgcaggagaactggggggctactcccaatcgctcatgattcggcactttgccgaaaagcagcaggcgaagagcgccggtagcaacgtactaatcgacaggacccactatgttccacagatgtttgaggaggctgtgagcgagaccctgatccgggctgcggcaatcacaagtccgctacggactacgctgaagaagcagactgaaacagggagaattatgccggactttgcactcaatgagctgctcccggttacagagatttacactcgtctcactggtagcgctttttggctagacatggacgagcaggagaagcgggcctggatacagaagtgtcggaaaaattattcagccgattgcttcgatgaactgcagaggatgcaggagcagagaatgcttggctctaatggcgaaatgagtgcggctgcccgcatgtattttcgtcgtatgactgagttcagtggaaaggatggtggtgcagtgacacttagaaacgctgatggaatggccatctcgctccagggcaagcagggcatgggcgatgtctttgtgagaatcgaagagcttgagaactattttcgtgccgcggcctcttcaaagctaccggacacggagcccttcaatttaaccgaccgaagttttgattcttgggagttcctattcctgcacccgaaacgatccttggcggaggagcgaaacaacggaatctgcgatgtcacccgatatgtctccgttggtcggcccgacacaagcttggttagcctctctcttggcgagcagaagtcccgcgatacgctgttcaaacgctatggtgattctgatagcgacaaggacctggtgctcacctctcacatgctgcgtcacctgcagaacactgagctcttccgtctcggcgtagctgacacaatcatctccaagcgtttcagtcgtcgcagcgtggctcaaagctatgagtacgatcatcgcagcttggccgaggagctggatcaaatcgaagtgcctgatgatgtcgaaatttcactcggagagaaggccaccactgtcgcgaagatgatccaatctgggaaagccagtggtccaatcgtggatgcgttcaagcggatccagagcattgaaggcgatgccgccgctttccagttcctgaaggtcgaggccgacggctttcatgcgacaccctacggacattgcttgaacagcttcactgtcgatccatgtccaaagcatcttgagtgcttttccggctgtcggcatctttcggcaactaaccttccagagaaccgccgacacctgcaaacgctagaactcaagctggtcgcggccgtcgagatcgctgaggctaggccatcaaagagtatcggtcgtgcaaaccagattcagcatgccaaggatcggcttgacggcgttcgtgctctcttggcgagcaagcagggcgagaaaccatttcccgacggacccgacctctcaattccgcgaagcgcgggggtaatggaggaatag

SEQ ID NO: 502572 - DNA, 1509 bp, Stenotrophomonas maltophilia
atgcaacgtgatcatcatcttcatcttgacctttcaacgttgcgcgaagcggctgcgcagctcccgcctctgccgcccgtgatcaggtactacgacgatttcgatgacaagcttcgctcaattgaagaccctgcaacagccagatgcttctcagttcatgcgaatgggagtgttatcaacatcgacttcacctcggcccacggcgcatttggaacactactaaaacacgtgtttctgcgcattgttggagaggggttcgcgccgaggaccgctgcgcagtacacccttggtggcaagcacttggggcatgaagatatcactgggctgctgagcgccgggcccacaggtatttcatccgtttggaccatctttctcgcgaaagcgctgcctacggacgcctacgcgtgcgcaaaatcgatcctcaagttgctttgccagcatcgcatcaatggctggtccaattcctatcatgaggtcctatctgccctgcccctcccgttcaatgacaaatacgccgccgttcgatccggtgacgccttcatttcagtgagcgatgaggctgcgatagttagatttttggatgaagcggcgatcaaatcccagaagtcgttgctcgttctcgaagatgtgcaagacgcagcgatgctcctttgcgcgtatcagtttgcaatgcgaccgattcaaattgcaatgctgacctttcgagatcttaagattcgtcgagaaggtgacgaattgcttgcttctgtccacattacattccgcatggcaaagcagcggagctccagtggctccaagccactgctcaggcgagttaaacgcgagtggacctcactcttcgtcgagattgatcggcactctcaggccagcggcgaggatgcagaagccagggtgttcggtgccgcatccgccaatgaagcaagtcgccgcattagctcgattcttcgcggtctcctcgagcaggacgcgaccgctgtcaacctgcgacacacagctgctcaacgcctcgttgacgccggcgcaagccaggaggagctggccgagttccttgggcattcggatatgaccaccgcgctcgtctactacgaaacttcagccaaccaggctgagcgggtgaacaaggcactgggaatctccgacatctatcagcgcgtggcccgcattgcccacgaccggtttatcgatgccgaggaactggcccgacttaaggagtcccagcagataggcggagccccccatggagtgccgatcgcaggaatcggtggatgcagttctggccaggccgtttgtccttacaacccaatcctgtcttgctatggctgcaggaagttcatgccgattcacgaggttcagatccactcgaaagttctagcggactttcggggtgttgcgcggttctttcatgactcatctcgtggtgacacgggctctcccgcctacctacagctcgagaggaccatcgccgcggttcaggcagtgctgatcgagcttgagggttcgccgtcttga

SEQ ID NO: 502573 - DNA, 1221 bp, Stenotrophomonas maltophilia
ttgctcaatgtgcttggtggccctcaggttccagcctcactacgcggcgctctgcttgttgacgatgtacacaggctgccgcggtactgggctagcgtttgggcgttgatgtccagccatgacctcgccgcatctagccaggtaaagaagcttcgctacatcgagagcttgtactcgcatgcggaccgccagttcggcacccactcgctggatgacgcccttggtagcttggatgacgttttgcttgccgagattcttgagtcttggttcatatcaatccgtaaccagtcttcggttggtccggccgacgaatcacgttggcgcgccggcttagcatttgtcgaatcggtggtcacttggttgtccaagtcgacgttgccaactggtcgactccagcagattgaagctcgcctccatcggctcgcccacctgtatgggcagctccacgtacgcaggagccgccagccaagccaaattcggtcactgccagcgagcgcgatcaaggcgctctacgaaatgctagaccctgcgtcggccatcaatccgttttcacggcagcgcacgcgatggctcgtctttgtctccttcttgttgatgctccatcaagggcttcgccgcggcgagctcctgttgcttgctgcagacgtgatcaaggagggatttgatgaaaggcggcagaagtcacgcttctggatgaatgtacaagcgaacccgtactccggcagcggcgacgaccccaggtactccaagcccagcatcaagtcggcgagctctgtccgtcaattgccggtcagcgatacggttgcaggactagtacaggcctatgctgaaaactaccgaggtaggcccggtcacgctttccttctgaatacacagcaggatagtccgctgtctacagagtctttgacgaagatgtttcttgcaatttcttccagcctgccaccttccgttctccgagagctgaaggagcggagcgggagagaatctatcactccccacgaccttcgccatacttgtgccgtagtgcggctgaatcagttgcttcaccatggagactcaatggatgaagcgctgcagaagctccgggccttctttggctggtcgcgagaatcacagatgccagtgcgatatgcgcgagcagtatttgaagaccgtctgtcgtcggtgtggaacaacgagtttgacagtcgagttgaagttctaagagctattccttcctga

SEQ ID NO: 502574 - DNA, 378 bp, Stenotrophomonas maltophilia
atgtcgactatcgatgcactgctggacgccgccaaggctgctactggggcaagcaatgattcggagctcgcggcacggctgggcgtgcggccaagctcggtcagcaactaccgcaagggagtgtcgctaccgaatgccgtcgtatgcgcgacattggcaggcctgacgggagaacccctcgtcaaggtcatcggaatcgtgggcgaggcgcgggcgatcagccgggaagagaaggcggtttggcgcaagctcgcaggcatggcaatggcactgtgcctggctgtaggtttcgccctgccccacaaggctcaggcggcggtcgcgggcttcgataatgcccacgttgtatgcattatgcgaaaatctggtacatcttag

SEQ ID NO: 502575 - DNA, 177 bp, Stenotrophomonas maltophilia
atgagcgttcatcagtgggccattgaacttgccgagtccgacatgggcttgtttgcttgcgccgcgctgcttgtcgtcgtcttcggcgccgcgattgtctccatcgtgattgagcaggcatggctggcgcttcgtcgcctgtggaagctgcgaaaggatcgctccaatggccggtga

SEQ ID NO: 502576 - DNA, 1827 bp, Stenotrophomonas maltophilia
atgaacgccgtagaaatcgaacaagccatcacagaccttgcggagcagccctttgaccccgcagagttcccctacgccttccttgaagcctttggcaacaagtcgacgaccatcaagcgcctgcgcgcgggggcgtcgaacaagtccgacctcggcggtgttctccagatcagcaacatccacattctgacctgcgacgctgggcgggtgacgcagacgctggccgctctcaaggccagcccggcgacggccaaggccaaggcgaagttcatcctcgccacggacggggcggacttcgaggccgaagacctcaacagtggcgagaccgtcgcctgtgccttcaaggactttccggaccatttcggctttttcctgccgctggcgggcatcagcactgtccgccagatcagtgagaacgccttcgacatccgggccaccagccggttgaaccgcttgtatgtcgaactgttgaaagacaaccccgaatggggtgcggcagagcgtcgccacgacatgaacaagttcatggcgcggctgatcttctgcttcttcgccgaggatactgacatctttgtcggcaagggacgcttcaccgaaaccgtcgcacagatgagcgccaaggactcgtccaacacgcacgacgtcattgctacgctgttccgcaccatgaacaccaagcgcgaggaccgggccgctgccaagattccccgatgggctgatgacttcccctacgtcaacgggcagttgttctcaggcggcgacgacgtgccgcgattcagcaagatcgcccggtcctacctgctgcacgtcggcgggctggactggaccaagatcaacccggacatcttcggatcgatgatccaggccgtcgccgaggacgaggagcgtggcgagctggggatgcactacaccagtgttcccaacatcctaaaggtgctgaacccgctgtttctcgacgacctgcgcgcaaagctggaagagacgggcgacaacgcccgcatgctgctcaacctgcgcaagcgcatcgcgaggatcagggtgttcgaccccgcctgcggctcgggcaacttcttggtcatcgcctacaaggaaatgcgcgccatcgaggccgagatcaaccggcggcgcggcgagccagatcgcgcatcagaaatcccgctcaccaactttcgcgggatcgaattgcgcgacttcccggcggaaatcgcccgccttgcgctggtaattgcagaataccagtgcgatgtgctgtaccggggacagaagctggccctggcggagtttcttcccctgcgtaacgagaactggattacttgcggtaatgcgctgcggctcgattggttgagcgtctgtccatcaaccgggacgggcgtcaagttgcaagcagacgacctctttgaaacgcccttcgaccaagctgagatcgacttccaaaacgaaggtggggaaacgtacatctgcgggaatccgccgtatcgcggcagcaagtggcaaagcgatgaacagaaggccgacatggcgaacgcttgggctaaacatccgaggctggcaaaaaccactgacttcgtgacgggatggttcgccaggttctttgattacgccgatcaggtgccggatgcggttgcagcgttcgtggcaaccaacagcgtatgccaagggcagcaggcaatcgacgtctggccggtggcgttcgaccgcggatacgaaatccgctttgcacatacctcgttcaaatgggcgaatcttgccagtaataatgcgggcgttaccgtggtggtctggaccggccagagttccgtagacactcagtcgccgctctgcgcgtag

SEQ ID NO: 502577 - DNA, 204 bp, Stenotrophomonas maltophilia
atgaaccaacccgaagatgaaattctcacgctggatgaggttgcggtctatctcaaggcagggaagaagaccgtgtaccggctggcccagcaggggaggataccgggattcaagctgggcggcacctggcggtttcgtcgcacggagttggaccgctggattgccgagcagacagccaggaagacaccggaccgagatgagtga

SEQ ID NO: 502578 - DNA, 417 bp, Stenotrophomonas maltophilia
atgacacggatcattctgggcagtatcgaccttcctgccgatctccaatggtccgatgagttcacggcctggcgtgtcggccagcaagcgcgtacgagcctgaccggcgccctgatcgttcaggagtcagcgcgacaggccggccgccccattacgctgaaaacgtcccgcgacggtaccgcctacgtcggggtggtgtctctgcccactgtccgggccctgcaggagagcgagagtgaagcgcgcctggcgcccatcaatctcatcatgcccgcgcacaatggcggggaccgacagtttcaggtgcgctggcgccgaaccgatggcccggcgatcgaagttgagccgactcgcttcgcagtaccggcattggatgccgatctcttctctatcactcttcgccttatgacggtgtaa

SEQ ID NO: 502579 - DNA, 3747 bp, Stenotrophomonas maltophilia
atggctgatcggctggaagaagcaattcgagttgtcatcgagacgcagggccgcgagggtgtggaagagctgcgcgcggcgttcggcgacctcggcgatgtgtcggtcgagacggccggtaaggcctcgaagctgctcgattccctgacggggctgaacgcagcagcagcgaaggcggatgccttcgacggcatgctgaccgaccttgccgagttggagcggcagtttggcgataaccagaaagccgcgctggccctcagtcttggcatcggcgagatggagaagccctcgcgcgaggtacttgctacccagcgcgaattgcggaaggagggcgaacgcctgcagaaggcgctccatgagcagtgggatgcggtcgccaaggctgatagcgagctgtcctcgctgggggtcaataccgccaacctggccgaacaccagcagcgtctgcggatcgaggccacccgtagtgcggcagcactcactgagcaggccagggctgccgcagccgaagccgaagccgggcggaggcgtaagcagcagatcgaggaaggcgagggtgccttccgcaagcaggccaccaccagcaaggcggcggcgaaggccttggctgagtaccgcgagcgcgccgctgacgccgccgccggcagcggtgacttggcgtcggccaccgagagcactgtcagctggtttggcaggctcaaggcggtagccgctggcgcgatcgcgtttgtcggtctgaaccgagtggtcgatggcatcaaggcgatcgtgaaggaaggcagcgacgccgagcaggagctggcgcagctggaagcggcattgcacgccacgggacgcaccagtgagttcaccgcgcagagcctggccgccatgcgccagcagctgcagagtgggctgtttgacgatgggcagatcagcgccgcgcaggtgcgcctgctgtcctacaccaatatcgtgggcgagcagttcccggcggcgatgcagatcaccatcgaccaggcccagcggttgggcatgtcgctggagcagtcggccgaggttgtgggcaaggcgctgcagacgccgtctaaggctatggaaagcctgagcaagcaaggcttcacgctggacgacagccaaaaggcgcttatcaagagcttggaggccacgggccaggtcgcgcaggcgcagtccattatcctggacctgcttgcagagtcgtacggcggagcggcagcagcagcgaaggtgggtaccatcgcaggcctgtggaaggcggccactgatcggttcaaggactggaagcaggaagttgccgaccagggtgtgctgacatacttcaaggaccagctgaacacgcttctcaccacgctggatcgccttgcggctgatggcagcctgtcgcgctgggccaagcagaccgcccaggccatcatcaccatggccgaggcggtgaagggcacgacccagtgggttgtggaccatgcgcgcgtgatcggcctgatggccgccgcgtacgctcaattcaagatcgtcggcgcgctgatccagctgaacgcctggcgtgcctccctgatcgcgactacgaacgcacagatcgccaacaacgcagcggttgccagcggaagccgtggcatcggtcggttcggcgcgctcttgcgtggtctgccaaagatcgtgcccattaccgtcgctgtgctggggctggaagcggccatgggaggtctggatgtcctcaaaaccgtggctcaggatatctggaagcagcacgacccggcgctgaagcgtgccggtgaagcgcagcgggcctacatcagccaggtgcgcgactccgcgctgcagctgcgtcagcaggcggtgtccttcgtcgcataccgtgacgtggtcatcaagtcggccgaagaggttgcgaagctgggcgaggccgagcggcaagcctacgagaagcggctgtccggtctggagcagtaccttaccgcgcaggaggggttcctgctgatgcagcagaaggccggtgttgcgacggcagagcagctgcagcagctgggccaggtcacacagaggttgctggacgtctccacgggcttcgcatccctgcaagcaggtgtgaagaccgccgctgatgctctatccaacggcattggtggtgctgctcagcaggttgtggcgcagcttgaagggattgatggcaacgccaagctggcggctgagtccatccgtaagatgttctccgggctcaattttgccgatacggccagccttgcctcggtaggcgaagcgctgggcttcatcgccacccaaggtgctgcggcccagcagaacgtacgtgatggccttctcgcgacgctgcagcagctgtcgggtgaagaactcgctcggttccagggtgcggcgcaggcggcattcagctcgctgccacagggggcagtgaacgctgctgcggtgctgcagaccacgctgcttggcgcgatgaccaagctgagcgtggcctcgggccagctgggggtcagcttcacccaggcaggtcgggatgccatcgctgcgttcggtgccgtcacagagaacgccattgcgaccggcacgcagattgaggccgcgttcaaagctgccttggggcatgtggcaacgctggacgaggcacgcaccttgggcagcctgctacaggctgcgggcgagcaagggcgcgtagggtttgactcggcagcgaggtcggcggccgctttgagcgcgcggattcgcgagatccaggccggcctcaatccacttgccgatgagttcaagcggcttggtatccagtcgcagcagtctctagatgcggcccgtgactctgcttgggaagccttcgagaccatccgtaagggcgcggagagcggcaaagcatctgtcgaggatgtccgccgtgcgttcagggcgtatgccgacacggcaaaggctgctgttgctgacagcgatgcatggcgacgcagccaggtgcagtcccagttggacgttcagggagctatctacgacaccggcgattcgatggagcagcttggggcaaagggtgcaactgcgatggggcgtgttgagcagggtgctcagagggccaccgacgccatgcgcgacgttaagcgtgcatcggatgaggccgcgaccggggtcgagcgggtggctgagggggcttctgcagccggcggtagcttggcgagcgcatcaactgcagctaagggcttctccctgagcatgggtgagatctctcagaagacgagggacatgcttagccagatgagtggcccgaacagccttcagcaatttgccaacatctggaactcgctgtatgcgcagcggcaggagcttgcaaagtacaccgaggagcagaagcagctgctcgaaggcatggacgagctcgcgggcaagcgcaaggagttggccgaacgcttcgacctggtgggcgcgagcgagcttgatagcgtggttcagcttgaaaaccaaatcgaggcgaagaggttggaaaaggaaagggccgcgaaggaggcagccgaagagcgccgtaaggctgctgtcgctgaggccgatgcgcaggcaaaggccgacgcttcccgcatcaaagcgggcgagacgaaggagcaggtgctggtcattgattggaaggcgcccagcaaggaaatcgttgctggcgcgactgcggctgagcagcagcaggccgaacgcatcgccaatatggttgcgccgctggttttgcgtagggttcaacagagtcgatccgtgtctgttcgagggaggctctga

SEQ ID NO: 502580 - DNA, 651 bp, Stenotrophomonas maltophilia
gtggcgtccaatcgcaacaacaacctgctcaagtactacgtcagcggtcggcgggcaaagggcttccacggcctcaccgacgtggctggcgacgtgctgaaccggtacgacctgtcagtgcagcgtgcctttgttgggctgcagcgccgggccgggccggccacggcgcaggaggtccgcgcgtcctacaacatccgggcgtctgctctgcgaggcaagtaccgcgtggagactggcgagcgtggctacagcacgggcaagcgcggcaaggatgatttcctctccatctgggcgagcacgcggcagttctcgttgatcgagttcgatggtcgttgggctggtcggagatccaagggcgctacggccagcatcggcctgggcgaatcgaagacgtatgacggcgccttcatcgcaacgatcaagggtcgcaaggccatccgggtgcgtagctgggatcgtgcccagcaaaagcgctatgggcggggccctgtccgcatcctgcgtggccccagcccgttcgagatgctctccggtgcagatggcaacagccgcgccctggcggcgcgtcgtcgcttgatcgaccgtttccacaccacctatctgactgagctgcgccgtcagtggcgcgtcaacggaagcaccaatggctga

SEQ ID NO: 502581 - DNA, 516 bp, Stenotrophomonas maltophilia
atgctgtacggcacgctggtggccactcaggtcgccgccggcaccgcgacggacgtttccgtgactgtggctagcgtggacacgccggtgaagctgccgcacaacttccttctgaccgataccgagccgactttcaagaagggcgcggtcgacttggtcaagggcacggattacaccctcgactccgcgcatggcctgctcattccgaagtccggcggccagctgcaggcgggcgataccgtcgtggcgaactacaagtacgacgcctatctggaaaccgccatcagcggcggcaccacgccgagcaaatccttccagatcctgggcgacatgcaggaccgcatcagcggtgacgagggcctgctgaccatcccgaacgtcgacctgaccgtagatggcgacgtggactggttcagcgatgagccgatccaggtgaccctgaccggcccggtgatcttccaggccggcgaggccgatctctacacgttcaagatcgcagcgcagtcggcaggttga

SEQ ID NO: 502582 - DNA, 516 bp, Stenotrophomonas maltophilia
atgctgtacggcacgcttgtggccacccaggtcgccgccggcaccgcaaccgacatttccgtgaccgtgggtagcgcggacacgcctgtgaagctgccgcacaacttccttctggccgaccccgaaccgacgttcaagaagggcgcggtcgacctggtcaagggcacggattacaccctcgactcggcgcatggcctgctgatcccgaaatccagcggccagctgcaggcgggcgataccgtcgtggcgaactacaagtacgacgcatacctggaaaccgccatcagcggcggcaccacgccgagcaagtccttccagatcctgggcgatatgcaggaccgcattagcggcgacgaggggctgctgaccatcccgaacgtcgacctgaccgtggacggcgacgtggactggttcagcgatgagccgatccaggtgaccctgaccggcccggtgatcttccaggccggcgaggccgatctctacacgttcaagatcgcagcgcagtcggcgggctga

SEQ ID NO: 502583 - DNA, 651 bp, Stenotrophomonas maltophilia
gtggcttccaatcgcaacaacaacctgctcaagtactacgtcagcggccggcgggcaaagggcttccacggcctcaccgacctggctggcggcgtgctgaaccggtacgacctgtcggttcagcgcgcctttgttgggctgcagcgccgggctgggccggccactgcacaggaggtgcgcgcctcctacaacatccgggcctcggctctgcgcggtaagtaccgagtggagacaggggagcgaggctacagcaccggcaagcgaggcaaggatgatttcctctccatctgggcaagtacgcggcagatttcgctgatcgagttcggtggtcgttgggccggccgtaagtccaaaggcgcgacagccagcattggcctgggcgaatcgaagacctacgacggtgccttcatagccacaatcaagggtcgcagggccatccgagttcgcagctgggatcgggcgcagcagaagcgccacggccgtggcccggtgcgcatcctgcgtggacccagcccgttcgagatgctctccggtgctgatggcaatagtcgggccctagcggcgcggcgtcgcctgatcgaccgtttccacaccacctatctgactgagttgcgccgtcaatggcgcgtcaacggaaacaccaatggctga

SEQ ID NO: 502584 - DNA, 3750 bp, Stenotrophomonas maltophilia
atggctgatcggctggaagaagcaatccgcgttgtcatcgaaactcggggccgcgagggtgtggatgaactgcgcgcggcgttcgatggtctgggtgacgtatcggtcgagacggctgggaaagcctcgaagcttatggactcgctgaccggcctgaacgcagcagctgcgaaggcggatgcgtacgacgggatgctggcaaaccttgccgagctggagcagcagtttgacgccaaccagaaagccgcgctggctctcagcctcggaatcggcgagatggagaagccctctcgcgaggtgctggctgcccagcgtgagctgcgcaaggagggcgagcgcctgcagaaggcgctccatgaacagtgggatgctgtcgccaaggccgatagcgagctgtcctcgctgggcgtcaataccgccaacctggccgaccaccagcagcgtctgcgggtcgaggcgacccgtagtgcagcagcactcagtgagcaggcccgagccgcagcggctgaggccgaggcggggcgtcggcgcaaactgcagatcgaggagggcgacgctgccttccgcaagcaggccagtaccagcaaggcggcggcaaaggcgttggccgattaccgggagcgcgctgatgacgccgcagccggcagcggtgacctggcatcggccaccgagagcactgttagctggtttggcaggctcaaggcggtagccgctggcgcgattgcatttgtcggtctgaaccgagtggtcgatggcatcaaggccatcgtgaaggaaggcagcgacgctgagcaggaactggctcagttggaagcggccttacacgccacgggtcgcaccagtgagttcacagcccagagcctggccgccatgcgccagcagctgcagagtgggctgttcgacgatgggcagatcagcgccgcccaggtgcgcttgctgtcctacaccaacatcgtgggcgagcagttccctgcggcgatgcagatcaccatcgaccaggcccagcggctgggcatgtcgctggagcagtctgccgaggtcgtaggcaaggctctgcagacgccgtcgaaggcaatggagagcctgagcaagcagggcttcacgctggatgacagccagaagtcgctgatcaagagcttggaggctactgggcaggtggcggaggcgcaggccgtcatcctcgacctgctggcagaatcctatggcggcgcggccgccgccgcgaaggttggcaccatcgccggtctgtggaagacggccaccgatcgcttcaaggactggaaacaggaagtcgccgaccaaggcgtgctgacctatttcaaggaacagctcaccaccctgctgaccacgctggatcgactggccgccgacggcagcctgtcccgctgggccaagcggaccgcccaggccatcatcaccaccggagaggcggtgaagggcgcgacgcagtgggttgtagaccatgctcgtgtgatcggcctgatggcagctgcgtatgcgcagttcaagctggtcggcgcgctcttgcagctgaacgcgtggcgcgtggcgctgcttgccacgacgcgggctcagttggcgaacaacgccgcagtggctgcagggagcacgggactcggccgtttcggagcacttctgcgcggtctaccgaaggcagtgccggttgcagtgacactgctaggtttggaagctgccattggtggtctggacgtactgaaaaccgtcgcgcaagacatctggaagcagcacgatccagcgctgaagaaggccggcgaggcccaacgtgcgtacgtcagccaggtgcgggattcggcgctagagcttcgacgccaggcactctcattcgtctcctatcgcgaggtcgtagttaagactgcggaggaggtgacccggatgggcgcggctgagcgcgaagtctatgccgcccgcctggccgggcttgagcagtacctgactgcgcaggaaggtttcttgttgatgcagcagaaggcgggcgtggcaaccgccgcacagctgcaagagttgggtcttgtcacgcagcagctgctcaacgtttcgaccggctatgcggcgctatcgcgtggtgtaaacctggcggccgatgctatccgtaatggcatcggtggggcagcacagctggtcgtcgaccaactgcaaggcattgaccgcaatgcgcgcctggcaaccgagtccatagcgaagatcctgcagggtctgaactatgccgatacaggaagcctggaagcggtcggcgcggctcttggattcatcgcttcgcaaggcgcggcagccgagcgaaacgttcgcgacggattgcttgagtctcttcagcgtctgtccggcgaggaactggcgcgattccaggcagcagctcaagcagcgttcgaatcgcttccgcaaggtgctgcaaactccgcagcagtgttggaaactacgctgctgtctgcgatggaaaagctgggggtctccgcctcccggcttggtgtggcgttcactggtgttggtagggatgcgatcgctgcattcggcgcagttgcggagagtgcggtgtctaccagctcccagatcgaggacgcgttcaaagcggctctcggaaaagtttctacgttggatgaggcgcgcacgctcggcgcactgcttgaagctgcgggacgacagggcaagatcggattcgacgcagctgagcgatctgcggcggcgctgaatgcacggcttcgtgacatccaggtctcgctggaccccttggcggacgagtttgcgagacttggtattcagtcgcagcagtcgcttaacgcggcgcgtgattctgccaaggcggcgttcgaagctattcagcgtggtgcatcgcaaggaaaagcaagtatcgaggacgtgcgacgggcgttcgatgcgtacgccaccgccgcccgggccgcagtcgcggacagcgacgactggaagcgaaagcaggttgactctcagcttgaggtgcagggttcggttctgcaaaccgggcagcacatgaaggatctgggtgccaccgggcagaccgcaatgcaccaggttcagtctggtgctcagtcgggcacccaggccatgagccagctgacgcagacgaccgcagcggctggtggcgagatggagggccttggcaaaagcgcggagcgcagcggccagcagctgcagaaggcaggccaggctgcacaaggcatggcattcagcatcggcgaggtgtccgacgccgcactaagcgccatgcgcaacctcagcggaccgaatccactgcagcagttcgcaaatgcgctgaacaaggtcacaagccaaaggaagcagctggccgagtacaagaaagagctggagggactggccaacgcgcaggatgaattctcttctgccgcagctagtcgattggaggggcagtacgactaccttggaaagcaggagatcgcagaggttgctgctctcgaagctcaggtggcgcggaagcgcgcggaagaggatcgagcggctgcagaggagatggctgagcgtcgccggtcgattgaggcggcggcagaagcccaggccaagctcgacgccgagcgcattggcgagcggggcaagaatgagcaggtcctggtgatcgactggaagtccccaagcaaagaggtcgtcgccggggctaccgcagccgaacagcaacaagccgaacgcatcgcgaacatggttgcgccgctggtgctccgtaaagttcagcagagccgatccgtgtctgtgcgggggaggcgctga

SEQ ID NO: 502585 - DNA, 162 bp, Stenotrophomonas maltophilia
ttgttcgccatcgatcatggcgacgccggcatggatgagtacctgctgggtcgctacgcagaccttccgccacacgaggcggcgctggcgttcggcagcgactatgacctggagcgcgacgatgcgctgtggcctcggccgggcgtggcgctgcaaagttaa

SEQ ID NO: 502586 - DNA, 1635 bp, Stenotrophomonas maltophilia
atgaacaccgagtacagcacgccgcctgcacaggccgtcaccatcaatcccatgcgactgccaaacacgctgcatctcgcgctgggtgcattcgcgctgctgtttggcctcatcctgttgctcagcgttaccaatgccgatcaggttcgcagcatgggaatcggtgccgtcggccgcatggccaccggcattacgctactgctgttcggcggcgtgcacatccgcgaggccatgcgctatttccgcttcaccgtggttcccggggagtcgggtctcattgccctgccgggtgacgaaacccaccaccggcattacctgctcaatgtcatcaacaacggcattccggtgggccagcgtcccgagggcgcgctgctgtccatgttctacggtctggtgcctcagctgatcaacgcgccgcccaccatccgctggcatgccgaggtgcagttgcagcgggcaatctacttggccgggctgctggttagcttcggcctcgcgtgggtgttcgctcagccggccgccttcgcgtggatggccggcttctacttcctggtctcggtgatggtgctgcggccattcgccacgctctcggccattcgcaagggtgcgatgggtgtggccaacagcccggtgccggcgccgcgatggccagccatcgtcacattgctgctgatctccattgccggcccgctggccatcacgctctcgccggtgcaggtccccgccccaccgttcgccgtttccaccgtcgtgctgcccgccctggccgtgcttggcagcgggctcattgccagcgccttgttcaccgtagcgctgatctcgcagaccggtagctatagcgcctcggccgcgcggcacatcgtggacgagaaaatgcagatggccgacctgagcagtggccttctgcagcgcctctccagccgcattccgcaaccccatcatcgctatgtgcacgagcacaacgtcagtaaggacagtttcgatggcgagttgctggtggaagaagagccaatcgtgcgtgccgaccagagcgcatcaaggctggtcgaggcattccgtgccgcgtggcagtcgcccagtcagcagtcgctgttggcattgggactgttcggcctgctgctgggcgtcgtcggcgtggttctcgctttcgtgtacgcacgcagcagcggcaatgcgatggtgggcctggtagccctggccttcatctcttcggcgcagttcgcgatggcctccgcccacaaactgtggaaccgggtcgatttccaatccacgctgtaccgaatccgctacctcggcacctatcaccgcggccagcgcgtgaccggcaatgcgtacgcaggaaacggtactttggccgaaggcgcggtgcgtttcgggccgacgcgggtggaggtatgcgtggcccaggtaacgtccgtggcgttcatgcacggcggcacgcgctatctgaccgcagtggacctgcaacgcgacgcaagcaatgccctgatcgacgtgatgcaggactatgcgcgcgaggcgcagaactgtgccaaccagttctacgcacaggaacaccaggtgcgcgaggcgatgaaccatggcagccgcccaccggagctgccgcgaacgcagcaccccatggctgagacctga

SEQ ID NO: 502587 - DNA, 678 bp, Stenotrophomonas maltophilia
ttgctggcggccggcgcaaacttcataaggatggaagtgatgaactaccgaggagtacagccactgcagttccttctctgcttggttgcactgcaattggtcgcatgtcagcctcataccgatcgccctgcaccggtcgcagcacaagccgctcgtgaagacctggtgccgcttgtgcggcccctgcccaccgagccggcggatgctcccttggtggtggagttcgacctggagccaccaccgggcaatgcgtcgcccactctgttcatcggcattcgtgtcaatcgaacgttggacgagcaagcggcgacggccctgagcagcgcgggcaggaatggtctgcaggccgcagtggtcatgaagcgcctgcaggcaagcggtgccgcaggcgtgccgctgaatcagatggagatgctgcccggtggcggtggcagctatgtgcccgcttctgccgatggccgggcttccggcggatgggcggcggacgcggacactctgtcactggaggctgcgggacttgcgacccgtggcgagcagtacgcgcaactggcgcttgctgcggcgcgtgatctgtcgcctggccgttatcagctcagcgtgcggctgcttgcacggctgccgacattgcagccgtatcgaccggaactgttggtggcgtactcacgcaggccaaaatag

SEQ ID NO: 502588 - DNA, 129 bp, Stenotrophomonas maltophilia
atgctgcgattgggacagcgaaggaaagccacggctgctagtgaagacaacgacggactgttcgatctgtgtgttccgaacaatgttcgcctgagctcgctgacaccagtgaataacgagaatgaatga

SEQ ID NO: 502589 - DNA, 1209 bp, Stenotrophomonas maltophilia
atgatctgctggtatacgggccagcctggacacggcaagacgctgcatgcgatcgatcatgcgatcgacttccgcaatgaggggcgcttggtgtacgtgtgcaacgtgcgcggcttcaagcacgacgaggcgcgcatgctgccgatgacgccggaacagttctgtgactggccgaatttcctgcctgacggcgcggtgtgcgtggtcgatgaggcgtatgagcacggcatgctcccgaagcggcgcccgggctcggcggtgccgcatcacgtcgaacagctggcaaagcaccgccatcgcggcctcgacttcattttcgtcagccaatcgcctgaccggcaatgcgacgacttcgcgcaagacctcatcgagcgccacgtccacgtgcgccgtcgattcggcttgccgttcgcccacctgcgaatcttcgaccgttacgaaaagaatccggagaaggggcatcccctgatccttaagcgtgtcaagctgcccaagcgccccatggggctctatgagtccacagtgatggacaccagtgagagggccatcccctggtactacccggcagctgcggcgcttctgctcgcggtgattggtggcgcatggtggtccgtgaatcgcgtgcatgcccagctatcgggggagcttgaaacggggcaaccgaaggtagaagcgccgcaagcggcggagaacggagcgggagcgacggtcgcagccgcgccgcaagcggacaagcctcctgcgatcacccgaagtagcgactacgtggcatgggtgacgccgcgaattcaaggccagccgtggaccgcacccgcgtacgacagcctgtcaattccgacgaaccagccgccccgggtgtactgcatggcatccggtgatgggctcgatgccaacggtgagcatcagatcgggcgatgcagctgcaagacggagcagggaaccacctacgtgatggatcaggagcagtgccgcatggtcgcggtcaatgggcaatacgagccgttcctcgacacgaatcaggccgaggcgcgccgcatgaatgactaccagcagtccgcgcactttcaggaggaatcccggcgaattcgcagcggggccgcaggcgtcgcgctacagcacgtcgagcgcagcatgggcagcttccctgagtcaccaccgcacgcaaccaccagctacatgaccacagcaccggggccgaacaagctatga

SEQ ID NO: 502590 - DNA, 324 bp, Stenotrophomonas maltophilia
atgaccatgatttgggactggatcacgcgcggcgtgaacctcgtttggacggttctgttcggtggcattggcaggatcgttaccaagggcctgtccgtcgccggcatcacgctggtatccatgaatcaggtgcttccacagctgaaatccttcatcagcgactatgttggcggcctgcctgattgggcgcacaacttcttgggcgcggtgggcttcgatcagttcatgacgatggtgctttcggcgctgtcggtgcgtttcatgttcaagatcatcccgatgcccacctccgccgctcaacagctgggagtgaccaaggaatga

SEQ ID NO: 502591 - DNA, 1338 bp, Stenotrophomonas maltophilia
atgtgcaaggctgctgtcagtcgtacataccagcgctttaaacagaccaaccctgcggacgttgagccttacatcaatgaaaactgcgatatgtatacaggcaggtattcctgcgcggtgtccgagagtcgcgccggtggtgctgtgcgttgttggaacgccgatggcgagaactcagccagcttctactttggcggtaagtgcacttcacggcttgatggggacgccgggatgatcaacggaaccatctattccggtggcgtctgcaaggatggctgcaagatggtgcccaacctcgaccccggaaccaactttactcttactgattctgcgaaccccaatggcatccctattcgccggggcacttggaaggcaagcggagcgacttgtgacgcagatttgcccgctcagcctgagaagaaggacgagtattgccatcaatcgggcagctataccgtctgcaagtcgaaggacaagacgtgtatcagtacggccagcgggtttcgaacttgcgcaagtgattccggtaacgcgacgggccacacggcgaccaacaacccccgcacagaaggtgtgagcatcagtgcgccgaacacgccagccaacccaccaagcaaccgcccaggtgagaactggcaacccaacggctcgggcggcaacatcaccaacaacaacggcaataccaccaacaattacaactactacaacaacaagggcgaaccgaacggaaatcaacccacgcccggtgacggttcaggcccggggcagggtggtagcaacggaaacggcgaagtgcccggtgagggtggcaacgagggcaacggcaacagcgctggcggtggtggtgattgcaagacgccgcccaccaccagtggtgatcctattctcggcatgatcgcgtcgcagacctgggcaacgcgctgcgccactgagaaagggaattccggcaccgtgaccggcgacgtgggcaactgcgatgctccgttcagcgtcacgggcgatagcctgcaggccaaccagctgcgcgcccagcgtgcacagttgtgcagcggaaagcccgggtccggcgagggcaacaatggtgatccgcatgagggtgcagaagacgttgacgggcccggcaagtggtcatggaagtttgatgagagcttgatcgacaagagcgggtttggcggcggctcctgccctcagttcggcaccgtggactttggccgattcggcgcggtctccctcgacagcgtcacatggtggtgcccgctggttgcagcgatgcgcgcggtgatgctgctgctgggcgctttcatttcgttccgcatcgtcttcggagatgggtcatga

SEQ ID NO: 502592 - DNA, 129 bp, Stenotrophomonas maltophilia
atgcccgtcctggtagcggtgatggaggtcctcgcgacggctgcgtcagtcatcgcggggattctctcggttctcgcagcggtgaaggggctgtttctgctgtggggaaacatcaaacaggccaagtag

SEQ ID NO: 502593 - DNA, 240 bp, Stenotrophomonas maltophilia
atgaagatgaacaagatcgccagcaacgtcgtttccttcgcccgttcgaccgctggcaaggctgccaccggcgcaaccgcactggtcgccaccggttcggccctcgccagcggcggtccggcagaggccatcactgccgaaatcaccaacggcaaggccagcgtcagcagcattctggtcgtgctggccggtgtgctgggcctgttcctgctgtggtcgatgatcaagcgcgccaagtaa

SEQ ID NO: 502594 - DNA, 213 bp, Stenotrophomonas maltophilia
atgccagacccggtctacatccagtcgtgtgcggtccagaacatcggggccgatggcgtctgcgctgtgccggtctggatcgaaaaccctcagccagtcctgccaccgctcacgctggctgagggtacgcaagtcgcattcgctatcgcggcctgctgggcactgggcgtcgttttcagacagttcgcccgtgtgtcccgtgagcggttctaa

SEQ ID NO: 502595 - DNA, 1257 bp, Stenotrophomonas maltophilia
atgactggcgaaaccgcggcggccgtcgaacgccgcccctccactgtcgactccagcgccgagacccgcatccagcagggtacgccggccttccgccgcaccgcgctggcactgttcctggccggcttttccaccttcggcctgctgtataccgtgcagccgctgctgcccgagttcagccgccacttcggcgtgtcggccgccggcagcgcgatgtcgctgtcgctgaccaccggcacgctggccgtggcaatgctgttggccggcctgctgtccgacgcggtcggccgccgcccgttgatgattgccgcgctgctggcctcgggcatgctgtcgctgagcacggcgctggtggatgactggaccacgctgctggtgctgcgcaccctgctcggcctggcactgagcggcgtgccggcggtggcgatgacctatctggtcgaggaaatggacagccgcgcgctgggcctagcgatgggcctgtacatcggcggcaacgccatcggtggcatgagcgggcgcctgctggccggcatcatcgccgatcactggggttggcgctggggcatcggcgtggtctcgatcatcgccgtggccagcaccgtgctgctgtggctgcagctgccgccgtcgcgtcatttccatccccgccgcgatggcctgcgccagttgccgtcgcgctggcgcctgctgttcgccgacccgggcctgccgtggctgttcgccacctcgttcgtgctgatgggcgtgttcgtcaccctctacaactacctgggctaccacctgctggcgccgccgtaccacctcagccagaccgtggtcggcttgatcttcagcgtgtacctggtgggcaccttcagttcgccgtggatgggccagcaggccacgcggtacgggcgcggccgcatcctgtcgatctcgttcgcgctgatcggcgccggcatcgcgctgctggcgatgccgtggctgagcacgatggcgctgggcatcgcgctggtgaccttcggcttcttcggcggccactcggtggccagcagctgggttggcagccgcgccggtacgatgcgcgccgaagcctcggcgctgtacctgttcgcctactacctgggctccagcgtgctgggcggggtgggtggcctggcctacgcggcctgggactggctgggcgtgtgcgcgttcgctgccgtgctgaccctgatcgggggcggcatcgtctgggcgctgcagcagcgcgccccgcagccggtcaccgcgtga

SEQ ID NO: 502596 - DNA, 693 bp, Stenotrophomonas maltophilia
atggaatggcatgtgcgcccgcgtgagcaagcccccaagacttgctgtacatttctgcaactaaggggcgttggtcaggatggtcaatccgtccagcccggccaatctacacagttcgagggagcgaccatgggagcggtaagtttgctcggtgaggcacagatttctggcgcgggcatcaagaagcatttcaaatcgacggacccgatacaagcggtattcgagctcgtatggaacggctttgatgccggtgctaaagaagttctggtggacttcaagaagaatcaacttggtgctgttgagtcggtcactgtccaagatgatggtggcggcatcgacttcgagcaccccgaagagaacttcggccttttcaatgactctgccaaaaaattagacgttggccagcatggcgcgcatggtcgcggccgtctagcgtttcatcgactagctcgacgcgcggtatggcatacgagacgcggggatggtgctgcaacgatcactgttgatgcgcaagacatcaagcacttcgcagtggccgcccaagaagaatcggatctttcctcaccaggaaccttggtcgtgctagaaggcgttcacaaggatctacctgaaggcgaaacgctcaaccgcttgtttggcaacgcctttggatggtatctcgcattgcaccctggaccggccagagttccgtag

SEQ ID NO: 502597 - DNA, 642 bp, Stenotrophomonas maltophilia
atgctaacgctaattagacacgcagaaagtttggcaaatgccggcctggcaacggacgatccggcgtcgattcccctcacatccgcgggggaggcgcaatccagacagctggcggaatccgcgttcctgtcgccaccgatagctgttttgagctccccctacctgcggtcacttcagacagcatcaccaactgcagaacggttttgtctccctgtccagcagctacccttacaggagttcacctatctatgccctgtcaggtgtgccggaacaacccctgctgagcgaaagcaatgggttgatgagtactggcggcgcggagacccggcctacgtggatgggcccggtgccgaatcgttctccatgctgatcgagcgagcgcatagcgcgcttagcttgtttgattcaggagctgacgaaccccatgttgttgccttcagtcatgggcaattccttcagatgatctactggctggacggatacagtgggacgcccgcatcaagagccgggatgcaagcctatcgcgctctggatatgcgtagaccaatctgtcactgcgaggggcttcggatcactcggcccagcgcccggtcggcacgggtcattgaacgatggcctgcgcatgaaaccgaggctacgtag

SEQ ID NO: 502598 - DNA, 1038 bp, Stenotrophomonas maltophilia
gtgacgctggtaccgatcgtctaccgcagtacagatccgggcgcgcccgttcttaatgggcaggcgggatctctgcttgccttgctcaacgcaatcctggtgacaggttacggggacggtgcgtcgtcaaagcccggtgcgggttggactcggccctacgctagttcatccgtccaggtattccgcaacagcgccacatcaggatctggcacctatttgcgagttcgcgatgacgcctcggctgcaacgttgaacacggggtgtgtggcacaggcgctgggatacagttcgatgtccgacatcgacaccggtgcggatcagacgcccagcgcggcgctacaggcgcgtggctctttcattgcgaaggcgccaacggcaactgcggccgctcgcagttggatggcaattgcgacggagattggcttctaccttttcacagcgtggagcaatttcaacaacggactcggagcgtactactacggcgacattgatactgtcgtctcgggtgacgtctttccattcgtgatgtttggttccaatgatatgacgtctttttccggtgcgtggaacaccgacgcatgctcgctgttctttgcgtcgccactaggagccgcggttgacggcgtagccaggcgcgatcagtcgtatgtgcccggtggcttcgtaatgcgcagctatagcggtgggcagaatgcgcctggtcgcgttaccaccactggaatcgatcctcctgctggcgccacttcgaacaaccgctcatacgggtccggatcgtacccggtgggtccagaccgtgcgcatggggggtacaactacatgcgcgctgctgtacgggaagcgccgttcaccttgcgcggtcacttgcctggtgtcttggtgccgctacacgcgcgaccgcacgcggaggggagtgtggtgcctttcattgacggtatcggcctgggtcaatggctggcagtcaattacaacgtagtagagccagacgttgccgatcgcaatggacaggtgctcttccgtttggatgcaccctggcgatga

SEQ ID NO: 502599 - DNA, 699 bp, Stenotrophomonas maltophilia
gtggatagtgcctggtacagcgctgaccttgatgcagggagcttgaccttcagcgatccgctcaacctttctgcatacacgctgccaatcgtagtgagcgagcgtgtcgaggaccgtcgtttggtggtccagccccagatcacaggagaaattgagatcaacaccggcctgacccacgactacccagctggcgaatccctcatcagtacggcgctgcggcttggcgaggcgaatggatcactggacctgcaggcgcgtgtcgagagcctgttcgatcaggccgcgtggactggagcctggagcaacattccgattggcagcccggctcctggcacctacaacgatacggacttccctctcgatgtgaccaacagcgacgccataacggagcgatgggccgttcggttcaccagttcgacgaactttgaagtcatgggggagacggtgggcgtgatcgccactgggagtaccacaacggaccttgcgcccattaatcctcgcaccaacaaggcgtacttcagcatgcgggctgctggctggggtggtggttggtcggtgaacaatgtcgtgcgtttcaataccgtgggcggcctggcaccggtgtggatggcgcggaccacgctacctggtacgccggcaggcgcaaccgactccacccggcttatggtggtcggcaacgtcgctggaggtgcccagtga

SEQ ID NO: 502600 - DNA, 1035 bp, Stenotrophomonas maltophilia
gtgaccctggtaccggtcgtctaccgcagcagcgatccgggcgcgcctgttctcaacgggcaagctgggtcgttgcttgcactcctcaatgcgatcctggtgacgggctacggggatggagcatcttcaaagccaggggcaggatggactcgcccctacgccagttcatctgtgcaggtgttccgaaatagcgctacgacaggctctggcacctatttgcgggtgcgcgacgatgcatcggctgcaacgctgaacactggttgtgtggctcagctgcttgcctacagctcgatgtctgacattgataacggtgcggaccaaacgccgagcgccgtgctccaggcgcgcggctcgttcattgcgaaggccccgacgacagctcccgatgcgcgtagctggatggccatagcaacagagattggcttctatctgtttaccgcatggagcaacttcggcaatggccttggaccttactacttcggggaccttgacacggcagtctcaggagatgttttccccttcgcgatgttcggttcgaacgatttgacgttctacaccccggcatggaacgccgacgtctgctcgctgtttttcgcatctacattgggaacggcggtggacggtgttaccgggcgtgatcgatcgtatgtaccgggcggcttcgtgatgcgcagctacagcggcgggcagaatgcccccggtcgcattgcgactaccgggatcgacccgcctgccggtgtctccaacaatcgttcttacggatctggtgcgtaccctgtcggtccagatcgttcccacggtggttacaactacactcgcgccgctgtacgtgaagccgctttcgccctgcgtggacacttgcctggtgttctcgtgccgctgcatgctcggccgcacgcggagggcagcgtagtgcccttcatcgaaggaatcgggctcggccagtggttggtggtgaactacaacgttgtagagcccgatgtcgccgatcgcaacggccaagtgctgttccgcctggatgcgccctggcgatga

SEQ ID NO: 502601 - DNA, 1053 bp, Stenotrophomonas maltophilia
atgctcgccgccatcgaatcggcgcggaacagcgtcgccttggcctcgtacatcttcgacagccaaggcatcggggcgcagttcgtcgatgcgctgcgccgggctcatgagcgcggcgtgcaagtgcgggtgctgatcgacgacgtgtatgcccgctggacgccccgcagcgcctaccgcgccttgcaacgcgccggcgttccggcggcgacgttcaacccgacgttgattcccgcgcgcctgcatgccgcgcatctgcgcaatcaccgcaagctgctggtgatcgatggcgaggcaggtttcaccggtggcatgaatatctgcagcccgtattggcggcccgatgcgccgggccaggcctgtcacgatttgcactttcgtctgcgcgggccggtggttgcgcatctgatgcagtgcttcaccgatgattggtgcgatgccacgggcgagcagctcggcgagggtttctggcgcgaatcgcccgcaatggctgatgagcaagggacctcttgggcgcgcggcatcgaggccggtcccgacgaggccctggacaggatgcgctggaccttcatgggcgctttgagcgcggcgaagcattcggtgcgcatctggacaccttacttcgtccccgatcagccgatgatcgcggcgctgagtacggccgcgttgcgcggcgtgcgtatcgacgtgctgacgcccgcaaacggcgaccatcccacggtgcaatgggccgcgcgcgcccactactggcaggtgctggagcacggtgtacgcatcttcgaacggcctggcccgttcgaccacagcaagctgatgctgatagacggccagtggtgctgcctgggttcggccaattgggatgcgcgcagcctgcgcctcaacttcgagttcaatgtggaggtgtacgacaccgcgctgtctacgcggctggaatccctttttgatgccgctcgtgatgcgtcgggcgagatatcggcgaaggcgttgcgcgcccgcccgctggccatccgcttgcgcgacggggtggcccgtctgttcacccccattctctag

SEQ ID NO: 502602 - DNA, 639 bp, Stenotrophomonas maltophilia
atggattcgacctcagctaatcatccccggaagggggagttctttctccttgaggccggtgcaatcagtggccctgcatgcggggtcgtcttcgagaatctggatcgactgctttctcctccccgcatgatcctgctaccagaggaggggggcattccaccactccgcgaggttccgcgattggctttcaatcccagcgtaggcgcaccgccacgggacctggagccgggattcagcggatactggctggtctcgaagcgactgcacgacgtgatgatttccgttgatcctcacgccttcgcctttgcggaagttgactatcggctggaagatggtagccaaggcgaccgccgctacttgtgcactgtgatccgggtaattgatgcgttggacgaaggtgcttccaagctttttattgatacctccgaggaattcatcaacgggaagttctacgacctgggtggtggtgcaagtgtgacgtttgatcgtggcgcgctcggccaggcgcacgtcttcaagacaccttatacagcctctgttttctgcgatcacgtgttcaaagacgcagtggaaagcgctggcgtggctactgacgatgataccgacggcatgtggttcattgacgctgcagatatctag

SEQ ID NO: 502603 - DNA, 243 bp, Stenotrophomonas maltophilia
atgggtgagctcggactgggcggcggtgccgttgccttcttccagcagctgcgaggtgcggcgggcggtgatgaccgcgtcggcgccggaggcgagcaggccgccggagcggatcagttggctggtggaggcctcgccgaggaggatgctggtagttgcaaatcctcgctgaccttgcgggacgcgcaatgggtctgccgcttccttacccagagcattctcaactaccaggactccctctga

SEQ ID NO: 502604 - DNA, 1002 bp, Stenotrophomonas maltophilia
atgtctacggacggactgacaatcggaacatattttgcccctgctccatacattcgacagttggcgaacgaaagcgcatggggcgcccacaacattgtggtagcaatgccggcgccgcttctggagcgcacatttgcctacgtgcccaccgcaagcacaacgccaaaggctctaattacttttgctgcgcagcttaccgctcgcctgaaccgtactcaccgcgctcagattggcagtagtctttccctacaaccctcccaagacgaccccccttcgctcggagccagacccctcgtactaaacaatgcggctagtgacccaatgatattcttggagaaacttggtcgcgagtccggcatcccccgtctgcgcatcagatccgatcaagcctgggtcggaggtcattccccccttcagtcatcgcttgcgctacccgatccgtcctacatccctgcacagctggcagattttatggcggtgctgtatgcacagcaggcaaacggcagtgccgaggttgctgaggctctatcttatcaactcctgacaattcatccattggccaatggaaatggcaggatcacaaggactctgctggtccagctggccatgcgaacaggcctgccctatccgctctacttcgcgtggcgactgatgtttgaccggatgcgcacgatcgagaactggagcgcactcgctgctactggcataccacggccagatgatgcgcattacctaaaatggatgcaagcctcagagatcctgctgaaaacgtgcgaaaacgccttgcaaaatgggctcgacgaaagagtcctcaatgcgctactgctatatggaactgcaactgaaaaaactatacatcacgcaaacccacgcctagcgaagaatctagcaggaaaaatcgcggcaaacctatcaagcgaaaacaactgcgcgatcgcaacgatcgcgaccaagggagtaaacgaagccatcgataagctaaagcacgcagtgatcagttaa

SEQ ID NO: 502605 - DNA, 1053 bp, Stenotrophomonas maltophilia
atgctcgccgccatcgaatcggcgcggtacagcgtcgccttgacctcgtacatcttcgacagccaaggcatcggggcgcagttcgtcgatgcgctgcgccgggctcatgagcgcggcgtgcaagtgcgggcgctgatcgacgacgtgtatgcccgctggaggccccgcagcgcctaccgcgccttgcagcgcgccggcgttccggtggcgacgttcaacccgacattgattcccgcgcgcctgcatgccgcgcatctgcgcaatcaccgcaagctgctggtgatcgatggcgggacgggtttcaccggcggcatgaacatcttcggtccgtactggcggcccgatgcgccgggccaggcctgtcacgatttgcactttcgtctgcgcgggccggtggtagagcatctgatgcggagcttcaccgatgattggtgcgataccacgggcgagcggctcagcaagggtttctggggcgaaccgcccgtaacggctgatgagccgggaaccagttgggcgcgcggcatcgaggccggtcccgacgaggccctggaccggatgcgctggaccttcatgggcgctttgagcgcggcgaagcattcggtgcgcatctggacaccttacttcgtccccgatcagccgatgatcgcggcgctgagtacggccgcgttgcgcggcgtgcgtatcgacgtgctgacgcccgcaaacggcgaccatcccacggtgcaatgggccgcgcgcgcccactactggcaggtgctggagcacggtgtacgcatcttcgaacggcctggcccgttcgaccacagcaagctgatgctgatagacggccagtggtgctgcctgggttcggccaattgggatgcgcgcagcctgcgcctcaacttcgagttcaatgtggaggtgtacgacaccgcgctgtctacgcggctggaatccctttttgatgccgcccgtgatgcatcgaacgagatatcggccatggcgttgcgcgcccgctcgctggccatccgtttgcgtgatggcgcggcccgtctgttcaccccggttctttag

SEQ ID NO: 502606 - DNA, 657 bp, Stenotrophomonas maltophilia
atgacccaaggcaacggcctcgcaaagccccaaggcaagcgaccaggacgcctggtcacgccgaggtgcttccagctgtcggaccagctatcgcttgccgttctgggtgctccctgccacggcagcccccgcttcgcgtggacaggcaagcctcgcatccacgcgatacgagcagtgatcccggtaacgtcgagcctgcctcgccaaccagccagtaggaatcgcgacgcctgcggcaacccaccccacggcaacccaacgctctcgccaacgagagcagcattccgccaacgaaaccccgcctcgccagcaatgcggggggcgacgccccacgcaactgacgtggaaccatccacccgcttagtgccctcccatggcactaagcgcgaacaacgcagcgaactcgacgtgccccagcccacgctagtggaaaacctcgcccgaccagcctctcgccaggcgatagagacgccgagcgacaggccccgcactacgggctcaacaggattctcatcccagtcgacaccgagattcagtggcgtgaacccacccgcaccaccgaagcgcggaccaaggttcagccgaacaaatgccccgccccctggcatcatgcctccatctttgccggcactaccccgtcttggatggctgagttga

SEQ ID NO: 502607 - DNA, 840 bp, Stenotrophomonas maltophilia
atgccagtaatcacattgtacccgcatggcgggaagggcggcgttgcgcccatgaagaacagccatgcccgcgccctgcgcggtgaagtccacggttggtcctacggcgccacacggcgcaacaccgagttcctcatgtccatcagggaggaccgtctcacgggagccggtgtggccctgacgctcactcttcgtgattgccctccgacctccgacgactggcacaagctacgccgtgcgtgggagaagcggatggtgcgggccggtatggttcggctgcattgggtgaccgagtggcagcgacgtggagtaccgcacctgcactgcgcgatctggtttgacgccatgtatgacatcgccggcgcaatcgatgcctgggtggcagtggcaggcgtctacggcgccggccaccggggtcagcacggacgcatcattgatggccctgtgggctggttccagtacctcagcaaacacgctgcacgcggcgtttctcactaccagcgttcgatcgacaacgtgccagaggcgtggcagaaaaagaccgggcggggatgggggaaaggcggagattggccagtgcaggaaaaggtcaggatcaaccttcaggatcagcacggcgacggtgggtggttcgcttatcgacggctcatgcggtcgtggcggttggccaacgccaggtcatcaggggatgcgtaccgcatccggtcagcgcggaagatgctcacctgcaatgacccagtccgcgcccgcctgatcggcttcatggagtggtcgccctacgaggtgcagatggcccttctggccaacgtggctgcccgcgggtactcgatcacctgctga

SEQ ID NO: 502608 - DNA, 840 bp, Stenotrophomonas maltophilia
atgccagtaatcacattgtacccgcatggcgggaagggcggcgttgcgcccatgaagaacagccatgcccgcgccctgcgcggtgaagtccacggttggtcctacggcgccacacggcgcaacaccgagttcctcatgtccatcagggaggaccgtctcacgggagccggtgtggccctgacgctcactcttcgtgattgccctccgacctccgacgactggcacaagctacgccgtgcgtgggagaagcggatggtgcgggccggtatggttcggctgcattgggtgaccgagtggcagcgacgtggagtaccgcacctgcactgcgcgatctggtttgacgccatgtatgacatcgccggcgcaatcgatgcctgggtggcagtggcaggcgtctacggcgccggccaccggggtcagcacggacgcatcattgatggccctgtgggctggttccagtacctcagcaaacacgctgcacgcggcgtttctcactaccagcgttcgatcgacaacgtgccagaggcgtggcagaaaaagaccgggcgggtatggggtaaaggcggagattggccagtgcaggaaaaggtcaggatcaaccttcaggatcagcacggcgacggtgggtggttcgcttatcgacggctcatgcggtcgtggcggttggccaacgccaggtcatcaggggatgcgtaccgcatccggtcagcgcggaagatgctcacctgcaatgacccagtccgcgcccgcctgatcggcttcatggagtggtcgccctacgaggtgcagatggcccttctggccaacgtggctgcccgcgggtactcgatcacctgctga

SEQ ID NO: 502609 - DNA, 840 bp, Stenotrophomonas maltophilia
atgccagtaatcacattgtacccgcatggcgggaagggcggcgttgcgcccatgaagaacagccatgcccgcgccctgcgcggtgaagtccacggttggtcctacggcgccacacggcgcaacaccgagttcctcatgtccatcagggaggaccgtctcacgggagccggtgtggccctgacgctcactcttcgtgattgccctccgacctccgacgactggcacaagctacgccgtgcgtgggagaagcggatggtgcgggccggtatggttcggctgcattgggtgaccgagtggcagcgacgtggagtaccgcacctgcactgcgcgatctggtttgacgccatgtatgacatcgccggcgcaatcgatgcctgggtggcagtggcaggcgtctacggcgccggccaccggggtcagcacggacgcatcattgatggccctgtgggctggttccagtacctcagcaaacacgctgcacgcggcgtttctcactaccagcgttcgatcgacaacgtgccagaggcgtggcagaaaaagaccgggcggggatggggtaaaggcggagattggccagtgcaggaaaaggtcaggatcaaccttcaggatcagcacggcgacggtgggtggttcgcttatcgacggctcatgcggtcgtggcggttggccaacgccaggtcatcaggggatgcgtaccgcatccggtcagcgcggaagatgctcacctgcaatgacccagtccgcgcccgcctgatcggcttcatggagtggtcgccctacgaggtgcagatggcccttctggccaacgtggctgcccgcgggtactcgatcacctgctga

SEQ ID NO: 502610 - DNA, 138 bp, Stenotrophomonas maltophilia
atgtgccacctgagcggccgctcgggcagcctgtcctgcatccacctgcgcagcacccagccgattggcctcctgcagtgcctgccggtacgcctcctgctcactcgccgacagcgcggcaatgcgcagctcgggtga

SEQ ID NO: 502611 - DNA, 1089 bp, Stenotrophomonas maltophilia
gtgctggccgggtcgggactcccctcgtctaacaggggagtcagtgaattcaggaacgccgagggaaccctgacggtgggcattgactggttctccgcttcgattgatctgcgcgcagcgctggacgaggtcgcgttccgtgatggcgacagcttcgaagaggtccgccagtggatcgagttctcgccggagaacgcccgcatcgcggccctgcaagtgttctgctggttcttcgctgggcttggccttgaactggatgaagtggcgggcggcggtcgcttctacacgtggcgtatcaaaatcatcgacgcggccaagaagttcgtcgggatgatcgaactcggcggcgaagagtgccgccgcgcagatggcacgtataccgcccgtatcgagctaaccggtgatggatgcaaggcggtaggcgcagcgcgctgcggccatgcgcagcggtggctggagcttcgagcgaagctcgaaagctgcgccggaaggatcacccgtgttgacgtgtgcgccgatgacctggtgggcgattacccattgcgaatggcgcagaagtggtacgccaatggcgaattcgacaaccgtggtcagcgccccaaagcgcagctggtggacgattacgacagcggcgacggcaagacgttctatgtcggcggtaagaagtccgaaaagcagctgcgcgtgtacgagaagggcagggagcagggcgacaagagttcgccgtgggtgcgctacgaggcgcagttccgcaactccaaccgcaaggaactgccgctcgacattctgcgtgatccggcttcctacctgctgggtgcctatccggttctgtcctttctgcgctgcgttgccacgcgtatcgaaatcacgaaagcagccgttgaagcgacgtggaagagcgtccgtcgccacatccgccgccagtacggcgcggccctcaatttcatcgccaagaactgccctgacgatcaggcgttgcgggcggtaatcgaatcctgcacttcgccatcgctgccgaagtgggtcacaggtgaaacagcagcgcactggcccgaaatcgcggccgtacagcaaacctcaaaggggtaa

SEQ ID NO: 502612 - DNA, 294 bp, Stenotrophomonas maltophilia
atgtcccgtatcacccgtcgtagctacaccgatgagttcaagcaccaggccgtggagctggccgagtcgctcgggccggccgcagcggcccgtcagctggagatgtcggtcaagacgctggcaaattggcttgacgcagtccgtgctggccggtcgttgatctctgaggctcgcaggccagccaccgacctggaaagcgagatcagccgccttcgggccgagaacgccaatctgaagatggagcgggaaatcctaaaaaaagcggcggcgttctttgccagagagtccaagtga

SEQ ID NO: 502613 - DNA, 603 bp, Stenotrophomonas maltophilia
atggccgaggagcgaatccagggcaagaccaaaggccgattccgacccaagtcctctggcggctcatctcagctcgcccccaacctgctggatcggcaatttgcccccggaaccggaccgacggcgtgggtcggggatatcacgtatgtccccacccgccagggatggctgcatctggccgtggtcatcagcgtccagacccggcaggtgctgggctacagcgtttccaagcgtctgactgaagagctggtggtgaaagcatttgccaatgcttgggctctgcatccacaacgacccggcctgatcttccattcagatcgtggtgggcagtactggggaaacgagtttcgccagctgctgcagtcccatggcgtggtccaaagcatgagtcggcctggcaattgctgggacaacgcggtggccgagagcttctttgcgacgctcaagacagaagaggctgccgagccttacgccagtagggaacaagccagccagtccatcgctgcttacatccacggcttctacaatccagcccggctacactcggcgctgggctaccactcgcctaacaactatgcccggcagctccgggctgccgcctga

SEQ ID NO: 502614 - DNA, 282 bp, Stenotrophomonas maltophilia
atgggcaacagcaagcagtacacggatgagttccgcgcagaggcggtgaagcaggtaatcgagcgcggctttacagtcgtggacgtagcctcccggatcgggattcccaagcacacactgtacgcttgggtgcaggcagccaagaagacggtgcgtgcaccgggcactatcgccgtgccgagcgattcggctgagattcgccggctcaaggccgagctgcggcgggtgaccgaggagcgcgacatcctaaaaaaagccgccgcgtactttgccaaggggtaa

SEQ ID NO: 502615 - DNA, 852 bp, Stenotrophomonas maltophilia
atgcgcgcgcacgaccgggagttccgtctgttagcgatgtgccgggtgttgggtgtgcaacgcagcggctactacgcttggctgcgccatggcgccagcgctcgcgagcgcgaggaccagcgcctgctgggactgatcaagcatcactggctggccagcgggaccgtgtatggctatcgcaagatcaccctggatctgcgcgaggccggcgagcactgcagccggcaccgtgtcctgcgtttgatgaaggccgagggcctgcgtgcgcaggtcgggtatggccgcaagccgcgccatcgcggtggccccgtgggcttggtaaccaatgtgctcaaccgggacttcgcgccgcccgctccgaacaaggtctgggtcacggacatcacctacatccgcacttacgagggctggctgttcctggcagcggtgatggatttgtactcgcgccagatcgtcggctgggccacggcgccgacgatgaccagtgacctggtgttgcaggcgttggtggcagcggcgtggcgccgcaagcctgggcctggggtgatggtccactccgaccagggctgccagttcacaagcagcgattggcagtcgttcctgaaggcacaccggatggtgccgagcatgagtcgtcgcgggaactgccatgacaacgccgtggccgagagcttcttcagcgtattgaagaaggagcggatcaagcgaaggatctatccgacacgggccactgccgcatcggatgtgttcgactacatcgagatgttctacaaccccatccgccgacatggttccgctggcggactgtcaccggtagagtttgagaggcgctacgcgcagagcggcgactga

SEQ ID NO: 502616 - DNA, 966 bp, Stenotrophomonas maltophilia
atgcaatttatcggcatcgacgctgccaaggcgacttttgacatcgccctgcctctatctcacggcaagtatcgaaccaaggccaaactccccaatacgccaaagggttttgatgagcttcttgcttggcgcgccaaacatgcgccgaacgcggcggtaggtatggaggctacaggcatctatcacgaggccttggctcgagcactggtggaggcgggggtggtggttcatgtggccaatcccgcccggataaaggcgtttgggcaagcggaggggatccggaccaagactgaccgcagcgacgccaagctgattgcccggttttttgaggcacaacgctcggaaaagctgcattcctacgttccaccgacgccctcggaggtgaagctgcgcgccttggtacggcgtcgagatgacctccaggaaatgctgcagatggagcacaaccgcctggacgttgccgatatctcggtccagcaagggatcgaggatgtgatccggacgctggaagagcagatcaagcaggtccaaaaggcgattgaggaccatatcgataacgatccggacctgcgccggcgtcatcaactgcttaccagcatccccggtgtaggcaacaccagcagtgcccagctgctggccatgctgggggatctgagcaaatacagcgacgtgcgccaggtggttgcccacgcgggcctgaatccggcccagcgtcaatcaggaaactacgaaggcaaatgccggatatcacgcgtcggcgacgccaatttccgcaaaaagctgtacatgccggcgctgaccgggaagacccacaaccctacactgaagtcctttgcagaccggctcagcgcgaaaggcaagcccttcaaggtcgtcatgtgtgcagtgatgcgcaagctcatccatctggtttggggcgtactgagaagtggccgaccctttgagcctgacgtcgcccttgcctag

SEQ ID NO: 502617 - DNA, 951 bp, Stenotrophomonas maltophilia
gtgggcggtgatcggctccggataccggctcgggttctccggggtgatgcacgagggcagcacgtcgatcaggaagtccgggttcgggtgcaggaagaacggcaccgagtagcgcggctggcgcgccagttcgcccggggggttgaccacgcggtggatggtcgacggatacacgtggttggtcaggcgctgcagcatgtcgccgatgttgaccacgatggtgtccgcgtccgaggtgaacggcacccactcgccatcatgcgactgcacctccaggccggcggcactggcgccgaccagcagggtgatgaaattgatgtcgccatgggcgccggcgcgcacgttcggaatgtcgtcggtggtgatcggcgggtagtggatcgggcgcaggatcgagttgccgaagttggtcttgtcggcgaagaagttctccggcaggccgatgtgcagggccagcgccgacagcacgcgcgaacccaggttgtccagcgcctggtacaggccgtaaccgcgctcacggaacccctcgacctcggtcggccacaggttcggcgccatcacgtcacggtacttggagtcgtcggcgatctcgcgaccgatgtgccagaactccttcaggtcgaaatgcttggagcccttggcggtttccacgccgaacggggtgtagccgcgggcgccaccgctgccagcgacgtggtacttgcgcttgacctcttccggcagggcgaagaaggccttgaaggcatcgtaggccgcgtcgatgtcggcctgcggaatgccgtggttgcggatgcccgcgaatccccattggcggtaggccgcgcccagctcggccacgaaggcctcgcggtcgctgtcaaaacgggtgatgtcgagggtggggatctggctcacagcggttcctggcttgtcgttgggtctggggggccagcgcattcatggcccgcctga

SEQ ID NO: 502618 - DNA, 264 bp, Stenotrophomonas maltophilia
gtgaagaagcgcttttccgaagaacagatcatcggcttcctgcgcgaggtcgaggcgggcatgccgatcaaggacctatgccgccagcatggcttcagtgaggcctcgtactacttgtggcgcagcaagttcggtggcatgagcgtgcccgacgccaagcggctcaaggacctggaggccgagaacacacgcctgaagaagttgctggccgagcaggtgttcgagaacgacgtcatcaaggatgcattgcgaaaaaagtggtga

SEQ ID NO: 502619 - DNA, 375 bp, Stenotrophomonas maltophilia
atggaacgcgaacgaccggagtacctgtccgagctgccgaagccgcgctgggaattcccgtggatgggcctgtgggcggtactactgctcggaatggccggtaccgggatctggctgcacctcaaaaccggggatgcatggaatgcgcgcttcaacgcgccgccagcgccacccgcgacgatagccccgatccccgcgccgcagacggagccagaccctgaattgcaagcgaaaattgccgcgatccggacgcaccgcgaacaggcggaacgcagagagcagcaacagcgcgacgaagtccgctgcatcggcggcgttctgttccgccgaatacctggaggctgggagaacgtgccgggcgaaacctgcccgtga

SEQ ID NO: 502620 - DNA, 234 bp, Stenotrophomonas maltophilia
atgcggactgacctctgggatcaattcggcgagctggtgaccagcagcccccgattgctggcgaccgtcactgcgcacaacagtgacggaaccagcacgctgaccacttatgacggagtgcagatgcgggcgtttggtcagctccagttgcccatcccttacaacgtgtgggttcgggctgggcgcttggtggaagctgcgcccaacctgccgctcatcgaagtgaccgtctag

SEQ ID NO: 502621 - DNA, 150 bp, Stenotrophomonas maltophilia
atgagccggcgtctccgcctcgcttgggccgccgtcgcactggtggccgcagttgtcgtgccgctgcgcatcgccgagatccaccaggcgcacacagaccgtgatgcggccaaggcacgctgggcgatcagcacctcggtgaggggctga

SEQ ID NO: 502622 - DNA, 249 bp, Stenotrophomonas maltophilia
atgtaccaggtgatcctgttgaagagtgaatccgcgttcgcgcgcgaacagtggccgcaggtcgatgacctggtcgactacgagggcgtcagctacagcctgcgtgccggcccgcgccagccactgccgaccgaccatgactggcatccggtggcggtgtatgcgcccgatgagatcaccgaggaggagttccaggactggtatgcgctgcaacagccgacggtggaagagctgcgcctgaagtactga

SEQ ID NO: 502623 - DNA, 165 bp, Stenotrophomonas maltophilia
atgagcgtctcttcgtgggtttccgaaattgcccagtacgacatgggcctactggtcgtctttggcttggtcgtgggttgtgtcgtcgtcgctgtcgtatgggtcggcctcgagctcgcgtggcacgcgctgagcgcctattggaggcttcgcaatggccggtga

SEQ ID NO: 502624 - DNA, 321 bp, Stenotrophomonas maltophilia
atgcgccagacctctcgcccgctccccgattccgtgccgctgtgtggtcccggccatcgacctcacgtcgtggtgaccgagggcgcccctaccggccatcgcctgggcgccccctgcccgccgctgctgcacatcgaatgccataggtgtggcctcgccacccgcccggtaccgatggaaaaagccgcgctggcagagctgcgctggacggaagcaagcctggcacacctgcgcatcccgatctctctgctcgcccgcaatcgcggcgaggtccttgccgagatcgctgccgactccccttccacgcccatcgctgcctga

SEQ ID NO: 502625 - DNA, 321 bp, Stenotrophomonas maltophilia
atgcgccagacctctcgcccgctccccgattccgtaccgctgtgtcggcccggccatcgacctcacatcgtggtgaccgaaggcgccccgaccggccaccgcctgggcgctccctgcccgccgctgctgcacatcgaatgccatcggtgtggcctcgccacccgcccagtaccgatggaaaaagccgcgttggcagagctgcgctggactgacgcaagcctcgcgcaccttcgcatcccgatctccctgctcgcccgccatcgcggcgaggtgttggccgagatcgccgccgactccccttccacgcctatcgctgcctga

SEQ ID NO: 502626 - DNA, 216 bp, Stenotrophomonas maltophilia
atgaagttcaacgcacgtcttgtcctgctgacccgcgcagtggagcagtcgggggtggtcaatctgcatttccggccggagggcgagaaccttcttccgcagatggtgatcccggtatcgccgctggatgcgtatgccttgaagttcggggcactgtaccggttcgaggcgatcgaggtggaagaagcgctgcccattgaagcagccgctggctga

SEQ ID NO: 502627 - DNA, 8289 bp, Stenotrophomonas maltophilia
atggaactgacaccacaaccggcggtcgacggccgcctcatcatcaccccgcacccggtgctgctggatggccagcgcaacgtgccggtcgaactgcgcccgggtgaaagcctgtacgcattcctcatgcgccatgtagacgggctcgatggccgcgcatggcaggtctgcgttgacgggctggaggtgccgcgcgagcagtggatgcacacgcgaccgcgccatggccagttgatcgaagtgcgcagcgtggtgggcaaggcggtgattccgctggtggcgatgatcgcgctgacctatttcaccttcggcatcggcacgctggtggccggttccgcgtggggcgcaggcgccgttgcggggctcagcgccacctacggcaccgcgctggcgtcggcggtctatgttgccggcagcgtgctgatcaacaaggtgctgggcccgaagcctccccgtgcaggtggcggtggcggtgtcgccgacacggcgtattccctggcagcgccgcgcaaccgtgtgcgcgcctatgaaccgctgggcctgctgttcggttccacgcgcctcgctccggacctgatcagccgcccctatacctggttcgagggcgatgagcagtacgtcggcctgaccctcagcccgggcatcaacgttggccgggtggaggccctgcagaacggtgattcggcgctgtccagctacgaaggcgtgcgcacctggtttcgcggcttcccgcagatgcccgacgaagcgattccgctgtacagcaacgcggatgtgattgaaggcgcgcagctgctcgataccggcagcgatgccaagcacgtggccagcccgtgggtggaacgcaccagctccgctgactctctgcgcctgcaggtgaacatcgagttccggctgtgggataccacgtccaagggcaaggacaaggacaaccgcgagcagatccagatccagtaccggccggtcggctccgatgcctggcagtcgttcggcaattacagcgtcgtgggacgcacgcagaaggcgcgccgcgtcagctacggccgcgacgtggagctgggccagtacgacgtgcgcgtacgcgtggccgggcagaacaccgatggcagtggcgcgcaggcgaatttcacctggaccacgctggtcagcgtgcagcgcgacgacgccagccatgccggaattcctgccatcggcctgcagatgaaggcgtccggccagctcaatggcaccccggatgagatccgctgcgtggcccacgcgcgaccgattccggtgtggaagggggaagcggccggctgggtgaccgaggaaaccagcaacccgggcgcacagatcctggcctacgcgcgtggcatccatgatgagaacggcaagcgcatcgccggcctgggcatggccgaccggcgcatcgatatcgaaagcctgaaagccttcatgctgcactgcgcggacaacgcgctgggctacgactactggctgaccgaggtgcgcagccaccaggcagtgctcgacgccatcgcgctggccggcttcggccaggtgacctgggccaagggccggctgggcgtggcctgggcggccgatgagcagcccctgtccggcgtggtcaacatggccacgatcaagaagggccagttccaggtcgattacaccctggccaacgctgccgacggcatcgagtacagctacctggaccgccgcacctggaaggcggcgacgctgcgcgtgccggcgccgggcgtggaggtgatgctcaatccggccaagatcaccggtgagggcgtcagctccgaagcccatgccgcgatgctggcgcgttggcatctggcgcagagcgtctatcaatacaagtcgatcagctacagcaccgacatcgaacacctggcctactcgcggttgtcggtgctggcgttgcagcacgaccttacccagtggggcttcggtggccgcctgatcgatgccgccgtcgacgctgcaggcgttgccacgctgcaactggacgagacggtcccggcaccttcgctgggcagtgcgttcatcggcctgcgtattccaggcgagcgtgtctaccgcgtactgcgcgtggttccgggcgctgagccaagtgacaggctggtgctggccgatccgtggccggcagatgcaccgctgccgggccacaacgacggcaatcctgcacacgacacgatctggatctacgacttcaagcagacgccgggtacccgcgtgcgcgtgaccggcatccgcccggaaggtgacctgaagggcgccgctgtggaggtggtgcaggaggggcccgagttctggcactacgtgcggaccgggcagtatgtgccgccgtcgaatgaatcctcgctgcagacccggccggtggccagcaatctgaaggtggtcgagcgccaggtcagccggggtggcagcgtgcataccgaactgcaggccagcttcgatatcagtggacccaccggcgaaacgcgggtcctgtccgatccagacggcaatgccgcgctggaggaagtggcacgcaccagcacgcgatcagcgagctgggcgattcccggagcgggtacctatccggtggtcgttcgtccgtacagccccgatggccgtgccggcgttgccgtgtccacccagtacaccacgctgggtgccgatgcgccgccggtcctggtcgatctgttcgacatcgaagagctcagcggtggcgtgcgccggtatgtgtggggcttctccggcgacaccgtgcagtcggctgatttcgccggcgtggaaatccgctataccgccggcagtatcgacaacccgctgtgggagcacatgaccccgctgggcgatgccggtggcttcttcacctccgcaatcgaagccgtattgccagaggcgggcagctggacgtttgcgtgccgcagtcgcaacaccgctggcgtgctgtccgtcggtgcccgctacctgcgacgctcgctggggcgcaataccgggcagacgctggagggaatcggcggtgtggtcgaatcggtcaagcaggacctgggcaaggaaatcaacgcccgcatcgacagcgacctggccgccgccacccgtgcagccgaggcgctgcgtagcgaatcgctgcgcctgcaggaccagatcaccgccagcgcccaacgacttgccggccaggccgaacggctggaccagcaggcgcaggcgctcaaggcgaacaccgatggcctggcgcgcgaagtgctggaccgtgctgccggcgatctgaatacccgcaccgagctgaccacggcggtgacccgcgaaaccagcgagcgccggtcggatgtggagaacctgacccgcatggtgagccagctgtcggcaggcagtggcgtgcagttcgacagcaagcgcatctggtacttcgacagcagcgtggaaggttggggcgcgaatggcggcagtccaacgctggtggagggctggctgcgcccggccaaccatgccagcgacgccttcgtgacgagcccgcgcggccaggatgtccagggcgcggcgcaccgcttcgtcaagctgcgcatccgcaaggtgggcagtcctgcctgggacgggcgcctgctgtggaatggtcccggccagtcgtgggacaacgcacgcatggtgcagttcgcggagccaagctatgacagcaacggcatcgcgacgctggacgtggacaacattccatggaacgggaccatcgtcgaccagatccgcctggatctgtccaaggcgcagaccgatgccgactacttcctgctggactgggtggcgatcggtcgcccgacgccgggtgcgtcggtggccatgctgcaggacgaagccactgcacgcgtcgcagcagacagcagcgaagcgggccggcgcgagtcgctggccgtgcagttgcgcggcagctacgagggcggtgacctggcaggggtcagccagggcctgatcgcggccgagaagaccgcacggctgagtggcgaccaggtcaacgcgcagtcgatccaggcactccaggcacggatgccggcaggcaccggcgcgctggccaccagtgccagtgtcagcagcctgcagcaggcgatggtgaccgctgacaccgcgctggggcggcgcgtggacagcctcgatgccacgatgggggacaagatcggatccagcgccttcaatgcgttgaagaccgaagtcgggcagctcgatggccgggttaccagcagcagccaggacctggtgcagctgaagagtcgcatggaagcggtgatgggcgcgggcagcaacctcgcgctcaatggcgacttcaacctgggcgctggcaccggctggacgttcttcaacaccaccgcagcatcggtggtgcgcgagggccgcggcaacagcctgtgctggaaggcggagccctatgcgggcggaagcaatacggtggtcagcgccgcggtcaatgaggggcgcgtcatcaccctgaccgccggccgtcgctatcgggtgtcgtgctggacgcggaccagcgaggacttcgacggcaccgccgacaataccaagctgcgcgtcgccgaccacaacggcaacctgatgggcggcgccacgcagtcgttcccgaaatcggtggactgggtcaagaccgagaccttcgtgacgttgccgcctaccggcacggtgcagggcatcaaggtcacgatcaatcgcaatggcacggccggcacgttgtggctggacgatctgtgggtggaggatgtgaccgatgtcgacgcgaacgctgcggcggtcagtggcctgtcgaccagggtggaacagatcgatggcaagctgagcagtgccgccgaggacgtcacccggctggcctcgggcatcggcaacatggtggcctacaacattatcgccaacgcacatatcctcgcctggcccaccggtggcccccgtgcatcgggtgtgtaccgtgccaatggcagcatcgtgccgggcatgggcgccaaccgggggctgcgggtgggcatcatcaatgcggacaacagcatcaccgatacggcggtgttcgatacccatggcaatctgcagagcgagtcggcccgcttcaacacctggtacgaccagacgctgaaggacaaccagtacttcattgcctatacgtccgatgcagtgggggcgatcagtagtgccagcaacagcgacaccagtggcctgcgcacccgcctgctggacgcgggcctgtcacaggaaaacctggcggccctgtcggggtcgcggatgctggtgatgatcgggcggcgcaggagtggtgccggcggtggcaggcagatcctgtcgcccttgccggagaccggccgtactggcatgtgggtggaaatgaccgtcaccgtgctcaatggcgtgccgaccggatcgcaggattcgtcgatgctcgatcgtacggcgcggagcaatgcggacgcattgaccgggctgcgcaccgacgtcagcaagctcggtaccgacctggtgtccgccgccgacagcctgaccagcctggccgcgcgggtcgacacctcggtgaccagcagcgacaacgtgctgcgcaacagtaactttgctggcagtgccgcctggtggacgctgacccgtaccgtgtcggccaacaccgtggagtgggtgaaggcatcgggccagagtggtgatgcgttgctgatgacgcatgggccgcaggccgggcagaaccccttcatcacggccaacgacgcgcggtggttgccggtggttgcggggcggtcgcgccggtaccgactggtgatggtggctcgcgcctttgatgaagccacggcgaccctggtctgccggttgcgcgtgcgaaccacgggtacaggcgaaagccatgccgacgtgacgctgaacctgtccgatgcgtcctggaaaacctacacggccgaatggtctgccgcgcaggatcgcaacgagatcatgccgcaggtgcatctgaccaacgccggcggcaaggtgctgttcgaccggatcgagttctacgacatcaccgatgcgcaggacatcgccggcaacgcgacggccatcgccaacctgcgcagcgacgtggtgcagctgggcgatcgtgtcaccagcagtgcgtccagtgtgctcaagctgcagtcggacgtgcagtcggtcctcaatggcagcgacagcctgttcccgctgggtgcgttcgaaacgttccaggatggccagctgctgggcagtgcggcgggcacgatctacaccgcccgcgccgatgctcgccggaccggtgagcgcggtctggatgtgaacgttgcggccaacaccagtccgaacaccaatgcggacctgtacctcgggcagtggacccccatcaccggcaatcgccgcatctatgtggagtactacgcccgcctgcatccggacagtatccagccgaccggtggttccatccgggtgggctggcagaccaccaacgaagccaatgcggagaattcgtggcccttgcaggcttacgcactggcctcgctgcgcaaggatggctggaccaaggtcagcggttacctggacaccgccgcgtctgcggcgaagtggcggatgctggtcagcattccgggaggaagtggtgcgcgcgaagtgggcgtgcgcgtgcaggtggacgacatccgcatgatcgatgtcaccgacgcctacgccgcgcagcagagcgccgctgccacggccaccgcggtgaccgcgctgaccaccaaagtcgatcagcagggcacgaaggtcgacgcgcaggcgcagcagctcaccgacctgtccagcgggctgaagggcgtgctcaacaccggaagcggcctgctgcccaatcccgacttcgccgaagggctgggggggtggacggcatcggcggcggccaatggggcggtgtggagtacggtcaacggcgacggacgcccaggtgtgctgctcaaccgctacacgaacgtgaatccgaccctgcaggccaacggtggcaaatgggtgccgatcaacggcgcgcgccgcctgcgggtgatcgtccgcgcctgcggtgctggcggcgccaacaatctgctggtgcggatgtatcgcaagaatgcggcaggccagcagtcctaccaggatctgcgtgccgtgttcgcggtggaggcgttcgagacccgatcgttcgacttcgatgccttcaacagcggcatcgatgcctggcgcttgaacctctatgttcatcccgacaacggtcaggtgcgggtggacagcgtccaggtctatgacatcaccgaccaggtggccaacgatgccaatgcctcggccatcacggggctgagcacctcggtaagccagcagggcaccaagctggacaccaccgcgcgtgacctgacccagctcaagacccaggtgggcgatgtatcggccagcggcttctcgcagctgaacagccaggtcagccagcagggtacgcaactgaccgcgctgtccgggcggatcgatggcgtgcaggcctcactgggtggcaaggcggatgcagccgtggtcaccagcatgcaggcgcaggtcaagaatctgggcgccggtggcaacctgctgatgaacaccacgttccccttctggcagcgctcggggtggggctggggcagtaatccgaacgggcggtggaccgaactgggcaaccccaccggcgatgacaactggcatccgcaggggatcttcgggctgggcgcggtgacgcccggcgtcgtcgcagcaggcgaaatggcatggtggggaaccgagtacgacatcgccatcgaaggcggcaagacctattgcgcgtccgcctggatcaatacccatcgcgtggaagccaagctggagatgacgttcttcgatgcggccggcaatcaccaggggctggtgcacagcccgggcgtgaggagcgataccggaaccccgatcacgctcgaccgcttgacgcgcacgttcctgatcaccaaggcgcccgccacggcgaccttcgctcgctttcgcgtgatcgtgatcggcaccggtggaaacacgccctatttctggatgttccgcccgatgctcagccaggtggacgcggcagcaaccgccccgcccacctggtcggccggaggcaccgagtcttccgcgcagtggtcggtcaacgtccgtgcagatggccgggtagggggcgtgcaactggcgtccagcggccaggtctcgcgtttcgatgtggtggccgacgcgttcagtgtcagtgcccccggtggcgggcgtcgtaccgagtacagcgatggcaactggcgggtctatgacgaagccggacgcctgcgcgtgcgcatgggcgtgtggtga

SEQ ID NO: 502628 - DNA, 396 bp, Stenotrophomonas maltophilia
atgcgcctggtcgacgtcgagcgatgggtgggcatcccctatgacgaagcagcgtgcgactgcgccgacctggtgatgcaggtgcagcgggcgctgttcgcccgtgaagtggcactgcccggacgccggccgcgcgggcggcgcggctcggccgagctgggcgcattgtcgcgcgcgcaggcggtacctcgcgagggccctccacaggacggcgacctggtactgatgatcgaacgcggacaacacaaccccggccacgccggggttttctttttcctggctcatgagggctgggtcttgcacagcaacgaaacgaacggctgcagcgtgctgcaccgcgttcgtgacctgcccggatttgggctgaggatcgagggatactacgcatggaactga

SEQ ID NO: 502629 - DNA, 462 bp, Stenotrophomonas maltophilia
atgagttccttccatgagcgccgccagcgcctggccgacacccagggaccgctgatgctgttggaagtgtcggcgccgtcgatgccggaggtgttgcggatcgtcaacgacaacgtcaactggaccagcaacggcaaggagttcattgccgcaccgttcggcttccagcttcccgacgatgtcagtggacaggcaccgcgcgcgcagctggtgatcgacaacatcggccgcgcactcaccgaggacctggaagggcttgcccccggagagatggtgaccgctcggttgatgctgaccgatcgcgccgatccggatgccatcgaggccgagtacgacctgccgatgacccaggtgtcggtcaacacgcgcacggtcagtgcccagtgtggtgtcgacttcctgatgcgccagcaggccgtgctgctgcatgccaatccgttcacgctgccgggaatcttctga

SEQ ID NO: 502630 - DNA, 354 bp, Stenotrophomonas maltophilia
atgagcagttggccagaatatgcagaaatccgctttgcggattacggcgaggagatcgtcgcttcggaagagcggaccgagatggagcgcggccccagcaagatgcgcgcgctcaacagccgggtgatgaagaacgtgtacgcctcggtgcagttccgcaccgcggctgacgccgaggcattcgaagcgtggtacctgcacgatgtcggtcgcgtcggctggttcacgatggagcacccgcggaccgggcagccgatcagcgcccgcttcccgcagggcatcggccgcctggtgccactgaacacccggttccgcttctccaagcgcgatcttgtactggagtacatgcgatga

SEQ ID NO: 502631 - DNA, 2316 bp, Stenotrophomonas maltophilia
atggcgtccactaaccagaatctagacgtagtactgcgggtcaacacgacgggcttccgtaccgcaatggcggaggccagccgcctggcaacgcagaatctcaagacactgcgcgcggaggccgagcggacggccgccgcgctggcgcgcgtgcatgcggcaccggagggcgcaacgggcaaggccgcgacaaaggcaaaggccaacgtcggcggcgatgtgctcggcagcggcttgaaggagcttggtagcggcctgctgacggccgccggtggcccatggggcatcgccatcgcgtcggtgcagaagctgggcgaagcgtacctggacatggtcaaggcgtccgaacgtgcgcgcagcgagtacaaggagcagatgcagtcgctgcagcagatgtcgttctcgatggaccaggccggcctgggcatgggcgcgggcacgctgcccctggagcaggcggtcgccacgctgcatgagcaggccagggcgctgcgcgagctggaggcacgcgagaaggcgctgcagggctcggtcgtccattgggaaggccgagtgagtcatggccagcgatcgggacgggaaggggcgggcctgagtgcagcctcggactacgccgagctggagaaggccagggcgaacctggaagcgttccaggcggaggtcgcgccggtccaggagaagttccggggcctgaaagaaacgatcaggggcgccctcgacgagaagctgttcaatgcgattgccgcggccatccagaacgtggacaaccagacgcttgaccagctcatcgcgtctctgggtgcgacgcaatggaacgcattgaaggcgaccgatgccttcaacggcatgctgggcgccatgcgcggagaggcgtggcgggacgaggtcgagtggatccggctgacccgtggcgagtacgcggcctggatggctgaacgcggcgcggagatcaacgcaaggggcggcccggacaagatggacccggcccagcgcgcagagttcaacagggatgccgcgcgcaagaaggccgacatcgaacgcaaggcccagttccgcgaacagcagcaggccgcccagcagtcggtcaggggcgtgcacgagcaggctgatgcgtacgccgggctgatggatcgcatcgagaagcagatcgcccaggaccgggtgcggcagaagctgaaggaagggatgacagaggcggaaaagctgcaggtcaccctccttgacgagatggagcatgccgagaagaagctcagcgagcagaagcaactgcgggtgaaggcctcgctggacgccgcggtggccctggccaaggaagcggcagccgctgaagcgtcgaagaaggcccagcgggatctgctgaagctgcagcgggaactccagcaggcggcgcatacacagcagcgcggcaacgaccaggcgctgttcggcatcggccatggcgcagcgagcgtggatcgcatgcaacgccgttccgctctggatgaggatcgggacaatcgaaagcgcgcgctggacgacgagtcgcgtggtgaggacggcaaggtcatcgagtcggagcgctacagagcccggctggccgagctcgatgcattccatgaacagtcactgcaacgcgaggcagagttccaggagaacaagaaggcataccagtccgattggaagaacggcgcaatgcgggcgttcgaggactatgccgatgccgcggccaatgccgccgagttgagccacggcgtcttcagtaatgcattgggcgggttggaagacagtctggtcaagtttgcccagaccggaaagctgtccttctccgacctcgccgactcgatcatcgccgatctggcgcgcgtggcagccaaacagatggtcagtgggctgatcagttcgatcgggcagatgttcggaccgaagatcaccggcttttccatcggcggctatacaggcccagggggcaagtacgagccggccggcatcgtccacaagggcgagggcgtgctcagccaggaagacatggctgcgctcggcggcccatcggcattcttcgccctgcgcacttcgctgcgaaccggcaatggcctgtccggtggtgatagcgggggttatgtgcaggtaccgattgcccgtgccggcgagggtgggatgaatgtggaaatcaacaactacggcgaaagccgggtcaacacccgggaagagcggcagcgcatgcccgatggcagcgaagtacggcggctggtgatcgacatcgtgggcgacagcctcaacggtggtgagcttggcgccattggacgggcccgatacggatggacggaggcagtgggatga

SEQ ID NO: 502632 - DNA, 243 bp, Stenotrophomonas maltophilia
gtgacctcccgccagctctcggagatgtatgcgttcgcacgcctggagccgttggaccagcccctgcaggggatgctcgcccagctgaccagtgtgctggcgcaggtgcacggcaatacgaccactgccgacgacttcctgctggtgcgaccgcgtgcgtcgccggagagggcggcaaaggagcgctcgcagcagctgctggaactgttcggcagcgcatcgcggcgcaacgctgcggcgtga

SEQ ID NO: 502633 - DNA, 345 bp, Stenotrophomonas maltophilia
atgctgctgggcaagcagcagatcctggacgcgcaggatcgccggcacgaggacgtcgccgtacccgaatggggcggcagcgtgcgcgtggcgatgatgtcggcgcgtgaccgtgatcgctgggagcaggagacctatggcggtgacacgcccaaggtggatgacttccgcgcgcgattcgtcggcctgtgcctggtcgatgaaatgggcgagcgcctgttctccgaccacgaggtggcccagctgggcacgaaatcggccgcggcgctggatcgcgtgttccgtgtcgcgcagacgctcaatgcgctcggcgatgcggccgtgggagagctggaaaaaaactga

SEQ ID NO: 502634 - DNA, 459 bp, Stenotrophomonas maltophilia
atgtccatcaatcaagccatttccgcccaggactccgcgctgtacgtgaaggccggtaccgccccgaccgcgccgaacaatccggccggctataccgaaatcgacggcctgaccgccttcccgttcggccgcggccaggccaacacacttgatgccaccaacctgcgttccaagcagatggagaacatcgcgggtctgtccggcggccaggccgtgcaggtgtccggccaccgctggccggtcggcagctcggcaggccaggagatcctgcgcgacgccgatccggatgccgacctgcacttcctgatggtgctgcccaccggcgatgccgctaccttcgtcgccaaggtcgccgccttcaacgtggccccgggcaccaaccaggtgctgacgttcactgcggacctgctgccgcgtgagttcgcgctggtaaccgtggccgctggcggcaccccgtga

SEQ ID NO: 502635 - DNA, 1287 bp, Stenotrophomonas maltophilia
atggcagctggctatagggtgaaaacagttcggttcctgtctggagagcgatttccgatgcttctgtgtaaggagtcgggagcccccctctggcatccaaacctatttttggtgaccgagcttcgggctgctgggctggcgaagaacacgctcgagcacgcggccagggctgtgatgattgcccatcaagtgtttcgtcatctcggtatagacattcacgatcgaatcaatgacggtcggctccttaccttgggcgaggttgagtcgctcaccaagctggctggattgcggcaggatgagctcgacgctatgagccagatggatgagtcaccccgagcggtggtgtctagggtcgtaacactggagcaggcccgaatgcgccccacggtgaaagcgctggcgcaggtgggtgccgacacgaaggcaacccgtatggcatacattcgcgactacttgtcctggctaacagccggtcggcgcctgaagctagaggtgggacatccccacaatcacagcttgctcgaggccactcaaacattcgtcagccttatcaatgccagaatgcccagccgccactccgcgcagggtagccgtcagggggtagacgcggaggtccgtgcacgcattctcgaggtcattgatcccgacagtgcggacaacccctggaagaacaggcacgtccgggttcgcaatcaacttatcttcctctggctactccttctgggcgtgcgtaacggcgagctgcttgctacctacgctagtgacgtcaacattcggaccggggaggtcacgatcgttcggcggcctggcaaccccgaagagccgcgaaaaagtgcgccgcttgtcaaaacacgaggtcgcctacttgcactgggtcctgatctggcggagttaatccagaggtacataatgggggaacgagcaaagatcaaaggtgcgcgccgccatccctatctcttcgtggcgacggggacaggccagccgctgtcaaagccggcgctcaacaagcttttcagggagttacgtagcaaggttcctggccttcctgatgacctctccccgcatgtcttgaggcacacctggaacgacgacttctccgatctcatggatagccgaggtgtgtccgcagaagacgaagaaaggatgcggacccagacgatgggctggtcacctaggtcgaagatggcttcgcactacacgaaaaggcacgtgcagcgaaaaagcaatgaggcgtcgctggagatgcaagccaagtcctttagccgcccagtgaggaggagcaggtga

SEQ ID NO: 502636 - DNA, 1545 bp, Stenotrophomonas maltophilia
gtgaaacatgcccacttatatcaggaagaagctagcgaggcgcgtgcactcactgtatgggtaggcagtcgcactaagtcgggcatcgagttcgatccaaacgcccatatctgggcataccgcgatggtgtcaataacattcatttagacttcgaccagctgccaaccgcttcgccagtgctgcgtaatggtgccaagtcggtattgacgtggtatgcagagaatcgctctcccgaccatctaaagaatatgtttcaaaggctgcagcacttcctgcgttctacgcctatgcaggtttccagcatcacagccgtagatttgctgaactaccgtgcaggcctccatcagtcgaaggaatggtacttggggtctttcgcggggttcctccgcaaatgggtccagctgggctacccaggggtcgatgaagacgtcgagctgcttctcaaacaattgcggctcaagggcaatgacaagggtgtgtctgtccttacatgggatccacatgatggtcctttcacccatgtcgaagaagaggccctgcaatcagcgctcaatcaagcatatgcgaaaggtgatgtgtctaccgcggacttcaccttggcgtggctttttatcctattgggtcagcgcagcaagcagtacgcgtccctaaaggtctgcgatgtcagggtggaaacagatgctgatgggatgctgaagtattccatccaggtgccaagcgctaagaagggtgccaagttttcgcgtgctcagttcgtagaacgcccgcttgtcgagcagtttggtgagcatctctgttcgtacgctgagggcgttcgcgcacgcttctgttcgatcttagatgatgcagggcaagcccctctctttcccgctgagcgctcgaagatgggtgcccaaggattcgaattccatcggactgccgtcatgattggccggacgatcacgaccgttctcgaaagcctgtcagtggtctcagagcgcacgggtaaggcgatgagcataagcggcgtccggttcaggagaacgatcggcacgcgagctggcgaagagggctacagtcctttggtcatcgcccgacttctcgatcacacggacacccagaatgttggcgtttactcggccagttcacctgcaatcatcgagcgcattgatcgtgccattgctatggagatggctcccttggcccaagcgttcgcgggaactcttgtggagggactgggctcgaatacttcgaggcgcgtaatggatctgcgtattgaccgaagtggttcccctatgggcgattgtggaacgcacggattctgtggattcaatgctccgatcgcctgttacacctgctccagcttcgaggcttggatggacgggccacatgaggcggtactacagcacctgcttgaccagcgtgaaaagcaactcagggattccgataagcgcattgcttccatcaatgaccgaaccatcttcgcagttgcggctgtgatagaggaatgccgccaggttaaggtgcgtcgttgctcacttggtggagctaaaacctgtggctaa

SEQ ID NO: 502637 - DNA, 2067 bp, Stenotrophomonas maltophilia
gtggctaaagtagttctttttcagccgcttagtgagctaaatgccgagcagaatgtctctgcgtttattgctctgtgccggaatgagctgaccatctttggtgccgagcttgccttcgatgagatggcgtgggagatcgcggattctgtcaggatcaaagctcggcgaggcgcggttcgcgctatttttagctcatgggactcagttaacgagcgcgtgccacgcccaatgctcgagccctttggttcgttcgccaaatcctacattcgatatcagcatgggatgcggccaacgaaatgtatagggtttcggctcgcctccctacgagcgttggcggctgcactggaagatcagggggcttgtaacgttgcttcagtcactgcggcgaccttcaacagagcggctctactggtccgggcgaagttcagcccatctgcgggctatcgagtcggctcgcaattggagatgcttgcgtcgttcattgatgacaaccgcttagcggcagtcccattgcgctggtccaatttcatacctcgcccgacggaggcgaacggcagggtaggagacgagtttgaggctgcgcggcaggctaagcttcccagcccccgctcgttggaatgcctagcgctggcgtttcgcgcagcgagtgagcctgctgatctctttgtgacgtcgacggcggggatcatgtgctcggccccggatcgggtgaatgaggttttgctgcttagagcggagcctgaggtcacaacagctcgtcccgatgcgtcgccggcatatgggctgcggttctggccctccaagggtgcagaccccatgatcaagtgggttgtgccatctatgagttcggtcgtgcgcgaggccgtgagaagactcaatgacctatcagcagaggcgcgtcgcgtggcgcgttggtacgaacgcaatcccaaatcgatgttcatcccaccacatctcgagcattttcgcggcggtgacttgtcaattgcagagctcggcgagatcctttttgtagaatcggtgtcgccggcgaccactagggcgtggtgtttgggtaatggcgtgcctgtcgagaagcgtcgcggcagaatagtagccaagttcacgaatgttgaggctgctgtcatcagtttcctgccccgagggttcccatggttggacgtcgattctggtctgcggtacagcgaagcgctttgcgtagttcggcgtaatgagttgcatcggactaagcgaacgtttcgttgcgtcatcgaggcgccagatcagaactttatctctactggtcttggtggtcgcacagagcacgggttcaagtccgtgttcgatcatctgggctacttcgattcagacggatctccaatcgtcattcgtactcaccaattcagacactatctgaataccttggctcaggccggtggcatgagtgaacttgacatcgcaaagtggtctggtcggagtgacattcgtcagaatgactcgtacaaccatgtctctgatcgcgatgtccaggctcggctggtgggcttacgtcaggaaaggcagcgggagtcggtgactgaactggcgaccgatccgctaccgcaggttcgcgttagtctaattcctcgagacaagttcaaggaaatgggtatccaagccgctcacacaaccgatttcggagtctgcgtgcacgacttcgtcatgtctccctgcgccctgcaccgtgactgtacgaattgcaacgagcaggtgtgtatcaaaggcgacgaaatcggtgatgcaaatacgcgtgccaaacttgccgaaaccactagtctgctagctgaggcagaagctgcggatgctgaaggggtatatggtgcgtcgcgttgggttgaacaccaaaggctgacgctaacgagactgtcggagcttgttgcaattctggacgatccgcaagttccaccaggtgcgctaatccgcttgactcacattcgtccggcctctcgggttcggcaggcattgggtgcccgccggttgttggatcaacatgacgaggagtcggtgcaaacggaatgggcgatcgaagtgcgaggcaccgcttcatga

SEQ ID NO: 502638 - DNA, 1188 bp, Stenotrophomonas maltophilia
atgaccacccctgtttctcccgccagcgtgctaaagcgcttcatctcaagcgagtcggccggtggactactattgatggcagcagccgcagtggccattgccattgcgaatagcccgctctcggaagcataccggcacctgctccatgccgaatggggacccacgcttacaccgaagttgggccctatgacaccacacctgtggatcaacgatggcctgatggcgatcttctttctgcttgtcggcctggaaattaagagggagctcactgacggccgactctccacatggaagcagcggcggcttcctgctctgccagcgcttttcggtatggcgatcccggccctaatctatgcatggatgaccaaggacacgcctggacagctaaacggctgggcaattcctgcagcgactgacatcgcgttcgccttgggacttctggcattactcggaaagcgcgcgccgctacctttgaagatcctccttatgtcaatagcgatcattgacgacatgggcgctgtcgccatcatcgcgatcttctacacctcttcgttgaacatgctggctctcgtcggcgcggcggcggtatgtgtggcaatgtggtgcatgtcccgcgcgggagtcgcgcgcctttggccttacgtccttgcattgcctgtgctttggtacctcacgctgctgtctggcgtgcatgccacattggcgggcgtcatcggtgcgctcctcattccctacgactcactgcacggcagagactcaagcccattggttcgcattgagcatgccatcgctcttccggtggcaattctcgtgatgccaatatttggcctggcaaatgcgggcgttgacctgcgcggccttagcgtgtctgacttcctctcttcaatcccgctgggcgtcgcggcaggcctctttattggaaaacagctcgcagtgtttggaggtgtcgtgatcgcggccaagaccggactcgctgccaaaccggaaggagtgagttgggcgcagatctacggcgtatcgctgctgtgcggcatcgggttcaccatgagcctgttcatttcaggcctggcgttccctggccatgaagaatgggttgaccaagcgaagctcggcatcatcgccgggtccgtagcgtcggctctgctggcgctggcagtactgcgcatttcagcccctcccgtgcggtaa

SEQ ID NO: 502639 - DNA, 276 bp, Stenotrophomonas maltophilia
atggagcagttgcagacttttttttctggcatggcctggtggttcaacggtggcgcagtcgtactcatcctgcttactcgattattggcacataacaagggcgcgtgggctctcgtcggcgtcatcctactagtagtgtccatggggaattcaacgctgcttgccccattcggaaacgacacctcaagccagcttgcagcgctctttggcacggtcgtacatgcagcactcggtgcaaccttcgtagccaactggctcactgacggtgctgcctag

SEQ ID NO: 502640 - DNA, 1308 bp, Stenotrophomonas maltophilia
gtggccatccccttttctgaagaacaagtacacaagcagttgttggcgatgggcatggaaacggtcgtgatggactcgaccgagctgactcaagccttggaaggccgcgccttactgcccgaagtagaagatgaggagagcagcttcgagctgtggcgcatcatcaagcagcgcgctttgcagcgcattgatcgcatccacgatagcgttcgctacggaacgttcgtcggtagcaaagtcgacctgcccacggacagtaccaagccgatgcagctcgacttgttgggttaccacgaagacggcattttcgtacttgagctcaaggtcggcagttcatccgaacggaacgcgttctctgagttactagcctatagcaactacatcgcccaaatgtttgcgctttcgggtccggcagacatcgccaacgttctggtggcgcccatgggggcgaaaattactcgccatgcgtacctgtatgacctgctcatctccaatcgggacgtcatcgcttaccgcccaatcttttcggagcagacgcttgaaagcttgaagctggagctgtatgtcccgactgatgaggatttccgctacttcgcaaataggctgctatcgcaccaggcgatgggctgcgttgttgcctcgttccacgacctagaaggctggtacgacagtgaggaggatgagggaaacctcaacgagtacacccgcgaggcgttgggcgccctgagtacgtatgccgcgcagttaatggaggccgagcagctgcacggattcgtgttcgtccgtaagccctggaaagagctccctcgttactaccgcaatagcctgattgtgtgtgccgtcaacccgttcttggtggccgatcccgagcgctcagttccgatgctcgagcagatggacgaacagcatcgcgacattttcatggacagcccgcggtacgccttcgatggtcggctgctgcgcctcgccaagcgcgctattgacgattgcctggcgcacggaaccgaatgcgagcgcgaggtgcctctatgggagggtatggttcacgagcttcaagaagtggtcttcacgcacaactttggctttcgcccgaccggcatcttccgcgaggcgtacgtagcctccctacaaacgttgtacatccgcaaggcgggcggaagcgacgaagacgctagcaccctgaaagtcgccgaggtgaataactggatgcgcgcctggatgtttatggagatgtgcgggttcgttgccggggaggcagatgctgttgttgacgacgaggaggctgacgaagaggggccggcatcgtag

SEQ ID NO: 502641 - DNA, 642 bp, Stenotrophomonas maltophilia
atgacgccctgcggccagaagcggacattcatcgctagacgaacacgcttctccagttgctccaggccggtcccggctgggagcgggcgagaccgtatgcggatggtgatagagaccatgtcacagtggtcgagatcgttgccatggtgcgcagatggacattcgcactgtgcgggccgaagttgccaactccggcccgaatggacatctttattagaagcggaccatgtagccgatcgtgaatcgcgtctgggctgcatcctcgacaatggggctgttcttcacctggctgccgaagctggtcggtgtcggcagctgcgtggatcagcgcagtgcagccttgcatcgccgcaacgatgcccgggtccagcaggtcgccttgcaccggctgggcgcccagcgcttctacaactgcctcggcgtgggggctgcgcaccagcgcacgtacgtggtggccgtctgcacacaggcggcggatcagattgcggcccacgtagccgcttcctccggtcaggaagagggtggaagaactcatcagggttacctcgggggagagaacggattcagcgcggcggcgtgtcgatcaacgcgccaatgtcctgcaacagctgctgccgctgcgaggaaggccactgcacgtag

SEQ ID NO: 502642 - DNA, 348 bp, Stenotrophomonas maltophilia
atgaggaatttagctgcggacaagggcttcgagcaggatgcggtgctgcgtgggcgacttgctgcggccgagcaaccctttcccgaagcgttccagccggtggccctggcgctgtgcgcggccatggcgcaggacccgcagctgcgcgcgcccatccagcagaaccaggcgcagatcctggccgagatccagcagcaggccacgcacccacgcagcgcgttgctggcatacctcgcgctcgaaggcatgaatctgctggagtcgctggactacgtgcagtggccttcctcgcagcggcagcagctgttgcaggacattggcgcgttgatcgacacgccgccgcgctga

SEQ ID NO: 502643 - DNA, 279 bp, Stenotrophomonas maltophilia
atggctaccaagacgatctaccaaagtgcataccttcggttgatcggtctgctccgggagcgacgggagtcgttgggcatcagtcaaactaggctagcctcccatctggggtggcctcagcagcgcgtgtcttctgttgagtctggagcgcgtcgcttggatgtgttggagttctgcctcatcgccgctgccttggggttctccccgaccgaggtctctgatgaggtcttgaagatattacagagcgtgcgcggcaaccagatcaaggacaagcagtag

SEQ ID NO: 502644 - DNA, 2310 bp, Stenotrophomonas maltophilia
atgccagacgcaggtccagttattccggtctccggaggcatcacacttcgatttctagagttgtgccagttccgccgcctcggcaaggttcaactggacgtcaacaagaagaccactattctggtcggagcgaacaacagcgggaagacctcggtactcaccgctctccgtcacttccttgcagaaagttcgtcctttggctcttttgacatcagcctctcgcaatggccaacactgcgagctcttggaaaagtatgggaagccgtaccggaagaccccttaaccgtgccaggtgacgaggagcagtggaagcagcagcttcaagctcttctctcgaccatgccaacgctggacctttggttcgatgccgaggcgggcatgtaccactacgtcgcaccgttcctttccaagttcagctggaagggtggtgcagtgggtatccggcttcgcttggaaccagcgtcaaccgttgaagagctaaagcaacttgcctggatataccgcacggcgcgcgggcccgtgaaggaaatgggtgctgactcgttggcttggcccatagaccttttggacttttggctccgtgaaccttcgaaactcggccaggttcgtgcatataaactcgatgcagagaacaacccaataaccggcttcaagacctacgccagccaggcgcttgctgaaaatgccagccgcattgatcggaagcatctgtccaaggtcatccgagtcgactttgttgccgctcagcgtgggctgggcagtgaagaggctgagtcacggtcggcatccgggccgcatcgagttggcatgttctccaaccaactcctcaagtttgcccgtcagcacttgaacgtcgccagtacagggcatggtcaccgcgcggacctcgtcaaagcggtggcagaggcgcaaagagaccttgacaagaagattcacgaggccattgccgattcggtcgaggaggtgaagcagctaggctatccgggtctgcatgatccccaggaaattcgttttcgcacgcgcatccagacggctgacctgctagaccatggaactgcggtgcagtacagcatgcagaaggagtcgcttgaagaactccttcctgaacactccatcggactcggctaccagaacctccagtccctcagttatcagttggtgtcattcaaagctgctaggctaaagcccgacaaaggatctcctgcgcccgttcaccttgtgatgattgaagagcctgaggcgcaccttcatgtccaagtgcagcgtatctttcccgacaaggcacacaagctcataagcccgacgggagcagacgcctcagcgctcaagagccagttgctgatcagcacccactcgagccatctcgcgcacgctgaggactttgaccgcctccggtatgtacgccgcgtggcaaagagcgcggcaagcccaatgccaaccactgaagtagtcaatctcgggcaggtctttggtgatgacaagaagacacgtcagttcgcagagcgatacttccgtgtccaacacaccgacctgctattcgccaatgcggccatcttcgtggaaggcgttgctgagcgcatgctcatccctcttttcatggagcgagatttcaaggagctgaacagtcgatatgtgtccttccttgatatcggagggagtcatgcccaccgactcaagccactcgtcgagaagctgcggatccctactgtcatcatcaccgacgtcgacccttgcgaggaacaggacggcaaacccaagaagaacggcgagccaaccaagaggctggtcgcggtcgcaaacaccggtcaagctggtctccattgcggcaatccgacgctccgtgggtggcacccaaggcttcagatgctcgatgatttgaagaatccgaccgacgctcagttggtatggggtgaggccgcagcgggcctcgtgcgattcgcttggcagctgccagttgctgaagctaacggcagctggcccagctcctttgaagattccctcgttcttacaaacatgccttggttcaaggcgctcatggaaggcaaagccgatgatgatggcgttgagattgagccaccgactggcgcgcttggatctgtggcaagagccgcggccgaagctggaagcgttgcagagatggtcaaggcactccatacggtaatgcatggctcgctacgaaagggcgagtttgctgcaagcatcttcgagcagctttcttctgatgaaccagttgtctgcccgaagtacatcgccgatgccctggcttggttacaggcgcagcttgagcccagcaaggaaccgatgacatga

SEQ ID NO: 502645 - DNA, 1974 bp, Stenotrophomonas maltophilia
atgagcgcgctagccgtccctggcaacaacgagcgtgatgacggggttgtcgatgaaatctgcggctatctcactgaggagccgcctcgcagctacttcctctttgccggcgcggggtccggaaagacgcgcacattggtcgaggtgctgcgtcgaatgaccggcgttgtggagcatgaaaaaggggggcgactcgcccgacgactgcagatctatggccgttcgatacgcgtggtcacatacacaaagaacgctgtcgcggtcatcaaaggtcgccttggagacaacgacttggtggatgtctccacaatccacgcgttctgttgggaactcattagcggattcaacgacgacatccgagaagccctcgtcgccatcaagcaagctcagctggaaaaggaaactgcagaggcggttgccaagcctagagggatcactgcagcgaagcagcgggacttggacgagatgaaggcggacatcgaggcatttcggctgacggatgtgttcatctacaacccggaccgcgagacgcatggtgccggcgcgctcgcccacaaacatgtgctggacgcgacggcgtggctgctgcagcacaagtctacgctgcagaccattctgaaggaccgccaccccatcattcttatcgatgagtctcaagacaccatgaagggtatcttggacgccttgatgagcttcgcggagccgaggggtttcggtctcactctgggactgcttggcgaccatcggcagcgcatatacacggatggtcactcggatcttccgagtctagtcccagtgagctgggcgacgccagagctgaaaatgaatcatcgcagtcaacgtcgaatcgtcacgctcatcaacagaatatgggaggcagagatcgatggcagaacgcagcctgccaacggcgtcgagcagcatccgcgaactgaaaaggccggcggagtggtccgactctttgttggcgacacatcgctctcgccggaggagaaggttgcaagcgagcggtggtgcgcagaccagatgcggcaagccagcggttccgatgcttggagccaaggtcactatcagctgctcgctctagagcacaagcttgtcgcaactcgcggcgcgttcctcgacgcgtacagtgcaatggttctgatcgacccaaattcggctgcgcctacgggaagcggcgagaacaaggggcctactgctgtgcaggtgcttttgaatgagcttgcgcagttggaggcctgtgttggccccgatggtgccatagacgagcttatggccaccgaagtccttcgctgcttcggtcgtctcgataacatgccagaacaagcggccgagcgtgctaggcgttccgacgagatgcttcgagccatttccgcctttgctactgcctgtcagaatcctggcgccactgttgaacaagttctcacgccgatactgggcgcgaatctgttcgaggtcgatcatcgacttctagatgcattttccgacaagtctcctgctccacctgctccggccagaggagaggatgagtccaagaaggaccgcatacgtcgggggtggtgtgcgctgttcgacactccttggagtcagttgcagaagtatcgcacctacctcgctggaaattctgtgcttgccacccaccaggtggtcaaaggctcggagtttgctcacgttatggttgtgatggacgataagctggctggtggcaaccaaatttcatatgacaagatttttggagggatccagctcagtaaatcggactgggacaatgttgggaaaggaaaggaaacgaccatcgatcgtaccttgcgcctcctatatgtcacctgcagtcgtgctaaggagtcgttggccctcgtcctatggtcctccgccccttcagtcgcgctgaacagagtcactgcgagcgattggttctcggagggtgagtttctagcgattccgtggcccatcacaaagtcgcattcgtga

SEQ ID NO: 502646 - DNA, 3105 bp, Stenotrophomonas maltophilia
gtgagcaagggctcaaaagttccatcaatctcagaactctacctcgcatttcgccaagcgaaatctgcgctcttctttgagaagcgcggggttggccttgtcgagctcgcggcctacgaagagagtctgcctgacaacctgaaatcgcttcaggcaaagctgtctaatggcaagtggttcgataaacttcaggttggcgaggtgtggatagtgccgaagcgcttccatgccagtccagacggctctggtgggctcatacgcatcggggcaagtcgtgaggatggcgctgctaaaccgattgaggtgcagctgcgaataacgccacatccggacttcgcaatcgccgaagttctctatttgtggcggtttggtggccttctggattcactcctctcaagtgacgtattgggctataggctagatcttcgtcagggggcggttattccccatcgtcgctggctgtttgaatactggccgaaacgttatcagcaattccgttcagctccgctcagtgcggcaaaattcaatcttgagcttggtgatcagacgctaatcgttagcggtgatcttgcgaatttctatgagactatcgatccctctttcatgttggatcgctcgctaattgcggagctggtgagtgctggggcagatgaatatttcattgacgaatatcggcatgctacggtgtcgttacttggtgcgtacgctaagttttataaagtggcgtcagcgcgtgcagcgacacctatccgtataggtgttccgataggggcgttgacgagcaggctgatagctaacctggctcttgcgccgctcgatagtcatgtcgcatctcgccctggtgtgatttgctacaagagatatgtggatgatttggtaatcgttgccgatgcggatggtgagcgagatttggctgatacgattcggcggtttctgccgctcaattcgaacgtcgatccgagcggtaccggtgtttttaggctggattcggaagcgcttaatcggcgaggttcggagttcgagcttcaggaaagaaaggttcgtgcgcaccacttggcgggtgttcctggtgcggacttcgtagacgctgtcgcatcagattttgctaaggcattgagcgagcggcgcgcctttgtagattcatctactttggtgggggacggtgttagtcacctcattcgtgcgggcaacgtggaaggctctcccttgcgagttctccgggaggctgaccgcgctcggctcgaacgttttgcgttatccacgagtctgcgttcgcttgagcgtgtatcaagtcttatcgatcacagtgaagctcgagatcttgtaagaacaagcctagagcgagtagggcgggtgcttgatgctgaggacagctgggtaaacgacctcgacgtgaccttgcgacttctcaaactcgcaatctgtaccggtgattggaaatctgctaaggaacttcgtaagcgcaccgatcgcgtatggggaagtgtggatgctctgaaagcgacaacgagcaagctctactaccgaggtaacgaaatcgattccagtcgccgtgctccgtggacgtggcttcgcaactaccttcatgagcgtcgactggaggcgatctgctcctgtctaccaattggcatggatgccaaagctatcgccagtcgcttccctggcggcctaagggttaggacagtggaagtgaaggcgacagtacttcgccggcgtgctgagcagcttgcttcagctgacctccgttcgcgggaccgagaagacgatgcgcttccaagtcgaaattctactgacgtcgaccgccaatggctccgctcggggctttcaaggaacaaggagttggcaactcgactgcaggccatagacgaatacattgccaagtgtgaaggcgttggtgatccatcctggataatgcccgccgctcgcttgttcctttgtacacgcccaccatcgtatttcgacattgcacggcgctggctttttcgtgtagaagacctggggtttgatggatctactttcgatgatctcattcgaatagttaacgcagttcgcggtacggaatacaaagatgccgtcggtactgtccttgaccgcagtacgatatcaattgagcggccctctgctggacggccactagaggctggcgccgtgccaatggagccgcggataatactgggtaatctcgttgttgatgacgccgcatggatcggggcagctacccgtacccgtggcagcccgtacggcgccgctcggcatacaaagagcagacttcaggggctgaccgatgtcttggagaaggcggcggcagcatctagaagcaaggctgttgagttactcgttctgccggagctctccttgcctcggaaatggtttcgtactgtcgcgaatcatgtcgtaaaggccggtcattatggattggttgtcggtctcgaatacatccatcatgggacgcatacgcagccatatgtcgcaaatcaagttttcgcggtccttccggggcccttcttctctgtcgcggcgtggccatggacaaagcggcttccagcaagagaagaggcggccatgctcttaaagcagaaaacgcctgtttcatttgcgcctccgcatgtgagttcgctgcctaggaccgtaatacactccgcttggggtgccttctctgtgcttatttgcagtgaacttatcgaggcgcgccgagttgctgatctgctcggtcgtgcacagatggtgctctgcccagcttggaaccccgatacttcctcatatgatcatcttattcaatctgttggcttccagcttcacaatgtcattgcgattgcgaataatggacattactcagattgtcgtgcttgggccccaagaacagttcgctgggagcgggacctttgtcggcttatcgagcgcgatgtgaacgatgtcgtctgttttgatgtgccgttgacgagcctgctcgcgttccaggggggggataagcaggccgtggatcgattcgcgcgtctgcgttccgcgctggctaagcgagactttgtcggagcgcgtcgggctcttaaaaagctttcagacgaagctgcgggagcgtggcgtccattgccgccggactggagctag

SEQ ID NO: 502647 - DNA, 1278 bp, Stenotrophomonas maltophilia
atgctccatgatgagcagggcatgcctttgttctatccgaccctgttcgctacttcccagcttcggaatgcaggggcggccgtaaacacgatccggaacaagcttgccgatctcctcgtgctcttgcgctgggagcaggccaatggccgagacctgattacagagttccgcagcggacgctttctctcggttgcagacatagtttcgctgcgggatttcgccaagctcgacatgcgggagttgagttctgctggagacggtgaaaaggaacggggcgtcgtcgtagatttccttgaggcgcgagtttcctcaagtcgggctctggccaccattggtgggcagcaacacttcaatcggatcagcacgttcgccgactatctggaatttacggcttcagtcgttacacagcatcagaacccgtcacggaccgcgcaggaaatcgcgcggatggccaggaccatccgtaaacatcggccccgcgggttggcaaagcagagggccgacgaatcggatctgcgctcccccccttctgagttggttgagcgattcatggcgataggtgccgagggaaacccgcgaaacccgttccggcacccggaagtccaactgcgaaatgctattatcttcgggctgctgcggcacaccggaatgcggcgaggggagctattgagtctgcggctcgatcaattcgatttgggccatgagccgcacgtctgggttcggcgcaatcaggacgataagcatgactcgcggcgctatcagccggtagccaagaccaaggagcgtccgctgccgctgcctgagatgctagccaaccagatcgaccgttacatgttgaaggtgcgccccaagatcggccccgccagacggcacccctacctgcttgtctcgcacaggaagggcagcacatggggtaagccgctctccgcctcagcactaagcagtcagatcttttcccggatgcgcgcggttgactccgccttcgaggctatccatccccatgcctttcgacaccacttcaactacgagctttccgtcagcattgacaagcacaacgccaagagccggtcaggggaagatgctgaggcgtcaccgatcagtgaggctaaggaactggatgttcgtgcgttcctgaatggtcatcgcagcaagacctcgggagcgacgtacaaccggcgccacatccgtgaagccagcgacaaggctgctcgtcgggtgcaggcaggtcgtcccaagaccagcgataactctaaggaagacggcgatggtccgcgttaa

SEQ ID NO: 502648 - DNA, 1581 bp, Stenotrophomonas maltophilia
atggtccgcgttaagccaaagcaggtcgatgccgagcggaagtcgatagctcgagcagtgtctaaggacggttatccatttgaacctacggatgaccactggcgattgaataaggacgtgcagatcgcgcttggtcttccaggggctattgacgctatagccgaagctggctttcgcgccacgctgttgcgctatgcggaagaggcatctgctcgtcatacgcgaaatatggagacgcgtttcaagcgatacttgcgggacaccggagcgtcacgggtgacggtgtccgacctcatcaattggcgcgccagccttgcgacagacgagcaatatcagttgggtgggctgaagggatttctgcttgcatggtacgactacgggtttgaaggcatcaccgatgaagtcgttgatctactacagggttggcgaatacaggggaacgaaaaaggcgtggccgtcgccagtggttgccccgagagtggaccttacaccgaccttgagatggctgcgatcttggattgggcgaatcttgcggcagcacggaaggacatcgcatttgaggactacgcctatctgcttaccttggcgatgaccgcgcgacgtcctgtccagatcgcagcacttaggggacgggacctggttcgggagactggtgaaggtacgccaatgttcaggctcaacattccgcgagcaaagcaacgcggcctcgcgttccgtggtgccttccggtctcttgccattcttgaagacctatatctggtgcttcggcagcagcatcgacagtccgtcgccgcagtttccgaagctattgggcgaacagtagaccccgtgctggcaggcgaagtgccgatctttctaaatcgcaagcgtatcgagggtgtggaacacgtcgacgaactcactgaccttttgatgggcagtgcgcccgaccagctgcacgcaaagatcgactcgttcgactccgctctgcagcgttgcgctaaggcgtcgactgcacgttcggagcgcactggcgagttcattcgtctctcagcaattcgattccgacacacacggggcaccaagcttcgtcgagagggcttcggtgcagtcatcattgctgatctgttggatcattccgacactcagaacgtgcgtgtgtacacggagaacactgctcaggaggcggtggtcatcaatgagctggtgggtgcccagctcgctccctttgcgcaagcctgtctcggtaagcttgtccgctctgaacgtgaggcaattcgcggtggcgatccgcgaagccgggtgccgaacgaccaccaacacgcggtgggaacctgtgggaactatggcttctgcgctagtggctaccgttcttgttacacctgctatcacttccagccgtggatcgacgggccgcatgaagaggtgttggtggacctatacgctgagaaggagcgcacccgggaggcaggctgcgcagacgtcatcgtaaacgcaaatgaccagttgatcctcgccgtcgagcattgcgtttcgatgtgcaagaaggctagggatcggatgcctgaagcgactttgttagaggcggacgcccatgggtga

SEQ ID NO: 502649 - DNA, 1851 bp, Stenotrophomonas maltophilia
atgggtgatgtcgtccaattcgtgcctcgcgctgagcgcgatgcaagtaaaaatctagccgagttcattcgcttggcaaaagaaagcctgacagcattcgcgaatggtggtgcttgggatcgcgacaagtggcagcaaaacgaaaccgtagttgtattcgcgacgaagacttcgcctctgaactcatactcctttacgcccttcgccgaaccattcatgcagttcgcaaaggcatacgttagataccggtatagccacagaccggtcaagagcttggcaatgatgctccaggcgcttcgctgcgtggaggcagggttgctggcgtcttgtagccgagcagatgtcggcctcctgagtggtgcggtaatggacgtttgcgccaacaagtgcaaggagttctactccagcgaggatgtgcaccacaaaaccgggctccaacttcaagccgtattcgacttcttgcgtgagaagagtcttgtcttgtcgttgccagcttggaagtctcctttcaagaagccggtcatcctgaccgaggatctcggcgaagcagggcaggcccatcgcatggcaaagcttccctctaatgaggcaatgctcgcagttgctgacgtgttcgcccaggccgacgatcgagagagccagttctactcgtcaatcttcatcctgctgatggcagcgcccggccgcatctccgaagtcctcaagctgcctactgattgcattcaatgggaggcggacgaaggtgggaagcttcaaatgttcctgcgctggcatgcggtcaagggcaaaggcgcgacgaagaagtgggttgtacccgccatgcatgacgtcgtgcaagaggctgtccggcggttggtcgaagtcggtgatccggcacgtgaggtagcaaagacggcgttcgaaggctcagcgcaattgtcgagagaggccggcgcgtccaacctcatcaaagagtttggtggcttttactggccattcttggatgagaagaaggtgctgaaggcttgggacgcactatgcctgcaccgagagaatgagttcaaccgcgagagggaaatcaagccaaactcatggcggattcccgacgctaacgaggtgaacaggcgcttgggcgccggccaccgattatcgctatttgatcgcatgggtctgcggaattcggatggcacgcgcatcgtgttgacctcgcaccagctccgtcattggctcagcacgatgtcagagcgggcgggcatggacgactataccctggcgcaatgggctggccgtgcaaaggtttccgacaatcgtcattacgaccatcgctcgcccgaggagcgcctggaggctgcccgagggctgcttccgatgcagcttgctccattgctcgagcgcatcaagcatcgtcagccggtgacatatcaggagcttggggttgatcggctaggaacggccaaagcaacgctctacggcatgtgcgtgcacgactacgccatggcgccgtgccagaaacagcgcgagtgcatgacctgcaaggagcatgtttgcgtcaagggcgatcacgttacgctagatcggattcgtctcttggaaacgcagacggaaaaactgctccaacacgccatgaaggctcatgatgatggcgactttggcgccgaccgctgggttgacaatcacaagtggaagctcgcgcacgtcaaggcaatgcggatggccttggagcatcccaatattccggagggagcggtcctcagggtcccggacgggcacgatccctctccagttcgtcgcgcccttatggatcttgaggtggtggagatgccctccatggaggcgcttggtccgaacataattcccttggccctgacctga

SEQ ID NO: 502650 - DNA, 2067 bp, Stenotrophomonas maltophilia
atgaatcaaatgaaagataccagaacggccgcgggccatatcgaagtccctaaggcatccgacaccgtgctcgccagcttcatctggaaaaatgccgaggacctgtggggcgacttcaaacacaccgacttcggcaagatcatcctgccgttcacgctgctgcgccgccttgaatgcgtgctggaacccacgcgcgatgtcgtccgcgagacccacgccaagttcaaggacaagggcctggataccgacttgatcctgcgccagaaggccggccttccgttctacaacacctcgcagtactcgctggctactttgggtgcgaccaagaccaagtcgaacctcgaggcctatgtcgccgccttctcagacaacgcacgcgtcatcttcgaccagttcaacttcaccgacacgatcgcccggctcgcccgcgccgacatcttgttcaagatctgccagaacttcgccaataccgacctgcatccggatgtcgtgcccgaccgggtgatgtccaacatctacgagcacctgatccgccggttcggctccgaggtcaacgaggcggccgaagatttcatgacgccacgcgatgtcgttcacctggccaccactctgttgctcgatccggacgatgcgctctttcgcaacagccccggcctgatccgcaccctttacgatcccacttgcggcaccggcggcttcctcaccgatgccatgaactacgtcgacggcttcgccgctcagggcaaggccccgcccgtcctgatcccgttcggccaggaactggaaccggaaacccacgcggtcgcgctcgccaacatgctgctgcgtcgcctggaaaccgaaccctctcgtgacctgtcggccaacgtcgccggccccaaatccacgctctctcaggatgcctacgcaggccagcgcttccactactgcctctccaacccgcccttcggcaagaagtgggagaaggaccaggcgttcgtcgaacgcgaagccaaggaaaagggcttcgagggacgtttcggtgcaggcaccccgcgcgtgtccgacggctcaatgctcttcattcaacacctgatctctaagctggagcaccccaacaagggcggcggccgcgcggccatcatcctgtcgggctcgcccctgttcaccggcaccgcaggtggtcatggccatagcgagtcgcagatccgccggtggctgctcgagaaggactacgtcgaaaccattgtcgccttgccaaacgacatcttcttccgtaccggtatcggtacttacatctggctgctgaccaacaacaagccagaggaccgccgcggcaagatccagctgatcgacgctaccgagatgcacagccccatgcgtaaggccgaaggtaacaagcgccgctacctgagcgacgggcagatccaggacatcgcacggctctatgccgactacacacccggggagaatgtgcggatcgtggactatcgcgatttcggctatcgccggatcaaggtccagcgaccgctgcgcctggtcgccaaggtgactgaggaaggtcttgccaccttggcgaccagcaaggccttcgccaagcttgatgagactgagcaatccggttggctcactctgctgcgcaagcatctgggccagacttacccctatacctggttcgccaccttgccagctctggccaagaaggctggcttgccgaagatcgcaaaggctctagcgacggctctggagagcgctttgggtgtgcgagacgacaaggcaccagaagtggtggacgccgatggcaacctcgttgccgacaaggacctggaagatttcgagactgtcccgctggaccagcccatcgacacctacatggctgccgaagtactgccccacgtgtccgacgcatgggtggacgccagctttacggatgatgaggatggccagcgcggcaaggtcggctacgagatcaacttcaaccgctacttctacaaatacgttccgccgcgtgacctgcacgaaatcgactcagagttgaaggccgttgaggctgaaatcgccgcactgctggatgaggtggcggaatga

SEQ ID NO: 502651 - DNA, 1281 bp, Stenotrophomonas maltophilia
atgacccccgccctttaccacaaggcgttcaagtcatctggcgcgccgtggcttgggaatgtgcccacccattgggtggtgaaacctctgtggtccatgtacaggcagaagaagattacgggataccccgaggagacgctcctctctgtctatcgtgaccatggtgtcattgaaaagagctcgcgggacgacaacaaaaatcgtgcgtcagaagatctgagcggctaccagctagtcgtggatggcgacctagtcacgaacaaaatgaagacgtggcaaggatcgattgccgtctcaagcctgcgcggcattgtgagccccgcatactacgtctacacaaagcttcatgacggcaataacgcctacctccaccacctgttgcggagcgttccatacatcactggctaccagtcgatctcaaaggggatccgtgtgggccagtgggatcttgaggcagataaatttcgcctgttccccgtactcattccacctcggccggaacaggacgccatcgtcgcccacctcgaccgcgcaaccacccgtatcgacgccctggtcgccaagaagacccacttcatcgagctgctgcgcgagaagcgccaggccatgattacgcatgccgtgaccaaggggctggatcgtggtgcgccgatgaaggacagcggggttgagtggctgggggaggtccccgtgacgtgggataccgcaccactcaagtcgttccttcagcttcgtcgggacatcgttggtaccgccagcgcgaataccaggctgctttcgctcaccttgcagggcgtgattgagcgagacctggaaaatcccaccggcaagatgcctgcttcattcgatggctaccagcgcatttccgcaggcgagatggtcttctgcctgttcgacatggacgaaacgccgaggaccgtcggcgtggcccaacaggacgggatgctgacgggcgcgtatacggttttccggccacagagcgacctctgggcgcgctacctctactacttctttctccacgtggacgagtacaagcgccttaagcccttctacaagggcctgcgcaagaccattcgacctggcccgtttctctccattcaggtaccgcgccccagggatggtgaagctgaggccatcgtcgcccatctcgaccgcgctacctcccgcattgacactctgatcgccaagaccgaacgctcgatcgaactgctccgcgaacaccgcaccgccctcattaccgctgccgtcaccggcaagatcgacctgcgccctgcggcctaa

SEQ ID NO: 502652 - DNA, 3255 bp, Stenotrophomonas maltophilia
atgcatcctgccttcaccgacaccgcccaccgcgagaaatacttcgagacgtacatcgtcaagcaactcgccgcgcgcggctggaagataggcgataccaacgactacgaccagaaccatgcgctctacccggaagaccttgtggcatggatccagaccacacagccttcgaggtgggaaaagctggtggcgagcaatggcgaaaaggcggtcaccactctcatggaccgccttgcccaggccttggacaaggagggcaccgtccacatcctgcgccatggtgtgaagatcgcaggggcaggcgaaatcagtctgagcgaaggcctgcctgaggacgcgcgcgatccgtcggcctgggaccgctacaacgccaacattctgcgcgtggtgccgcagttgaagtaccgccccggcagcacgcttgccatcgacctggtgttcttcatcaacggtcttgcggtggcgaccgtagaggtcaagaccgacttcacccagtccgcctcggctgctgtcgagcagtacaagaacgatcgactgcccgtggatccaaccacgagccgcgttgaacccctgctgatcttcaagcgtggcgccgtcgttcacttcgccatgtccgacagcgacatccagatgtgcaccaagctggatggccagaactcctacttcctacccttcaaccaaggccgggacggtcgggcgggcaaccccatccgcgaggacggtgagtatccggtcgcccacttctgggagcaggtctgccagcgcgacaactggctgcggatcttccatggcttcgtgtacaccgaaaagaaggacgtggtggacgtggctggcaaccactcccgcaaggagacgcagatcttcccgcgcttccaccagtggaaagcggtcacccgcatgatcgacgacgccaaggccaagggccctggccagtcctacctgtgcgaacactcggcaggctccggtaagaccagtaccatcgcctggacggcgcatgacctgatccgcctgcgcaccgatgctggcgtcaacctgttccactcggtcatcgtggtcaccgatcgcacggtgctcgacaagcagctccagtacgcagtccagcagatcgatcatcagaaggatctgatcgcggccatcggggagaaggacagcggcgtcagcaagtccaaggaacttgccgaagctctggaacgtggcacccccatcatcgtggtgaccatccaaactttcccttacgcgatggagcagatcctgaccaacgggaaactcgctgaccgcaacttcgccgtaatcatcgacgaggcccacaccagccagaccggcaccgccgcctccaagctgcaggccacgcttgccctccgcgacgccaaggccatggaaggactcaccgtcgaggagctactggagaaaattcagtcctcgcgcgtgcgccccaataacgtctcctacttcgcgtttactgccacgccgaagcacgccacgttgacgctgttcggcacgcgccctgatccgggcaagccggctagtaaggaggacaacctgcccgtgtccttcgacaagtacccgatgcgccaggccatcgaggaaggcttcatcctcgatgtgctgcagggctacttgccctacaagacggcgttcaacatggccgagcctgagaaggacggcaagcgcgtggagggtaaggcggccaagcgggcgctggccaagtggctctcgctccatgccacgaacgtcacccagaaggtcgagttcatcgtcgagcacttcgcggccaacgtagcccctttgctggggggcacggctaaggccatgatcgtgacgtcctcgcgcgcggccgccgtgcgctacaagaaggcattcgacgcgtatatcagggccaacccgcagcacaagccctaccaagcgctggtggcgttctccggctcactcacgggcaatgaggtcatgcacgcctccgacgagcaattgaagaacgacccgttcgcggcgcaggacgatgagcagtttaccgaaagcaccatgaaccctcgtcagtacggtaccgacctgcgcaaggtgttcgatcgtcctgagttccgggtcatgatcgtggccaacaagttccagaccggcttcgaccagcccaagctgtgcgcaatgtacttggacaagaagatcgccaacccggtggagattgtccagacgctctcccgactcaaccgcaccgcgcccggcaaggacacgaccttcgtcgtggacttcgtcaacgatccgcagtcgatcctcgacgccttcgccatgtatgacgcaggcgccaagattgagaaagcgcaagatcccaacgtggtctatgacctgcaagccgacctggacaaggtgggggtctacacgcaacgcgaggtagagacgtacacggccatccgcttcaagtcagccgcggcctacgccgcaggcgaaaaagcccagcacaaggatatgtacgcggccactagcctgcctacccagcggttcaacgatgcgctgaaagccgcccgcaccgccatccaggccgcggaggcagacttcgagggcgccaaggcacaggggaacgaagccggtatgaaggcggccgacgcacggcgcaatgcggcggctgaagtgctccagaagctactggacttcaagtcggggttgtcccggttcggcactctgtacacctatatcgcccagaccatcgacttcggcgaccccagcctggaaggattcgccagcttcgcccgcctgctgtccaagcgcttgaacggtgtgccgcctgatcaggtggacatatgcgcgttgctgctgaccggcttcgacatcaagtcgcaggacaagcccgccttgggtggtgatgacggtgatgatcagaagctgatactgaagcccgtaggccctgggggcggtgggcaagcgcagctacccgtctacttgcgtcaggtgatcgctaagctcaactcgatcttcggtgaggccacggcactgaccgacaaattggccctggtgaaccacgtcgccgacatcgtgcgcgaggacgccaacaccgtggcccaagtcaaaaacaacccgcgggatgtggccatggcaggcaacatcaaaggctcagtccagtcggccttggtcagggcattggactcgcacagcacgctggccgcccatgtgttgaagcacgaccagcaggcactggtcccgctggtggggctgatctacgagttggtcaaggcggggcagaacatcgaccggacggaactgggggcgtaa

SEQ ID NO: 502653 - DNA, 588 bp, Stenotrophomonas maltophilia
atgtgccagtttacgcgcctttccgacgtttctggtgagtcgatgaaaaccaccgcactgatttcgtgcttcgtcttttgtgctcaatttgggtcctcgctagccgcccgtccgctgtcagagagactcgcggcggacatcgagatggccgaacactctattcttgcctcgctggtggtgcacaaaagttccgagagcaagtcgctgtgctctcagacgccatatgcttgtgtaggagcagatggtgctgagcttggtctcgccttgatagggggcagcaggagtgctgccgctcctcggcacttggttgagctgtcgcgattccgtatggatggagcgctttccgaggactacaagtgctacctcgccgcgcatggaaattcagtggctcaggctgcgccgaagctggatgccaagaagctggcagggcaatgcatgtccgaatttgctgctttcaaacgtcgggccggcgccgcgaagttcgacgtggcgcccgagaatatctgcaactcagtggcggacatccagcgatccctgcgtgaagctgtccgactagccaatgcaggcggtgaatgtgacggcttctga

SEQ ID NO: 502654 - DNA, 777 bp, Stenotrophomonas maltophilia
atggaccgcgccacatcaaagcctgatggtgcatgccccttcctcgcgcattcaacgatggcgattccagtcgatcaaatcgtgtttctgctggccaccgactgtttcagggaggtcctcctttcaacatttccgagaagcgatgctgaagctgcgcggcttgcagcacagcggacagtgagccagctggtcgatggaggagataactactacctgtgcgccagcttcagcgaagcaaggataggaagcactcatgatgcattcttcgacgatcttcgctcgcttggcgcctccgcccgattacagaaccacgttgcacttgtgattcaagcactaccaactcccggagcagcaacgatccgcgcgtgcgatacgatcacgtccatcgccagctacctcttctggctggaaagcaaggctctatgcaatccgattacagcggagctcgttgatgcgatcgccgtgatagaaccgcttggcctgcaacgcgagccgccctgcgtggattggcatgcagcctggacccattcgcagtccgagcaggatcgttacattgcttcgttgatggatggaattgacgatgcgcccgtgtacgtgtttaacgacgtgcaggcattcactgttcgattcgattttctctcactgtggagagcgcgacttggcgaagcctgctttggactgatcagcaagttcatcgcgaccgaggcgcacttgaggctggacgatcgcgatgctgacgccgctggtcacatcgatcagatccttgcggcgatctag

SEQ ID NO: 502655 - DNA, 408 bp, Stenotrophomonas maltophilia
atgcccgaacgtcttcccgaccatccccgcctgcacgcgctgctgggtgccgctgtacttgatcttcccgctgccttggccgaaacgctggaggacgcgctccgcgaatcagccgagttcgtcaccccatcggcattctttgcacacctgaaaggccacggcaggaacctgcgcgctgatggcgaggcctggagtgaaatgtgcctgagccccggccgcgccttcgacatggccctggcgacccgcagcgtttcgggcatcacggcgttgaccgcggtgctgcatgccgcgcatgtggcacgggagaacgacgatcctgcctgctgtccctccgccgccgtggtcgaaggtctgttcaacgcctgccaggcgctgtcgctgcaggtggaacgctgcctggtgccgtga

SEQ ID NO: 502656 - DNA, 615 bp, Stenotrophomonas maltophilia
atgcaacaagagtggttgataccggcttgcgagcggctcatcctggtaagcagtaatttccatgtgtattggagtggtgacgtgaagaatatctcggccttcattatcgcgactgggattttcctgatcttgttgttagcggggaacgcccaagcagaaggccgctgcccgcctgggcagtatccagtgggtgaccagcagaagggggttggtggctgtgcgccaataccgggctcaggggcaggcgaagggcaaagtggtcctgttgcgactggtcgttggatcaaaacttggggggccattgcagacgctgtggtaaccggcgacatgggagcttcagtgggaaagcgatctaaacgagaggcggaatctgaggccttgtcgcgttgcgcgacccatggcgcgactgactgcaaagttagtacgacctataagaatcaatgcgttgcgtatgccaatcccgagccgggcagtaagggaatagtttcaatttccgtcgccggctcaagagaggaggcgaccagtcgggttctctcctactgcgcgaagaacggtggtgggcaatgcaaggtgttgtacacggattgtgctgagccaatatttgaatctttctaa

SEQ ID NO: 502657 - DNA, 393 bp, Stenotrophomonas maltophilia
atgaaactgcgtgcgttccggactcgatcactccgtctgcgctttgcttggctggcgttgctggcgctgctgttccagcaggttgcgctggccgcctacgcgtgcccgatcgccgagacgccgccggagccgaagatgatgatggccggctgcgaaggcatggatatgccggacccggccgcaccggtgctgtgcgaccagcactgccagcgtgaccatgtcgccaatcccgatttcaaagcaccacaggtgccggcgcttgccttgccgccgctgcacttcgccctgaccgaggccctgttgccgccggcacaagcccagtactacgaagatgtgcctacctgccggtctgatccaccgccagcgcagcgcttctgtagcctgcagatctag

SEQ ID NO: 502658 - DNA, 1305 bp, Stenotrophomonas maltophilia
atgtcctttccattctcactgcaccgccagtgcagaacttgtcgttggcctgcgtggatgctggtcatcggtttcatggtcacccctgcctggtccatcgcggctggtatctctttcaatgacgcgcagcgcctggcggccgagcgcgctcccttgctcaaggcgcgccagtcacaaattacggcgacccaagaagaagctgtccgcgccgctgccttgcccgatcccaagctgacgctgggcctcaccaactggccggtcaccggcgccgacgcgttcgattttcgcgccgacgacatgaccatgaagcagatcggcgtgatgcaggagttcccggctcgcgccaaacgccaagcgcgtcaggccgtagccgatcgcgggatcgagcaagccgaggcgctgtcggtagccgaacagttggcggttcggcgcggcacagccgaggcctggattgccctgtgggccgcccagcgcgaagttgccgcgctgcagacgctgcgggaaccggcttccatcgccgtccgtaccgccaaggcgcggttggcaggcggcaccagcacggtgaccgacaccttggctacgcaagcggcggcgctggaactggagaatcggatcgatgccgcgctagccacgtcggaagccgctcgcgctggcttggcgcggtggctcggggtggatccggcggatgtggaggccgaggacgcaccgcccgcgctgacggaactggtcgttgccccggccacgctgctggcctcaatcgaccgccaagggccgctgctgccgtggcgctcgcgcgaagccctggccgaagcggaagtcgacgccgccatcgccgagaagcggccggactggagcctgggcgtgacctacgggcaacgtgaccggatgccgaacggcgtgtcccgcagcgacatgctgatggtcgggttcgccatcgacctgccgctgttcccacgcaatcggcaggaccgcggcgtggcggcacggcgtgccgagttggatgcggtggccgccgaacgcgaagatgcccgccgcgtccagaccgaagccgtccgccgcgccctggccgactggcagggcctgcaacgccaggtcgcccgcaaggaaacccaatctcttccgctggcccatgaccgcgcgagaacggcgctggcggcctatgccggtggcggtgacctgcaaccgtggctggaagcacgccgcgacgaaatcgaattgcatatcgaacacgcccgccacttgggcgaactcggccgcgcctgggcggcgttggcctatttgctgcccgaggagagcacgccatga

SEQ ID NO: 502659 - DNA, 1500 bp, Stenotrophomonas maltophilia
atgacgtccgccacgacgacccgtttgatgctggcgactgccgccgttgcactgctggccataggtctcggcaccggctattggtgggcgcagcgtcgcgtcggtccagacatgaagccgatggctgccgcgccgatggcgagtcagagcgagcgcaaggtcctgtactggtacgacccgatggtaccggaccagcacttcgacaaggccggcaagtcgcccttcatggacatgcagctggtgcccaagtacgccgacgaagtcgccggcggcggcgtgcgcatcgacgccggactgcagcagagcgtcggcattcgcaccgcgcccgtcgaagtcggtcgcctggcgtccacggtgcgcgtgccgggcacactgacctgggacctgcgtcaggaatcggtggtcagcgcccgtgtcgaagggatcgtgagccgggtgcaggtgaaagccccgtacacgaaggtcgcgcgcggccagccattggcggcgttgctggcgcccagttggagcagtgcgttggcggaagcccaggcgctgcggcaggcgcagtcggcatcggcacgcgaactgcaatcagcggcacaacaacgcttgcgtgtgctgggcgtgcccggcggcatggcccgcgacggcagcgtgacgctgagtgcgcccagtaatggtgtcgtcaccgaagtgctcgcccgcgaaggccagacggtgatgccgggtacgccgctgttccgcgtcaacggcatcgacaccctgtggctggaagcggcgattccgcaggccagcgccacttccctgcgccccggcacaccggtggaagcgatggtcagcgccgtacccggccaaacctttgccggggaagtcgaggcgctgttgccgctggtcgatgtcgccagccgcacccagcgggcccgcatcgtgctgcgcaatcccgacggtgtgctggcgccgggtatgttcgccgaggtgacgctgcaaccgcaggccggcgcagccgttccgctggtgccgaccgaggcactgatcgcgacgggtgccgacagtcgcgtgatcgtgcaggacgccagcggcggcttccgtccggtgcgcgtctcgacggggcgcagtagcaacggtcgcaccgaagtcctgacaggactcaaggggggcgagcatgtcgtggtctccggtcaattcctgatcgattccgaggccagtctgtccggcgcactggaacgtctgggggcaccggaaaccgcgtcgccggcagcgcccatgaaagcactgtcgccgaatagcgcgccggaaaccgtcccaacaccgacgccggcaaagcccgctgctgtcgcaccgtcgcgctcgtacccggtgcagtactggtacgacccgatgaagccggaccagcacttcgaccagcccggcaaatcgcccttcatggagatgcaattggtaccgaaattcgcaccaggcgcggcttccgattgcactgtccgcgacgtgccgtccgccgacttggagaagcagccatga

SEQ ID NO: 502660 - DNA, 3162 bp, Stenotrophomonas maltophilia
atgatcgcccgtctgatccacgtctgcatcgccaaccgcgtgctggtgctgatggcggccgtgctgcttgccgtcgccggcgtgtggtcggtgcggcacacgccgctggacgcgctgccggatctgtccgacacgcaggtgatcatccgcacgcagtggccgggacagaccccgcgcatcgtcgaggaccaggtcacttatccgctggcgacgacgatgctgtcggtgccgggcgtcaaggcggtgcgcggtttttcgttcttcggtgattccttcgtctacatcctgttcgacgataaaaccgacctgtactgggcgcgttcgcgcgtgctggagtacctgagccaggtccgcgaccggctgccgcaaggcgtgagtcccgcactcggcccggacgccaccgggctgggttggatctaccagtacgcgctggtcgatcgcaccggccagcacgatttgggtcagctgcgcgccctgcaggactggttcctgcgctacgagctcaagaccatccccgacgtggccgaggtcgccagcatcggcggcgcggtacgcgcctggcagatcgtgccggacccgcaggcgctggccgcccgcggcctcaccgtggcgcagttggtcgacgccgtcgatgcggccaacggtgccaccggtggttcggtgatcgaacagggagaagccgagctgatggtgcgcagcgaaggctacctgcgcagccaggccgcgttcgagcaggtcccgattttcagcacgaccgagggcgtgccggtgctgctcggcgaagtcgccaccatcacgcgtgggccgacattccgccgcggcatcgccgaattggacggcgaaggtgaagtcgctggcggcgtgatcgtgctgcgcaccggcaaggatgcgttgaccgcgatcgagaacgtcaaggcgcgcctcaagcaactgcagggcagcctgcccaagggcgtcgagatcgtcccggtttacgaccgctccgagctgatccatgagtcggtgcgcaacctcacccacaagctcggcgaggaattcctggtcgtggcgctggtatgcgcgctgttcctatggcacctgcgctcggcgctggtggcggtgatcacgctgccgttgggtgtactggccgccttcatcgtcatgcgctaccagggcatcaccgccaacctgctgtcgctgggcggcatcgccatcgccatcggtgccatggtcgatgcggccgtggtgatgatcgagaacgctcacaagcatctggagcattggcgcgaggaacacggcgatgaaccacaaggcgaagcgcgctggcaactgatggcgcagtccgccgctgaagtcggccccgcgttgttcgccagcctgctggtgatcacgctctcgtttattccggtgttcgcgttgcaggcgcaggaaggtcggctgttctcgccgttggcctacaccaagacctatgcgatggccgccgccgccggcctgtcggtgacgctgattccggtgttgatgggttatctgatccgcgggcacatccgccctgagcaggagaacccgatcaacctcgtactgatcgccggctaccgccccgtcctggactgggtgctgcggcatccgcgcctgaccttgggcctgagcggcgtgttgctgctactgaccgtcattccctacgcccgcatcggcagcgagttcatgccgccgctggaggaaggcacgctgctgtacatgcccaccgcgctgccggggctgtcggccgacaaggcgcggcagctgctgcagctgtccgaccgcatgatcaagaccgtgcccgaggtcgcgcacgtgttcggcaaggccggccgtgctgagacggcgaccgacccggcaccgatcgagatgttcgagaccacggtgacgttcaaaccgcgcgaccagtggcggcccgggatgacgccggaaaagttgcgcgccgagctcgacgccgcagtgaaggtgccggggctgacgaacctgtgggtgccgccgatccgcaaccgcatcgacatgctcgccaccggaatcaagagcccgatcggcatcaaggtgtcggggccggacatcggcgtgatcgagcggcttagcagcgaggtcgaacgcgtggccaagaccgtgccgggcgtcagttccgcgctggccgagcgcgtcaccggcgggcgctatgtcgatgtgcgcattcgcccggaggtggcggcacgctacggcctgagccaggccgagttgcagacgctcatcgcgaccgtcgttggcggcgatccgatcggcgagacgatcgaaggccgcgagcgctacccgatcgtgctgcgctacccgcgcgggcaacgcgactcgctggcggcgctggtgcagttgccgttggtggcacccggcggcgtgcaactcaccctagggcaggtagccgacgtgtcgtttagccctggccccccaatgctcaagagcgacaatggccgcttagtcggctacgtttacgtcgatgtagccggtcgcgacctaggctcggtggtcgccgacctgcaaggcgctgtcgccgcacaggtgaaactgccgccggcttacggcatcgcctggtccggccagtacgagtacctacagcgtgccttggcgcggttgcggtgggtggtgccggccgcgctggccatcatcttcctggtgatctggctggtgttccggcgcttcggcgaggtcgcgatcatcctgctcagcctgccgctggcgctggtcggcgggctgtggctgatctggatgctcggtcacgcggtgtcgatcgcgacgatgatcggtttcatcgcgctcggcggggtcgccgccgagttcggcgtgatcatgctgctgtacctgcgccacgcctgggaacggcatctggccacgggcgaaccggccacggtcgccacgctggaagccgcgatccgcgaaggcgcggtgcttcgcgtgcgccccaaagccatgaccgtcgccgtgatcctcgccggcctgttcccgttgttcatcggcgccggcgccggttcggaggtcatgcagcgcatcgccgcgccgatgctcggcggcatggtgaccgcgcccctgttgtcgatgctcgtcattccggccgcgtaccgcctgctgcgcgggcgcgctctgtctcgaacttcgtctgccgcatcggtggacaccgcgacgtga

SEQ ID NO: 502661 - DNA, 357 bp, Stenotrophomonas maltophilia
atgaaacgtcatttcgttaccgctatcttgactgccgccctcggattgttgagtgcttgcagcaccacgaccgccgcgcatcgtctgggctcggtcaagaccgtgtccgaccacaccctgcagttgtgcttcgatccacaggcagtaccgccggtcgccggccagcaggttcaactggtacgccgccagcaattcggcaacccgaagttcccgccgaccttccgcgaacgccccgtcggcacagcgcagatcgatgccgacgtgaccgggcgctgcgcggccgccacgctggtcgaaggcaacgcgcgccgcttcgatgaggcgcatccggcgttggccgaccgtaagccgcattga

SEQ ID NO: 502662 - DNA, 402 bp, Stenotrophomonas maltophilia
atgaaaatgaccctattcgtttccgcattgactgcgctgctgttggcggcctgctcgcaggcacccagcggtgacaccgctatgcaaggcaccgacaacacgcccatgccggctgcggagcacgcgccaatggccgaccaggcaaaaccggccactggcggcatggcgcaatcggccaagacggcatcggctacgggtactgtcgaagccgtcgatgcggccgccggcaagatcaccatcgcccacggcccggtggatgcgctgggttggccggcgatgacgatgggcttcaaggccacacctgaacagatcgcctcggtgcaggcgggtcagaaggtacatttcgagttccaggcccagggcatggaagcgacgatcacccagatcatgccagcgcagtaa

SEQ ID NO: 502663 - DNA, 189 bp, Stenotrophomonas maltophilia
atgaaatttcgccagaacgggccttacgtcgtgcccgtcgtgcgtcgcgagaattcccgcacctccctggatgacatcagggcgccgatgacgatctgggcgcaattcacatcacacctcgcgctagacaacatcgatgtgggcgattttccggaaccgtacgaaaacgaactgatcttggctgcgtag

SEQ ID NO: 502664 - DNA, 288 bp, Stenotrophomonas maltophilia
atgcgcaaatccatattgggcttggtgatgatggcgtgggtcggcgtggcgatcgcggcgacacccaagcaggtcgtactcaacgtcaagaacatgacctgtcccgcttgcagcatcaccatcgagaaggccttggaccaagtgccgggcgtgacgggcaggcaggtgaatacccaggcgggaacagtggtcgtgacgttcgacgcggagcgaacaagcttgcctgtcgtaacgcgtgccattacggacgccggctttcctgccagcgtgagggcaaagggtggctga

SEQ ID NO: 502665 - DNA, 402 bp, Stenotrophomonas maltophilia
atggccgcgagccccctcactatcagcaaactggcggcttccgccggggtgcacgtcgaaaccgtgcgctactaccagcgccgccgactgttgccggaaccccagcgaccccaaggcggttttcgccactatggctcggctgatgtcgcccgcctgcagttcatccggcgcgcccaggcgatgggttttaccctggatgaaattgccgggctgttggagctcaaaggcaagcgggcctgcgaacaaacgcgtcaactgaccgagctcaagctggccgatgttcgccaacgactcgatgcattacatcgattggaagtcgatctgatgagcctcatcgccgaatgcagtcaggtgccgggcggcggttcatgcccgacccttgagcttctcgatcgatcgtga

SEQ ID NO: 502666 - DNA, 1404 bp, Stenotrophomonas maltophilia
atgttcgatctggtcatcatcggtggcgggccgggcggctacccggccgccatacgtgccgcgcagttggggatgaaggtggcctgcgtcgaaacccgcacccgcatgggtggtacctgcctcaacatcggctgcattccctcgaaggccttgctggaatcgtccgaacgcttcatggcggccaaaaccgaattcgccacgcatggcgtcgagttcgatggcctgcgattgaatctcgcgaatttgctggatcacaaggacaaggtggtctccggcttgggcgacggcatcgactacctgttccgcaagcacaaaatcacgcgactgcttggaaccggatcgattcctggccccggccaggtcagcgtgactgccgccgatggcgccagtcagacgctccaggccaaggcgatcgtgattgcgacggggtcggcgggcgccaccttgccgaatgtcccgatcgacgaagaccggatcgtctcctccaccggcgcattgtcgttcgcgcaggtacccgagcacctggtcgtgatcggcgccggctatgtcggcctggaattgggctcggtctggcaacggctgggttccaaggtgaccgtgattgagtatctggaccggatcacacccggcatggacgccgaactcgcgcaggcgttgcacaaggtgctgcaacagcagggctttgaattccggctttcccagaaggtggtgtccgcacgcatcgacggagataccgtggttctgtccgtcgaaccttcaaacggaggcgctggcgaggagctacgcgccgatcgcgtgctggtatccgtcggccggcgcccatacaccgacgggctgggcctggatgccatcggcgtcgcacgcgaccgcaaagggttcatcacggtggatgcgcagtggcgcacgaatgtggaaggcatctacgcgatcggggacgtgatcggcggcccgatgctggcgcacaaggccaccgaggaaggcatcgccctggccgaacaactcgccggtttgcctggccatgtcaactacggcgcgattcccgccattgtctacacggcgcccgaggcggcatcggtcgggttgagcgaggaagcgctgaaggatgctggcgtgaattacaaagtggggcgttttccgttcaacgccaacagtcgcgcccgggccaaggcccagaccgaaggattggcaaaggtactggccgatgccgagacggaccgcattttgggcgtgcatatcctgggacccgaagccggatcgctgatccacgaggcggtcgttgccatggagtttcacggcgctgccgatgacctcgcgcgtacatgtcatgcccatccgaccttgccggaagcactcaaggaagctgcaatggatgtgggcaagtgggcgatccacagcgcacgttga

SEQ ID NO: 502667 - DNA, 510 bp, Stenotrophomonas maltophilia
atgcgtgagagacacaccgcgcagggtggcgtgccgcgaatgccaatcgcgctgccgtggctcggtgtgtccgccgccgtattggccgtcgaccacctcgccaaatactgggtgctgactaagttgccggaacatacggcagtgcccgtgttcgactcgtggtggaactggtaccgctcctacaacacgggcgccgccttcagcttcctcagctcggccggcggctggcaacgccatgtcctgacgttccttgcactggcggtcgccgcgctgttgacgcgttggcttaccaagttgccacgtcatgcatggcccccggcgcttgcctacgccttgcttatcggaggcgccttgggcaatgcggtggatcgcatcatgcgcgggcatgtggtggatttcatccagtggcattggcgcgactggtactggcccgcattcaatctggccgatgtcgccatcgtcaccggtgccgcaattctggtgttgcaaggcatctttcggcgcggctag

SEQ ID NO: 502668 - DNA, 1248 bp, Stenotrophomonas maltophilia
atgcgaacacacagcgcagtccgagaattcgtggttccagtggggttggctgcgctggctgtcgtgccggcgctgttcctgcgtgtgaccgggagcagcgtcggtgccttgggcgacatggtgctgttcggcatcgcgattctggccgccggcttcctgttgtcgtggggcgcggaggccgcggagaagtacatcgccaccagtttcgtgctggcggtggttgcactcatcaccgtgctgcccgaatacgcggtggacttctactacgcctaccgcgccggccaggatccggcgtccgggtatgtggcctacgccgccgccaacatgaccggtgccaatcgcctgttgatcggcctcgcctggccagtgctggtggggctgcactggtggcgctcgcggcaacgcgggattgcgttgcagatcgaaaattcggtcgagatcgccttccttgcgctggccagcgcgtattccttcgtcatcatcctgaaggaccgcatcggcgtgttcgatttcgtcgtgctgggtgccttgttctgcctgtacctgtggcgcacatcaaaggccgagaacgaagaagaggaagaagacgaagaaccggggccgggagccgtgatcgcgcagttgtcgcccggcaagcgctggacggtgatggcggtgatgagtgtagtggccgcaggcgtgatcctgctggcggccgaacccttcgccgaatcgctggtggcttccgggcgtcgcctggggatggacgagttcctgctgatccagtggctggcaccgttggccagcgaagcgccggcggtcaccatcgcgatcctgttcgtgctggatggccgcgcccgcgccggcctgaccacgatgatcagcgacaagatcaatcaatggaccctgctggtgggcatgctgccgattgccatgagcattggtgccggcgagttgacctcgctgccattggacgcacgccagcacgaggaattcttcctgactgccgcgcagtcgatgttcgcactggcattgctgctgcgcatgcggctgagcctggttggcgccgtggcgttggcggtgctgttcgtcgggcagctgatgctggcgttcttctatcaatccaaccccgagcaggaaatcttcgtgctgacggccatcgcctggctctatctggcgctggcgggcatgctcctggcgcgtgacgcccggcgccttcccgcgctgctgcgagcggcgtggcagacccgtgagcgcaatcatgcgtga

SEQ ID NO: 502669 - DNA, 321 bp, Stenotrophomonas maltophilia
atgaaacagatcaaggcattcgtgcaccgcaaccgggtctccgacctgatccacgcgctggaagccgccggcttccagcgcctgagcctgttcgacatgaagggcctgctgcgcgcgttgaacgcgcgcgagcaggagtactcggtcgagttcggcgaccaggtgatcaacgagatgcagatggagctgttctgcgaggatgaggacgtggcccgggccgtggaaatcttccgccgtgtcggacggacggggcgaccggacgcgggctgggtctatgtcagcccggtggagcaggcattccccatcgatggcatcgcgtag

SEQ ID NO: 502670 - DNA, 3126 bp, Stenotrophomonas maltophilia
atgctgaatcgcctggtcgaattgtccctgcgttacaagttcctggtcctgatcgtgttcgcggtggtggccttccttggcatcagcgccgtgcgcaacgtgccgatcgatgcgtttcccgacgtcaccccggtccaggtcaatgtctacaccgaatccgctggcctggccgccgaggatgtcgagcaactgctcaccaccccagtcgagtcggccttggccggcttgccgaaggtgcaggaaatccgctcagtcagcctgttcgggttgtcgtacgtgtcggtctatttcaaggacgacatgaacatctacttcgcccgtcaactggtcaacgagcgcctgcaggaaatcggcgaccgcctgccagagggttacggcaaacccagcatgggcccgaacacgtcgggcctggggcaggtctactggtacaccgtcgaacgagcgcccggcgtcagcaaggatcaggtcaccgacatggacctgcgcacctggcaggaatggacggtgcgcctgatcctgcgcaccgcgcctggcgtggacgatgtcacctcgtggggcggcggcgaacgccagtaccaggtgcaaatcgacccgcagcggttgtacgcgcgaaatcttggcttcagcgacgtcatcaatgcgctccccgccaacaacggccaggtcggcggcaacgtcatggacgtcgggcgcgagcagttcctcgtgcgcggcctggggttgctgaaatccgcgcaggacatcggcgccatcgtgctgaaatccgaggacggtgcgcccgtgtatctgcgcgacgtggccacggtggtcgaagcgccggcgccacggtttggcgccgtgacccgtgacggccaggaagtggtcatggggcaagcccttgcccgcatcggcgagaacgccaagagcgtcgtggaagcggtcaaaggcaagctcgacgtggtgcgtgccgcactgccgaagaccatggtgctcaagccgatctacgagcgcaccgacctggtcaacaaggcggtggaaaccgccgtgcgggcgctgattgaaggctcgctgctggtggcggtgatcctgttcctgttcctgggcgaagtgcgttcggcgctggtggtgatcgtgaccttgccgctggcgatgctgatcgccttcatcggcatggggcaggccgggctctcggccaacctcatgtcgctggcaggtctggcgatcggcatcggcatgatggtcgatggcgccgtggtgatggtcgagaacgccttccggatcatggccgagcgcctggagcacggcgagaaggtcgacaggacctcggcggtgctggctgcggccaaggaagtggccaaccccatcgccttcgccatcatcatcatcattgtggtgttcctgccgctgttcgcgctggaagggctggaaggcaagatgttcaagccgatggccttcaatatcgccttcgcgatggccggctcgctgatcctgagcctgaccctgatcccggtgctggcctcgatgattctcaagcccaagccggaacgcgatacctggctggtcgcccggatcaagcgaatctaccgacccttgctggacaaggcgctggcgaagaagaaggtggtggtggtcagtgcgatagtggcgctggtagccagccttgccctgttcccgttcctgggcaaggagttcatgccgcagctgcaggaaggctcgatcatgtggcgcgtgacgggcatcccgtcgacttcgctcaacgaatcgatccgcaccagcaacgcgatctcggctgcgttcaagcagttcccggaagtcgaaaccacgctggcgatgatcggccgcgccgagaagggcgagaccgccgacgtcaattacatggagatctacaccgcgctcaaacccgaggaagagtggaagtcgggccgcgacatcaagcagctcgaagcggcgatgcaggagacgctggaaaaggtcgtgcccaacgtagtgcccagctatacccagccgatccagatgcgcgtggaagaactgatctcgggcgtgcgtgccaccttggcactcaagctctacggtgaagacctgcgcgaactcgacaagctcagcggccggatcaagcgggtgctcgacaaggtgccgggtgtggccgatctcgccttggaagccaatctcggcaagccgcagatccgcatccaggtcaaccgtgacgaacttgccctgtacggtttgaacgccgaggaggtgctgacgatcgttcgcaatggcttgggcggtgaaccggtcagcgtcctgctcgacggggtcaagcggttcgacatcgcggtacggctcgacaacagtgctcgggcttcggtggaatcggtgcgtcgcattcccctgcggacggcctccggagcgctggtgccgctctcgcgcgttgccgaggtcagcgtcgccgaaggctactcgttcgtccgccgcgagcaattgcagcgctacgcggtgatccagatggacgtgcgcggccgcgacgtggacggcttcgtcaaggatgccaacgcggcaatccagcggcaggtgcagctgccggccggctactgggtcgagtggggcggggccttcgagaatcaacaacgggccctggccaagctggcgctgatcgtgccggtcacgatcttcttcatcttcgtgctgctctataccgcgttcaactcggtcaagtacgccaccttgatcatcgccaacgtgccgttcgccaccatcggcggcctgatcgcgctggccatcactggccagtacctgtcggtgccttcggcgatcggcttcatcgcggtgttcggcgtggccatgctcaacggcatcgtgctggtgagcttcctcaacgaactgcgtgacaaggggctctcggtacgcgaggccgtcgtgcaaggcaccgcgctgcgcctgcgtccggtgctgatgacggccagcgtcgccatcctcggcctggtacccatgctgctgtccaccggcgtcggtgcggaaacgcagcgtccgctcgccacggtggtggtcggcggcctgatcagttcgaccctgctcaccctcgtgctgttgccggtgctgtacgaatggctcgaaacccgcgccgaacgcaaggcggccggctctacctctcaggagagtgcgtaa

SEQ ID NO: 502671 - DNA, 1191 bp, Stenotrophomonas maltophilia
atgagagagagttcgatggatcgcatccgtttgttgcccctgccgctggccgccgcattgctgctggcgctgaccgcctgctccaaatctcccgacgcagacgcggccaagcccggggccgagactgccaacgccgaacaggcgggtggtgagggtcgcgccgaaggtggtgaagaagccgccgccggtccggtgaaaatggacgatgccgcaatgacggccgccggcattcgcttgcagacactgcagccgtcggcgctcagcgaggaactgcgcgctccgggcgaagtggtggacacgggctatggcacgaccttgatcacgcctcaggtggaggcgttggtcgtgcgccgccatgcgaggctcggtgacgaggttcgcgcgggcgcgccgctggcgacactggcgagcgtcgatgtctccgacgcgcaagccgaactgcgcatcgccgagcaggaatggcgccgggtttcagcgcttggccgcgaagccgtcgccggtcgtcgcattaccgaagccaaagtcgccgtcgatcgtgcccgcgccaaggcgcaggcctacggcttgcccggtacggcgagcggtaatgtcaacggtcagttcacgctgactgcgccgcatgccggccgcatcaccgaagacgacttcatcgtcggtgagcgcatcgagccgggcaaggcgctgttccgtttggtcgacgagtccgtcgtatgggtcgacgccaagctccaggcaggtactgcgccacgcatccgccccggccaggaggcagtggtgctctttggtggcgagcgcctggcaggcaccgtacagcaggcggcccatcgcacctcggacgcaacgcgcaatgccgtcgtgcgcatcaaggtgccaaacaagggcgatctcctgcatggcggtgacttcgtcgacgtgttcttcgaggcgaccggaaacgcccaggtcgacagccgtgccgccacggaggtggccgtgccgaacgacgcgctggtgcaactggctggagacaccgtcgtctttcgccgcaacgcggaaggcgctctggagccggtgccagtgcgcacgggtgaagtggttggcgaccggacgctgatccgggatggcctcaagccgggcgacaccgtggtggtcgcaggcgcgtttgcgctcaagtcgcagatgctcaagtcccagttgggagaagaagaatga

SEQ ID NO: 502672 - DNA, 1284 bp, Stenotrophomonas maltophilia
atgcaccttgttcgttcgccgcgccgacgccccgtcgcgtggctggccatcgcgctgttcgcctgcttgccggcaagtccggcatgggccgcccaagcacccgaggccatggcccctgcgcctctccgcgcggcgcttctgaccgcctggcaacaccatcccagttaccgcgccaccgaagcacaactctcggcggcccgcgcacggctggcagcggcgggtcagccgctctacaacccggaactcgaactgtccggcaacgatgagggcagcgagcgaactaccaacgccggattgaacctgaccctggacctcagcggcaagcgtcgggtacgccgagacgccgccagtgcccatgtcgatcaggccacggccgaggcgcgagtacgacggcgcgatttcgcccggcaatggttcaccggctgggccgatctgcagaccgcgcaacagcgcgtgcgcaccggtgagcgtcgattggcgctggtgactcgcttcggcgaactggccgagaagcaattcgcggccgatgacatctccggtctggaacgcgatctggcgttgctcgcgcgcgatgaagcacaagccgaacaggcccagttgctggccgaacaggccgatgccgaagcccgcttccgggtggtgggcggcacgtcggagtgggtcgccggcacggcgttgccgaccgacaccctgcctgtgccagagcccatcgacggcggtcttgaatccctgccggattggcaggccgcacacgcggccgcgacggccgccgagcgcgaagtcacggtggcgcggcgcaaccgcatcgccgatccgaccctcggtgcctacaccggacgcaagacatacgacttgggcggcccaagcgacaacatcgtcggggtcaccgtcaccattccgttgttcgtgcgcaattcctatcgcgccgaagtggtcgctgcccaggcggatgcggatgtggcgcaggccgacttgcagcgcgtgcaactggaactggaaaccgatcgccgccgcgcctcgaccagttacgcggcatctctttcggcctggaagcgatggaaaggcagtcgcggcactgatgtggaacgccgcgccaacctgctggaaaaactctggcgcgagggcgagttgtccaccgccgattacctgttgcagctcaagcagaccctcgacacccaactcgccggtgccgaactcgaagcgcgcctgtggcgcagctatgccgattacctcgccgccaccggccagctcgaacgctgggccggcctggagggcaccccatga

SEQ ID NO: 502673 - DNA, 375 bp, Stenotrophomonas maltophilia
atgaattccgccgcgtcccgcgccttgctcgcccgcttgcgcgcttccacgcggttggctgtgctggtgctgttgctcttcgtcatgaagattggcgccgccgccgcgtgtatccagcatgatttcgctgatctgggcatgggcgcgaaggcctcgctcgaggccgtggcgaaggtgccagcggacgatggcgcgggcgcgttgaagaagggctcgtccggcgcgtgttcgcattgcagttgccaccacgccgccgtgatggcgccggaaacctccatcagcgtccccctcccgccgcagggtgtcgcggtactgctcgccggcgtgccgcccagtgtcccgtcccgcctggaactcaggccaccgatcgcctga

SEQ ID NO: 502674 - DNA, 2379 bp, Stenotrophomonas maltophilia
atgagcacgtcttgcaacagctgtgatggctcggtgaccacggcgcaacttcctgcgccttcaccccaggctatgcgttatcgcatcgagaacatggactgccccaccgaggaggcgctgatccggaacaagctcggccaagtgccgggcgtgacggacctgcagttcaacctggtgcagcgcacgctgacagtgcttcaccagttgcctgcgctggcccctgtggaagacgcgctggcggcgatcggcatgcaggcggtgcctttggatacggctgtgtctgccgtcgaaacggcgctgcatatcgcgaagatggattgccccaccgaggaaggcctgatccgcggcaagttgagtggcatgccgggggtggacgcgctggccttcaatctcgtgcaacgcaccctgaccgtccgccacgcgaccggcgtcttgccggatgtgctggccgccttgaagtcgctgggcttcgaggccgaagcggtcgccacggccggcggcgcagagttgactgcaccggtgcggacccggacagcctggtggccgttgatcgtttccggtgcggcggcactgctcgccgaggtcgtgtcgtggctcggggcccctgcgtggctggtcattgcactggcgctggtggcgatcggtaccggcggcctgtccacctacaagaagggctggattgcgctgaagaaccgcaatctcaacatgaacgccctgatgtcgatcgcggtcaccggcgcgatgctgatcggccattggccggaagcggccatggtgatggtgctgttcgcgctggccgaggtgatcgaggccaaatcgctggaccgtgcgcgcaatgcgatccggggcttgatggacctggcgcccgagcgggccacggtgctgcaggatggcaaccgatgggtcgaggcggatgccaagacggtcgcgctcgatagccgggtgcgggtcaagccgggcgagcgcatcgcgctggacggcgtggtggtcctgggccgctccacgattaaccaggcgccgatcaccggcgagagccttcctgtcgaaaaggccgagggcgatccggtgttcgccggcaccatcaacgaagccggttcgctcgaatatcgggtcacggccacggccaatgattccaccctcgcgcgcatcatccacgcggtggaggcggcgcagggcaatcgtgcgcccacccagcgcttcgtcgaccagtttgcgcgctggtacaccccgctggtgttcgccgtcgccatcggcgtcgcggtggtgccacccctgctgatggggacggcgtggctggaatggacctaccgggcattggtgctgctggtaatcgcctgtccttgcgcactggtgatctccaccccggtgagcatcgtcagcggactggccgcggcggcacggcacggcatcctgatcaagggcggcgtgtacctggagaatggtcgcaagctgcgatggctggcgctcgacaagaccgggacgatcacccacggcaaacccaagcagaccgatttcgccgcatggggcgaggcggacccaggcctggctcgcgcgatcgcggtcagcttggccgctcgctccgaccatcccgtctccaaggccattgccgtggcgggacgggacgatgcggtgatcgtgcgtgaagtcgaggacttcgccgccttgccgggccgcggcgtacgcggccaggtggcgggtgcgctttaccacttgggcaaccatcggctggtgcaggagctgggtgccagctcggcagcgttggaagcgcatttcagcagcttggaagcacaaggcaagagcgtcgtggcgctggtggcaagcgatggcgtgcaggcgatcttcgccgtggccgacacggtcaaggacagcagccgacaggccattgccgaactgcacgcactcggcgtcaagaccctgatgctgaccggcgacaatccgcacaccgcgcaggccatcgcccgcgaggtcggcatcgacagggcctatggcaatttgctacccgaagacaagctgcgggaaatggaagccctcgccgcacagggcaccagcggcatggtcggcgacggcatcaacgatgccccggcgttggcgcgggccgacatcggctttgcgatgggcgcggccgggtccgacaccgccatcgaaaccgccgatgtggccttgatggacgacgacctgcgcaagattccggccttcgtccggctgtcgaaggccacggcccgggtgttggcgcagaacatcgctctggcgctcggcatcaaggcggtgttcctggtgctcacctttgccggccaggccacgatgtgggccgcggtgtttgccgacatgggcgcgagcctgctggtcgtcggcaacggcatgcgtttgctgaggaagtag

SEQ ID NO: 502675 - DNA, 1971 bp, Stenotrophomonas maltophilia
gtgaccaactccctctgtcgttgcctgctgatcgcgtttttggcttggctgtccttcccggccttcgccgccgcgccgtccgcggtcaacccgcgccagacctggcaactgctggactacgtggccgtcgactatggcgcggccgtgaaatccggcagtgtcgcgtccgaggccgagtacgcggagatgcgcgaatttgcgggggcggtgcgaacccaattggccgcgctgccgtcgacgcccggccaggccggcctgatcgcccaagccgatcagctggtgaccgctgtcgagtccaaggccgacgccaggcacgtcgccgatctggcgcatcggctggccgacggcctgctggccaactatccggtcggtgccgtgccggcgacgccgcccgatccggcccggggggcacagctctacgccgcgcaatgcactgcctgccatggtccggccggccacggcgatgggccggctgcggcgagcctggatccgccgcccattgccttcaccgatgccacccgcgccgcccagcgcagtcccttcgccttgtacgaagcgatttcccaagggatccagggaacggccatgaccggcttctcgtccctgccggaagccgatcgctgggcgctggcgttctacgtcggcagcttgtcgcattcgccgcagatgcgggccgagggcgaagcgctgtggcgcgacgcgccggcctggcaccagcgcattcccacgctggaagcgctgacccgcaccagcgaggcggatctgatcggcgccggcagccaggacacacaggcgcgggccatcatcgcttacctgcgcgggcagccgcaggccgtccagaccgcagcctcgggcgtggcagcagtccaatcgctcgcactggctcggcaacggatggccgagagcctccgcgcctatcaggcgggcgatgccgggcaggcgaagacggcggctttgtcggcgtacctggatggcgtcgaaccggtcgagcccacactcgccgcgcgggacaacgcgctgatgcgtgagctcgaaaccaccatggcgcgctatcgcgatgccatcggccgccgcgttcctgcctccgatgcgacagcgcaggcgacgcaggtgagcgcgctgttcgatcgcgccgaggcggtcttgcaggatgcgcacaccgatcgcaccacggcgttcctgggcagcttcaccatcctgctccgcgaagggatcgaggcgttgttgatcgtgatcggcatgatcgccttcctgcgcaaggccgaacgccgcgaggtcctgccggcggtacacgccggttgggtcggggcgttgctggcgggtgtggcgacctgggcgatcgcgacccatctggtcgatgtgagcggcgccaaccgtgaggtcaccgaaggcgtgtcggcgttgttcgccgcggtggtgctgctcagcgtgggcatctggatgcaccagaagagcctggccgggcgctggcagcagtacctgcatgccaaggtctcggccgcgctgacccggcgctcggcggtcttcctgttcctgctggcctttgtcgcggtctaccgcgaagtgttcgagacgatcctgttcttcatcgcgatgtggaaccaggaaaacagcaccgcgattctgggtgggctggtcgccggcagcgtcgtgttggccggggtggcgtactggatgctgcgcatgagcaagcgcctgccgattggccagttcttctcgatcagttcgatcctgattgccgtgctcgccgtcgtgctggtcggcaagggcatcgcggcgctgcaggaagccggctgggtcggtcaggcgctggtcgccgcgccgcgcatcgattggctgggcgtgtacccctcctggcaatccctgctggcgcagttggccgtggcggtgattgcgatcggtggtttttatttcaatgcgcgcaactcgcgtgtgcccgcgcaagccgtcaagggagaccgcgcgcaatga

SEQ ID NO: 502676 - DNA, 441 bp, Stenotrophomonas maltophilia
atgaagatcagcgaagcggccgaatccagcggctgccatctggaaaccattcgctactacgagcgcgtggggctgatgcccaaaccgcgccgaaccgccagcggttaccgcgagtaccgcgatgacgaagtggatcggctgcgtttcatcacccgcagccgcgacctcggcttcagcctggatgagatccgcagcctgctacggctggaaagcgaccgcacgctctcctgcggcgagatcgatgcgattgcccgcgagcatctgaccgatatccgcagcaagctccgcgagctcaatcgcattgcccgggaattggaccgcacgatcaatgcgtgctccggaggcgcacggggccagtgctcgattctggccaccttgcgggaaccgatgcctgcctcgcgggtcaagacgacagacgtgcgtcggaagcggtcggcatga

SEQ ID NO: 502677 - DNA, 1647 bp, Stenotrophomonas maltophilia
gtgagcctgcgtatcgcgttggtccaggcggactttcccgtcggggacatcgacggcaacgcagggcgcattgccgagcggatcgccgaggcgcgcgatcgctatcacgccgacctggtgctgtttccggaactcacgctgagcggctatccgccggaggatctgctgctgcggccgcagttcctggccgattgcgccgatgccgtgcagcgcatcgcccgggaaacaaccggcatcgcggcagtcgtgggatggccggaagcggcaggcgctgtcgtctacaacgcgatcagcgtgctgcgcgacggcgcgttggcgaccacgtatcgcaagcgcgacttgcccaattacgccgtcttcgatgagcgccgttactttgcagtcgatccggacggcggggcgtgcgtgttcgagcttcacggcgtcaccgtgggattgctgatctgccaggacctgtgggggctggaacccgcgtttgaaaccgccgcaacgggcgcgcagctgattctcgtccccaatgcctcgcccttcgagcgcgataaacacgcggagcgggacgcgctgctgtctgagcgcgcccgcgacaatcaggtcgcgctcgcttacgtcaacctcgttggcggccaggatgcggtcgtgttcgacggcgcgtccttgctggccgatgccgatggccaggtgcatccggcggccatcgccttcgaggaacacgtgctggtcgccgatttcgatccggtcgcacgcacgttcaccccggtgtcctggccaatcgacaccgacgtcggccgcgacgccgtggcctggcgcgcgatcgtgcgcgggttgcgcgattactgccgcaagaacggcttcgaccgggtctgggtcggtttgtcgggaggactggattcggcggtggtgctggcgatggccgtggatgcgttggggagccaccgcgtcaccgcggtgcggttgccgtcgcgcttcaccagcgcgttgagcaacgacctggcggcggcgcagtgcaaggctctgggtgtggcgttgcggacggtgccgatcgacgtcccgttccagggctttctcgacacactgggcgggctgttcgcaggcacgatggttgatgcgaccgaggaaaacctgcagtcgcgcacgcgcggtgcagtgctgatggcgctgagcaacaaacttggcggattgctcctgaccaccggcaacaagagcgagtacgcggtcggctacacgacgatctacggcgacatgtgcggcgggtacgccccactcaaggatgtctacaagaccgaggtgagtgcgttggcgcgctggcgcaataccgtgggcggcgcgccggtcattccgcctggagtgatcgcgcggccaccgacagcggagctgcgcgagcaccagaccgaccaagacaccctgccgccctacgacgtgctcgatgcgatcctgttccgtcatatcgaccaggaacaatcgcgcgaggaactcctggcggccggattcgccgccgccgtggtggacccggtgctggaccttgtgcgtcgccacgaatggaagcggcagcaggcggcgccgggtccgaagatctcgcgccgggcgttcggacgcgaacggcgctatccgatcaccaatgcctatgcccaggcgctctccacgcggtga

SEQ ID NO: 502678 - DNA, 1302 bp, Stenotrophomonas maltophilia
atgcccaggcgctctccacgcggtgatcccttgagcagcgtcgaccgctacctcgaagccgccacccgcgccaacacacggcgcagctatgagtcggcggttcgccacttcgaggtggaatggggtgggcatctgcctgccaccgccgacagcgtggcccaatatttggccgattacgccgagcagttggcgatcaatacgctcaagcagcgcctggcggcactggcgcaatggcacggcgagcatggcttcgtcgatccgacgcgatcgccgcgcgtgcgccaggtgctcaagggtattcagacgttgcatccggccgttgagaagcgggccgaaccgctgcaactgacccagctcgcgcaggtcatgacctggctgcagacggccgcggcgaccgcggaaggtcgcggtgaccgagcggcgcagctgcggcatttgcgggattgcgcgctgatctcgctcggattctggcgtggctttcgcggcgacgagctgatccatctccaggtcgagcacgtgcgcatcgttcccggccaaggcatgacctgctttttgccccgcaccaagagcgatcggcgcaacgaagggcggaccttcaaggtcccggcgctgtcgcgctgctgcccggtatcggcgacggccgagtggatcgccgtggccggcctgaccgaagggcccctgtttcgggcgattggtcggtgggcccaagtgtccgaagacgctttgcatgcgaacagcttcatcccgctgctgcgtcgcgccttcgccgcggccggattgtcggcatctgacgactacagcggacactcgctgcggcgcggcttcgcggcctgggccgatgcgaatggctgggatgtgaagacgctgatggagtatgtcggctggaaagacatcaagtcggcgatgcgctatctcgatggcgccgatccgttcgcgcgcgatcggatcgaagcaggcctggtcttgccggcaccggcaccactcgcgttgccggcgcctgtggcagtcgagccgccgacactctccgtggacctgagtctcgtgttcaccccgtttacgcctcgcggccgcgggccccaccgggcacggcgtttgatcgaggatatctgcctggcgccttacggcgcccagcgttccgacgcagatggcacccgttaccggttgaccgtgccgacagtcgagccagacgtcttggatgaagcgatggcgaccttgatcgacgacatgcatcgcatcgccgacaaccatcgctgtttcctggaggcctcgttgcgcgctggcgatgggcggcattgggactag

SEQ ID NO: 502679 - DNA, 2985 bp, Stenotrophomonas maltophilia
atgacgaccctgcacgagaccgcgtatccacgcctgaaaccggacccgacgctcaaggaactgcaggacatctacacgccgaccgaggccgagttggcctttgtcgcggccaccgcaacgcgacccacggcccaactggcggtgctggtccacctgaaattgttccagcgcctcggctacttcacgcttttggccgatgtgcccgagcgcatcatccagcacatcgcgcagacggccggcgatcgtcgttcggtgccgatcgagcaattgcacagctacgacagctctggcgcgaagcgtgtccatatcgcgaagctgcgcgactacctgcgggtgcgcgtgctcgatcccgacggccgcacctggctggcgacggttgcggaaacggcggccgagaccaagcacatcattcccgacatcgtaaatgtcctgctggaggaactggtccatcaccgttacgagttgccggcgttcagcaccctggaacgtctggcgatccaggcccgcgagcgggtgcacgatcgctacttcggccgcattgccgacgcgctgacgcccgcggtccgcgcgctcatcgatgacctgctggtgtcgcctgacgacgccttcagcggctggcaggcactcaagcgcgagcccaagcgcccgacaaacaaggaggtccgcttctacctgcagcacatccgccggttgcaacacctggccgaacagttgcctgcgatcgacgtgccggtccccaagctcaagcagtaccgggcgatggcgcgggctctggatgccagcgaactggccgaactcaaaccgaccaagcgctatgcgctcgcggcgatcttcattcgcgctcaatacgccaggaccctcgacgatgcggccgacgtcttcatccggctcatccagaagctggaaagctcggcgcagcaacggctcgtggcctatcaactggaacacagcaagcgcgccgatctcctgatcggccagctcaaggacatcctccaggcctatcaggtcgagggaaccgacacgcaacgggtcgatgcgatcggcaacgcgctcgtcaccgaggtgccggtgctgctcgccgagtgcgaggagcacatggcgtacgccggcaagaattacctgccgttcctgttgcagccgtacgccacgatgcgcccgttgctgctcaattgcctggagatcatgggcctgcgctcaactagccatgatgccacgatggagcgcatgatcgcggcgctgcaggcgctgcgcggtcaacgtcgtgagctgatcgaggccagtgccctcggtctggatccggagggcgatttcacctggttgtcgagcgcctggcgccggcacgtgttcggcaagtccgccacgctggccgggcgcggctggctgcatcgcaaatacttcgagctggccgtgctggcgcagatcaaggacgaactgaaatccggcgacctgtatatcccgcatggcgaacgctatgacgactaccgcgaacagttggtggacgaagcgaccttcgcccaggaattggaggcctacggcgaagtctccgggttgccgaccgacgccgcggtcttcgtgcgcggactgcgggaggaactcgccgccttggccgatgccgtcgaccagcgctttccggagaacgtccatgcagaactggtcgacggtcgcctgatcctcaagcgcctgcaacgcacggaagtgtcccgtgccatcgtgtccctcgacggggtgattaccgagcggttgccgccgaccagcatcgtcgatgtgctggtcgacgccgcgcactggctgcaactgcatcagcacttccggccgatcgccggtaccgacagccgcgtggacgagttgctgcgccgcgtcgtcacgacgttgttctgctacggctgcaacctcggcccgacccagacggcacgctcggtgaaaggcttcagccggcgccagatctcctggctcaacctgaaatacgtcaccgaggaaaccctcgacaaggccatcgtcgaggtcatcaatacctacaacaagttcgagttgcccggatactggggcagcggcaagagcgcctccgctgatggtacgaaatggagcgtgtacgagcagaacctgctgtccgaataccacatccgctatggcggctacggcggcatcggctactaccacgtttccgacaaatacatcgcgttgttcagccacttcattccgtgcggcgtgcatgaagcggtctacattctcgacggtctgctggccaatacctccgatatccagccggagatcgtgcatggcgacacccaggcccaaagctatccggtattcggcttggcgcacctattgggcattcagcttatgccgcgcatccgcggcatcaaggatctgacgttcttccgacccgagccgggtcgcccttacaagaacatccaggcgttattcggcgagagcatcgactggggcctgatcgaaacccatctgcacgacatgctgcgcgtgaccgtctcgatcaagctcggcaagatcactgcctccacgatcctgcgtcggctcggcacctatagccgcaagaacaagctgtacttcgccttccgcgaactcggcaaagccatccgcaccatgttcctgctgcgctacatcgatgatgtcgatgtacgcaaaaccattcatgccgccaccaacaagagcgaggagttcaacgggttcatcaagtgggcgttcttcggcggggaagggatcatcgccgagaacatcctgcacgagcagcgtaagatcgtgaaatacaaccagcttgtggccaacatgatcatcctgcacaacgtggagcggatgacccggattctggccgacctgggggacgaggggatgggtatcagcgccgaggtgctcgccgggctgtcgccgtaccggaccagtcacatcaatcgctttggggactacacactcgacttgagccgggagatcgcgccgctcgattattcgagccggatcctggcgaactag

SEQ ID NO: 502680 - DNA, 312 bp, Stenotrophomonas maltophilia
atgatccagaacgtcatcaaggtcaccgtcctgtcgtccagcgttgatgagcgcggtggcagcttcaagaacgatgcgggcgagagcgtggaatacaccacccgcaagcagaaggccaagcttgaaacggcaggctttgcctatccgttcgatgtgcgcctggacaaggggcagcagccgttccccgagggcgaatatgagctggacgtggccgctatggcacaggtcaacaagggcgtgctctcgctgagcaagttcaccgcgctgcgtgcggttcccaaggccacgccgcgtccggcagcgcaggcctaa

SEQ ID NO: 502681 - DNA, 138 bp, Stenotrophomonas maltophilia
atgttccgtaacagtcccttcccttgggtccttcctgctatcggcctcttcgccgttgtcccgaatccggccacgctcgtgctggtcgtcttcgccttcctgcactacgtcatggggatcctgcgcaatggtcggtga

SEQ ID NO: 502682 - DNA, 234 bp, Stenotrophomonas maltophilia
atgaccgagccccttcttgccttcatccttttgggggcagccgtggcagcttctattggctgcgcccgcattgtttcgtggctgctggatcggcgtgactacaccgcctcgcagcagtcccgcgaagcccaggtcatcgaactcgcaaaggctgagattgccgccaccaagcgcggcgatctgctggcagcagcccgcttcgccgaacagcaggagggcatccatgttccgtaa

SEQ ID NO: 502683 - DNA, 669 bp, Stenotrophomonas maltophilia
atggaacagattccggacggatacattgctcgaagggatgcagcgattgcagcagttattgcagcgggtatcggtgtaggcatgacgctcctcaccacaggcgttgctttccatgtctttaaagagaccgggaacatggccgactgggctgccgcggtcgggacttgggtcattggctacggcgcttggaagtacgcgcgcgaagcacacctgctcagggagcgtgaactgcagcaggggacgcgcagggatcagcatctgcatgcgggtcgagttcaggcaattcgcgaatgggcaaagctcatccgtagaccgttcaaagtcacagaagctgcggagaaaaaagcagaagccgggctgactgttggttctgtccaaggagcgacaaggggggctttggctctcctgaagctgataccactggacgatgaggcctggcgctatctgagtaaggacgacgttgagttgaagatccgactgtccactctctcggttctccttgagatgcatgggcaaactcttctggaccaagttgaggcgtcgaaggcaacggggcagattgcaacgatgaaggattccaactggccctccgttcgcaaagcgatgaaagacctcgattcgcttggaatttccctcgacgaggcggcaagcaggattccgcccgtctag

SEQ ID NO: 502684 - DNA, 366 bp, Stenotrophomonas maltophilia
atgcagacggttacagacctcatcgacgcggcacgaaaagcgctgaacgtcagcagcgacgcggaattcgcgcggcagctcggcgtatctcgcggaacgatcgctaactggaaatcaggctattcgctgccggacacggtgatgtgcgcaactttggcggggctgaccggcctgccgcttgcccgagtcttgggcatagttggagaggcgcgtgccgtcagtcgagaggagaaggccgtttggcggaagctagccgccaccgcgatggccctgtgcttggctgttggcttcgccctgccccacaaggctcaggcggcaatgccgatcggttttggtacgtcaccgtctatacattatgcgaaatga

SEQ ID NO: 502685 - DNA, 783 bp, Stenotrophomonas maltophilia
atgagcattgagcagagcaaagcgagtggatcgcggcaatcttcggcggaatggatggccgctcgctttgcatcgttagccgggggtcttgctgtcatatatgcctactcctatctactgggatacgcatatctgacattttactttaccgatctccgcgcggtgtgggcagtggatctatttgatataacgaccattgcccagactccggcagtcgtggccgcattgcttgccacaactcttgccagcctagtgctccacggagaccccttgccggttccacccataagggtggcgggagcactggcgctattagccatagcagcgtatgcaatccacctggcggtcagcaagtggatgaatgaatatacctcttactggagcttctgcgcctttgttctggccttgatatccgcgctaatgggagggctcatatatctcagaaagctgagggattcgctcggtcgcaagttaggcgcatggacgtttgtactctccatgggtgcactcgcgctagttgccacacccgccgcagcaaatattagaactcgagccatcatagattcgcgagcccagtccctcgccatcgtccaatttgagaactcgcaagatcagacctggcgactactgagagcaattagcgggtctcatttgctgcttattcgtgctgccaatggtgataattttgaattccgaattgtagagtcggtccaagtgacttccattggccgtgggcaacccaaagggaagagcgctagcgaaagtcgtccacataaacaatga

SEQ ID NO: 502686 - DNA, 852 bp, Stenotrophomonas maltophilia
gtggccatttcgttctatttcgacggcgatgacgtggtgtggacccaacgtcttgaacgaccagccgtctacctggacaccttcgccattcgcgagatcgcggacagcgacaagctgtcggcgcgcttcgcccaggcgttgaagtcaagcggtggcacttggctcttggcctcgctctccatgggagagttcgcccgtttcaaggacccccgccacgtacagtgcgccgagaggttactcgcccaagtggttccccatatacagctctttatatccgagccaagcgtgaggatgggaacgccgggcgagacggatttggccaggcgctcactgccccgtgccgacgagcgtcacatggactacttttcgcgccgctgggctagagagcaggccttcgcagaaacgtttcagggaatgttccagctggtccaagagcgtcgggaggagatgacggctacgttggacgacattgcctctcagctagtggcgtcgctgttccatcaccgacgggtagaagcctaccgacgcaaagctaaagcgtcgcggccaaacgatggacgaacccgccggcaggtcattatgggcgatctactgcgggagttggtgctagacaccaacgcgtccatctccaacaacgatgcgctggacctgatgcacgccgtggatgccgtggaccactgcgacttggttttgcttgacaaggcatggcagcggcgcgtcgacgcgctgcgtcgacgtattgctcaatcgggggttgagatgccgatcgccgcctgcttctcgaagagcaacgatgggattggacgatttctggattcaatcgaaaggtggacggagcaagatggcgtgtaa

SEQ ID NO: 502687 - DNA, 996 bp, Stenotrophomonas maltophilia
atggtaattgccgagaaccacgacggacatgtttacaactggatcatgtttgagcgtgaaacagtcgaatttgtactgcgcgctattgacttctatgtatcactacttggcgatgagtcgcgcgagcttgcggaggacccggatctcgcgagcttgatcacagacgatacgcgcagagaacttggtcttgggcgtgataaggagcgagcaaaccgtcttaggcaatggatcaagagcaaatcggaagagagcggcgattcctaccatgtagacatctccatgagccatggtactgtccgcttcatcaaggcggtcagccttctttaccttgcaaagctaaagacgaaaagaaacaggctggccagtcggcccaatgtaacgacttcgactctttcggcattggaccgtgaaatatccaggaaagaagagctcttctcttcctctggcgtgtttaagaacgcgtctcctgttcaactacttgcggagtacggcgaagcacccggagccgaggaagcggtgaccccgccgcagcccaatgaagaaatcgccctccttaccgcgtcgaggccacgcccggtgctcgtcggctccatcgaaattctggatcatgagctgaggaggcggtgcttggacctgttcaaccagttccaggaagcgggccaatccgagcgcaatgatacagtcgtctcagaagcatcacgcattctggaaagccgccttcgagcggtgacgggatgtaccgatgggagcactggcaagcaactggtcactcttgcatttaatggtcagaaggctaagctgcgggctagctccgtgccgtcggagcaagaggccgcgcaacttctctttatgggcacctttggcttcatccggaaccaggttcagcacaaactcttgggcagccttcctgccgagcgtacactgcagatacttggttggattgactatcttttggcagtcatagagcaggcggaacgagtcgcagattctccctaa

SEQ ID NO: 502688 - DNA, 645 bp, Stenotrophomonas maltophilia
atggacttcgacaacctgtttgagcagtccaatgccttggtccacgacatggtcaaggtgatcgataggccgctcttcgatgacagccagcggatccatgtaagtgatcttctgtgttccctgtccatggagcatggcgacagtgctcgtgcactcctgcataccggactgttgccctccgccctagtgatccaccgggcgcagtttgaggccgtggtgcgggccatctggacgctctatgccgctaccgatggtcaactggctaagctggtcacggaactgacgctagataccgaacgggcggccaagaacctgcccaatgtctccgtgatggttgaggaactgggcaagaaagctccgcccaattcggtgacgccgctgagggaattcatggtttacaactggaaggccctgaactcgtacacccatgcaggcatccatcctttgcgccggcaccaggacggctatccgatgcagctagttgtggacgcactaatgaacgtcaatgggatgttcgtcctagcagccatgcaggcctctactctcacgggcataccgaacctgcagtgcaaggtattggacgtggctgcacgctatcccatggtgctgcgctccgctgactctaaccctgataggcatccctaa

SEQ ID NO: 502689 - DNA, 387 bp, Stenotrophomonas maltophilia
atggatgctcttgaattgaagctcatcgatggagcatccgttcagtacggcgacgcggccgatatcgttcggttcatggatccatctgtggcatggcctggccgaagcgcagcgctgatagatcggagtctgttcctggagtacctgcaggccaatcagttggtcgccatttgggctctttcgggggataagggagtctatggaacaggaggagcgcatggatttggcggcaggtggacgttcacccaaatcttctattccaaggccgacgagctgacaggcctggcccgctatgagacccatgagaagcccagttcggagcagttgcagaccctgcgcggccgcgaacagggcctactccaagagctggtggaagatgaagactga

SEQ ID NO: 502690 - DNA, 3843 bp, Stenotrophomonas maltophilia
atgacgctccccgacgttgacttcaagctcatccgactgcatcggggaagtcgcgaggatgcctttgaggaactgtgctgtcagcttgccggggaggaggagctttctccgcccgtcgtgcgctttgacaggaagggccgcggcgcagatggcggagtcgagtgctttgcgagtctttctgacggcactgagacctgctggcaggtcaagtactactgggaaacgaagccagcactgaagtcattggacgaatctctcgaccaggccctgtcgaagcaccccaagatgtcgcgctttgtggcatgtctaccctttgatctggctgactcgcgtaaggatggcgtaaagactgcgctgcagctgtggaccgaatggaaggagaagcgagaatctcgggcgaaagaatcgggaaggaacctgttggtagaacgctgggatgcgcacgaactgaagaagaggctgatgggatcaagtccctctgctgccggaaagatcgccttctggtttgatagcactcttctctcgccggattggctggaacggcaattcaagcggacgcgggctgagctgggtgagaggtacagtcccgagagccacatcgacctccccattcgacgctccatcgacgcagtttcgctggattctcgcctctttgaccagctttcggtgatggctggggagattcgtctcacgttagcgagtactgatcagagcaatggcgctgcagtcctcgcttgcgaggcggcgctcgctgcgttggatggagctcgatgtgatcgcaacgctaaggctgtcgaggagctgagggcgcggctggctagcgcaaggagtgcggtcgccatctggcatggcgagatgatgcatggccaggaagttgacgcagaaggttttgccaggccgacggccagtctgagggcgctatcgggtctggtttcggctattcgagttgcgagccgggagcttcagcaggatcactggaaccttgttggcgccagatcgctgctggtggtcggtgacgccggatcaggcaagtcacatctattggcagatgcctgcgatagtgcgctgaacaacgggcgtcctgctctgttgctgctcggtggcaagttagcagacgccgagccctggggagagatgctgaaggggcttgatctggcgggcagtttttcctccgcaacgttcctgggcgcgttgaacgctgccggcgaagctgctggtgcccgggcgctactgattgtcgacgcattgaatgagggaaacgggcagagaatctggccatctcgcctggccgcgctggcccacgacgtggctcgctttgaatgggtggcgcttgttatgtcctgcaggaccggctacctggacatggtggtgcctgcagagttggatgcgcgcgcgttgccaagagttgagcaccggggattttccgttcgccaggctcgcctgtacctgcagcgtcgcggcatccgtttggccgaagagccgagtgctgttcgagagctggagtcgcctcttttcatcaagatctgctgcgattcgctgaatctggatggacaggatgcactgaagagttcgctgggaggagtctcggcgatctttggcctctacactcgagccgttgtcaagaaagtgactctgaagatccgttcgaatcccgcaatgcgtcgggtcgagaaggccattgccgccttggtggatgagatggctgatgttggcaacgagctcattgatgctgatcgtgcctattgcctcgtttcgcctccgggcggagcgcctgtggatgtcgatcacgacgtgcttttccaactccagagtgaggggctcctggccacacagccattggatgggcatgagtactatcgattcacattccagcgtgtgggcgattaccagattgcggaaaggcttctatcgcgcagtgtgaaagggggtgatgtagaggccgccttctctgcgagcactcctctgagagctgcactcttcgatgagtcatcgatgatcgcgcaaggtgttcttgaggccttggccgtccagttgccggagaggtttggcgtagagctcctggatatcagtgagctgggtggagtgtggggacgcgagcccgcgtttcgagcaagcatcctggccagggacatggaggcgattcgcgaacgcacttgggagctcattgaggaggtgggcggaagcaacctgaggtttgaaacgatgatctcccttgcgtccgagcccggcttcagtcgcaacgccgaggcgctccatgctgaactgtctggcttggcaatgcccgagagagacgctggttggtccttgcaccttgcagatccggatgcaccctcagatggtgggcatgcggaacgactcatcgattggcttctgctggcaaaccaggatctggttcagcaagagcgggcagcgctggcggcgctgcagttgtgctggttcttcacgacctcaaatcgatcggttcgtgacacggcaaccaaagccctcgttgcggtccttgcggaccgcccgggcttggccttggagctgtggcggcgcttccaggatctggatgatccttacgtcaccgagcggattgcatgctcgatttatggtgcagcattgcaggggcaatgggcggaccaggatctttccgctgctgtcctttccttgcacagtacggtattcctgtccgcgaatttccttccgaacgcgctcactagagaccatgtgtcagggctcgtaggttacgcagatagcaggcggtgcttgcctgccgggctgacggcgggctcccctcttgctgctgttcgcagtgcgtgggctgatgagtatgtcagtgatgctcagatcgccacgtacacccgaacatataacaccgggcacgtccataccgacgagattgtcggatcggctgtgaatgatggtgacttcgcgcgataccagattgaccgtgcattggatgcgtggagtgcaacgccgctggatgaagcgacgtttcttaccgtgggagacgtgcagagtcggtgggaggtccagtttcgccaatcggcgtcaccggaggcccaaaaggcctatgacgagctacaggtggtgctgcagcaagcgcagcagggcgctcactgggagttccgggatcagatagcggcggcaagggctgtgttccttgcggctgcgggccagcgtgcttatgacatatggtgcgccgaagcgtctccttggtggcagcaagggacgttcggtggttctgtggcgaaacgggcagggcaggcggctggcttcaacctgcgctgggcccgaatgtgggtctgtaagcgtgctcacgatcttggctggagcgaacatcttcatggcgcctttgatctatcgaccagaagcgaccgccataaccacaaggtcgagcggataggaaagaagtaccaatggattgccctgtatgagctgtgcgccagggttgcggacaacttcaaggcaatgccgagccaggagttcgcagcgcagcgcagtcgtcttcgcaatattgatccgtcgttgttgatttcacagacaggcggtgatggtgggcaagccagtggggacgggtgtttctggattccccgtggacccgatctcgcccctgcatccctcgatgagtccgtcgaatggctggttgaagagcaggatgttgtagcgggattggagaacatcgaggtcacggacgatcgcgagaatcgaaggtggttggtactgagcggtttttctgactggaaaggagagagtgcagtcattcggcgcgatacctggcgccgcatctcgtgcatggtagttcgtgcccctgatcttgatagggcccttgcgctgctcggagggaaccacttccagtga

SEQ ID NO: 502691 - DNA, 297 bp, Stenotrophomonas maltophilia
gtgaacgagcaccggctgagttccggcgacaatctagatgcctatttcaccaacgggcgcgagagcctcgcggtggaggtcaaagccagcaatgccagcgacgccgagctcatgcggggcatctaccaacccatcaagtatagggctgtactgcgcgccgagtgcattgcgctacgcaagctagccctgtgcgatgctgtgctggtgagcacccggcaattgggcaaggcatgcagggccttggccaagcgctcacatgtggacttcgtgcgtgtgccggcggaagcggagaagtga

SEQ ID NO: 502692 - DNA, 261 bp, Stenotrophomonas maltophilia
ttgtatggcccggccgtaggagccgtgggcttcgccatccaggagttgggtgagcagtggggcgagaagatcccgctgctaaaccttatcgtcgtccacgccgacacccgactacccggtcatggtgcggatggagccgcccactactacttcgacgacggcggggcagggatggctgccaatcgcaaggcctacgttcaagccgccatggctgcggtattcgactacgggctgaagttggaccgggtggcccaagcctaa

SEQ ID NO: 502693 - DNA, 1062 bp, Stenotrophomonas maltophilia
atggaccgacccgtagcctcgcccactctggaggtctccgccgcaggcggaggggagcccggcgatcttgccgaggacctgtccgcagcgccgggcttcctcgccgaaggcagcccgcgcggcgtgctcgagacggccttgacgcgcgtgcgtgcgggggagcacgccgtgctcgcgctggtgctggaaaccgatggctccacctacgccggtgccggcgacatggtgctgttctgcaacggcggccaggtcggctggctgagcggcggatgcctggagcccgagctcgcgcgacgcgcggagcaggtgagcgcggcagggcgggtcgactggatcgagatcgacacccgcagtgacgacgacctgttgagcgggtccgcgctcggctgccgcggccggcttcggattgcgctgctgccgttgcgtgccatggccggcctcgacgacgtcattgaggcttggctgcgcgagggcgtgtcactccagcgcgaccttcgcacgtcggggcaggtcgttttccgtgcgggccatcgcgagcaggcgtggcagctgcatccgatggagggtacgcagccctttggcgagggtgcgtggcgtttgccgttgccccggcttccgcgggccctggtgttggggggcggtcccgaaacgcccttcctggttccgctgctgcgcggcctggggtggcgggtcagcgtggccgaacggcgagcgcgctgggcctcagccgggcagtgcgcggatgcgcatcttcagaccagcccggccgaggcccttcatggcgaccggtgcgacgcggcactggtgatgcatcacgatttcgaactggaccgggagacgctggtggccctggctgataccaacgtcgcgttcattggactgctgggtccgcggcgaaggcgcgaggacctgttcaagctgctgacaccggatcagcgccaccggctttccccgagacttcgatcaccggtcggcctgaacatcggcggccgagggccggaggcgatttcgctcagcatcgccgcacagctgcagcaatggcgaagcgcgcacggcaggtga

SEQ ID NO: 502694 - DNA, 1140 bp, Stenotrophomonas maltophilia
atgtccctggtcgagtatcgccgcaagcgtcgttttgaccagaccaaggagcccgagccgggcaaggcgctgccgaaaggccagcgcgccattttcgtggtgcagctgcatcatgccagccgcaggcactatgacttccgcctgcaggttggcgatgcgctgaagagctgggcggtgcccaaaggccccagttacgacccgaaggtcaagcgcatggcggtggaagtggaagaccacccggtggactacgcggcgttcgagggtgatattcccaagggccagtacggcggcggccatgtcgcccagtttgaccacggtgtatgggccacgcagggcgatccggaagcccagctcgccaagggccatctgcgcttcgagctgttcggtaccaagttgaaaggcggctggcatctggtccggtcgggaaagcccgcgcgccagccacagtggctgctgttcaaggacgacgacgaatttgccagcgatatcgaggcagacgatctgctaggggacgtcgctgaagcgccaccggaggatctgaagcgagccggcgccggcaaggccgggaagaagcggctgacggcggtacctgccagacgcgcccggcgaaagaactgggcgaagaaggccctggcgctcagcaaggcgaaaagggcggcagcgccgtccgggccgtttgagccgcagttggccaagctgggcgaagcgccgccccagggcgggcagtgggtgcatgagatcaaatgggacgggtaccgcatccttgctacggtggctgagggcaacgtgcagctgtggtcacggaacgcgctggaatggaccgccaaacttcccgaaatacgtgatgcgatcgcggccctgggcctgaggtcggcggcactggacggcgagctgatcgccggcgccggcaccaaggaagacttcaacctgctgcaggccacgctttccggcgagaagcaaggcgtcctgacgtatgcgctgttcgatctgctgcatcttgatggcgtggatgtggccgatgcgcccctgcttgagcgcaagaccctgctgcaatcggtgctggaggggcagggcagcccattggcattcagttcgcatgtacagggggatggcgaccaggcctatcgtctggccggttag

SEQ ID NO: 502695 - DNA, 492 bp, Stenotrophomonas maltophilia
atggaaaacggtcaataccttgcctcgtgcagcgacgaggcgttggaccacctgctcgcggattgccaggcgctgttggcccgctaccccgacaatcgcgccgcattgaaggctttccttgcctctgcacaggccgggaatatccagattgccgcctatgaccgcactgctacgcactttgtcgcaggatcgctgacgtattcggagagcctttacgatctcatcgcgtttcttgccgtggcacgaggcgccgccgacttcctgaaggggggcgacgaaggcgtggcactgatccacgactatctctgggccgaggaaggtgagcaggagacggttgctgcgattgggctggccggccccggggaatccggattcctgtcatccgcagacctggatgccgccaccgagcccttcgaaacattggtggaggccatgctggaagccgaggacgacccggagtttcgtccgcgcaaccagcttgatcggctttga

SEQ ID NO: 502696 - DNA, 270 bp, Stenotrophomonas maltophilia; identical to SEQ ID NO: 494088

SEQ ID NO: 502697 - DNA, 234 bp, Stenotrophomonas maltophilia
gtggagttcacgaagggtttcgagtacgaaagcgtacaggtgatagtggagcgggtaatcgaacgcagagacctgcttgactatgtacgcacaagccttttcgctagggaaaaagtcaaagcgggccagggtaagctagtagagtcccatatccatctgacggcgagtcaccggttacttggagccgacacgacctccatgcacttactctgcgcatacgaaaaagccggctga

SEQ ID NO: 502698 - DNA, 1047 bp, Stenotrophomonas maltophilia
atgcatacattcaaaaggaacgcgggcgatgaatccgcctgcgcatcaagggttggagttcgtctccgaacactggttgcagcaagtacttggctacacattgcgctgccaattgggcttggcctgcctccatccgcgaacgctgcaggtccggagacggttacctacattcataccgacgcccttggctcccttgttgctgagagcgacgccaacggcaacgtgataaagcgttatgactacgagccctatgggaccctggtaggaggacaggtcaccgacggacccggatacacagggcatgtgagcgactcgactacgggcttgagctacatgcaacagcgatacatggatccggagctgggagtcttcctctcagtggacccggtctcagcgtatgaccagcctgtaggccagttcaatcgctatcggtatgccaacgggaatccgtacaaattcactgatccagatgggcgaaatccagccctgccattcatctatggcgcgatagcggggggcctgtccaatattgccatccagaagctgatgaatccggataaaccaatcgatcagacgcaggcattgatagcagcaggggtgggttcggtctcaggcggcgtgggcggtatcgctgtcgcagccgtggagtctggagtgatttctgtcggccgagccgttgccattcaagcagcggcgaatttcgtcactggcggcgccggtgccgccgcagagagcgccctcaagggagagccgatttccgctggtggagtgctcacggcagcgaccggaggcgctgttggtggtctggcaggttccggtgttgcagctgcagcaggcgacttcgcgggaccagccgccaaaggcgctctgaataggctgagcagctccgcatctcccggcgccccgaacatcgcctccaccaccgcatcaacaggagtcgcaattcctcgtcagtcgatcacacaagcgggagcatcacagctagggcagagcaccgccggagccgccgtagatgcggcacaaaagacgatggagaagaagaagtga

SEQ ID NO: 502699 - DNA, 429 bp, Stenotrophomonas maltophilia
atgaccaaccgaaccgccatccatccccgcctgcacgcgcttatcggcgacgtcgcagccgacgtgcccgaagaccttgcgcgtgagatcgaatgcgctctagcggagcgactgctgccgccttcgcgcccaacgttcctttcctgcctcgatgccatccgcgccggtgatgaccaagccgggcgcgcatgtaccccgcagacactcagcgccacaggcttcggctcgctcgaccgctcgctggccgctttgaatgccgtactggatctactgcatgccgccgaacgtgcgcgcctggatggcgatccgcaggatcaactcggtgacttccatcgggacggattgatcgttgccgcacgccagatcgcgcgcgctgcacaggatgggctaggccatgccatgggattcgcggcaggaagacctggctga

SEQ ID NO: 502700 - DNA, 492 bp, Stenotrophomonas maltophilia
atgcagaacacacgtctcctgctcggtcgtcgctccagcatcggcctcagctatatcctcaccgccgtcgtccatgaccgcgcgccgctcttcaccaacgccgcagcggccgccttggcagtccgcgaattccagcgactggatcaggaaggcttcacccgctcgattgcgtacgtggtcatgcccgaccacatccactggctggtcgaactacgtgcgggaacgctggaaaccgtcatgaagcgtttcaagtcgcgcacagcccagcaggcaaaccggttgctggggcgagtcgggcgcttctggcaggcctgctatcacgatcatgcgatccgctctgacgaatcgttgcaccggcgtgcgatgtacctgatgggaaatccgatcagggccggactggcgacgcggcttgggcaatatccccatgcatggtgcgaatgggagcttggggcttcgtgtgatccgctcgacaacttgggcgcggatggatag

SEQ ID NO: 502701 - DNA, 1050 bp, Stenotrophomonas maltophilia
atgataataaacatcacggaagaatccaaattcaccccggacaaaatcaacatcgaagccctagataatatcgcctatcaatgtggcgcgggcaaccacattctaatgggaagtcgagaactactaacaagaatatcagaaactccaggactggaaagaaggacatccgctctaattcgagcatcatgccagagaatgacgcagcagggagcactccttaacgggtccccatggaggctcgacattgacgcatccaacacatcgcgaagcattccacatcttcatcttttccaaaacccagactactgtgaaaaatcacaaattttaactgaaaaccccgacgacgcagccactattgttgcgctagccaagacgtacattgcccacacccttcgtggcaatagaatatctattcggcacaacaacggcggcggcagcactatcggaagaacattaaaatcaataatggactccccttccggatgtacaatttgcatcgttgactccgacagaaaacacgaaggcgctgcgacaggcgggactgcaaaagcggggcaagccgcttacaagaaagtgaaacagaaatggcgcgcaaattttcatttgatcaaccaaagggagctggagaatctaattccccatgaccttctccagcactgcgtagacaaatatgcaccacacttgtcagacgtcacaaaggcgatccaagagacgaataaattttatgttgactatttctgcatgaaggctggagacagcatgtgcagactaatctcgtcactaatttcgaagcggcaactaaagaggctatcgaaggcaacccagtgtagcggaggtcccatgcccccaattattccttgcggaacctgcatctgcgatggacagtgtcgagagtctccaggctttggcacaggtctactcggatgggccgcaaccgagatggaatcaggtgcattcacttccaaccctgatctttggagagacgagctaactgatttagttagaaaggtagccttcacaggtttggccacacaaccctttagggcctaa

SEQ ID NO: 502702 - DNA, 1584 bp, Stenotrophomonas maltophilia
atgatcacatcgttcagagttagaaatttaagatcgattcgcgactcctccgacattgaactcgcaaaaatcacggtccttgtcgggaaaaacagcgcagggaagagcactcttctcagagtgctaccattgatacgccagagttcagaacgccccactaaaggaccacttctttggtacggacagttcgttgacttcggaactttcaagaacgcagtcaacgtacacaacccaaaggatggagtaacaatcgagttccagctctccatagatggaaacattggaaagaagaacacagatgagctggactattttgacattattgaatcaaccagcttctattctgacctcaacgacgtaaggattcgacttaccatcggccaaaatgaagctgacgaaagtggaaaagcacgcagcattactctaaatactggcagcgacgacctgacagtccacttcggggaaagcggacacggagagaacactacagtagtccttaacggacgattgatctccctccctgaaacaaaacgatgggcaagacgtcctgggaaaatcataccgatacccgttctattgaaagaatcgcatttcgagactaacgggaaacggcacgtatatcacgtcaaagatcaacgcccattctcagaagaattggcggagaaggcatctattctcctgatggaaggactccgctcagaaaagccaggcgagcttctagatagattgctttatgcaagcaaagagggcttctacaaacaaatcgttaaactactgaaattctcgccagatctaagcagaataattaaagactacaaaccaggagacgcattcatatcatccctacgggaactcacattactctcaaacatttcaggaatcctaaatagaattgacaatgaaatcgcaagcttcgctggaaatgtcaggtatatagaaccactcagagcaactgcagagcgatattatcgactacaggatcttgctgtagacgaaatcgactcaagaggcgagaacactgcgatgttcttgaattcactgtcatacattgaaacattaagactacgacaatggatgaggaagagccttggatttcacgcccacgtcacttccgaaagcggccatgtacaagtattcattaatgacagcgaaggaaatgataaaaatatcgcagacttgggctttggctactcacaactcttaccaatcatacttcagatatggcgagcgcaatattcacggaatgcaataactgggagaagtcggccgattatagcgattgaacagcctgagcttcacctacatccgcagtttcaagcccaaatggcggacgttattgccggcgttgctcaagccgacgaagaggggccttcaatatttctggaaacccacagcgaacacttaatcaaccgcttgggcgaactcgtcggcatgggccgccttgatagagacgcggttcaagtgctcgtagttgaccaagatgaaaccggcttatcctctgtaacacgcgtcagtttcgataaggacggattccttgacgccaaatggcccagtggattttttgtaccggaattcaacagatga

SEQ ID NO: 502703 - DNA, 1062 bp, Stenotrophomonas maltophilia
gtggatggcgaggcacgcagccatgacgcagcgggcaataccaccagtattggcagcaaggcgttcacctacaacgatgccaaccgcatgaacgcggtgaagcagggtaacgccacactggagagctacgtttacaaccaccgcggcgagcgcgtgctgcgtaccccggccggtggcgcggctcagatcaccctgtatgacgaggcggggcaatggctgggcaactactcggccacgggccaggcgcagcagcaggccatctggttggacaactatccggtggcgctgctcaatgtgccggttaccggcgtgccggcactggcctacgtgcagccggatcatctgggtacgccgcgcgtggtgatcgatccggtacggaatgtgtcgatctgggagtggaacaacaagagcgaagtgttcggcaaccagatcccaagtgccgatccggacggcgatggtgtggccttcgaactggcgctgcgtttcccgggccagcaggcgacggacgcgagtgggctgttctacaactaccagcgcgagtacgacccggcgatggggcggtattcgcagagtgatccgattgggttgaattctggcgtcagtacgtatggctacgtgatctcgaatcccacccgatttactgatccgctcgggctgacgactacgctgataacgacatataatttcggtactgcaaaccactcggcgattcatgtttcgaggcctggaacgcctgatttcctgtacgacccttccggcacttacgcacctggtggccgtcgaggaacaggcgggctatttgaggggcgcgacgccagcttggccagctacaagaagtatcaggtaggaactggtagtcgaggtgtttttacagtaattcctttgactcccgagcaagagttgactctcattgcgaacgcggaggagtggggggatgcgcgtggattctggtgtgcgagccatgtgtccggggcgttgggcggaatgtgtggaatcaagcaaaccctcttcccaggtgttcttcaaaagagtgcaaaggcagcggaatgtccagtcaagtaa

SEQ ID NO: 502704 - DNA, 696 bp, Stenotrophomonas maltophilia
gtggctgggcaactactcggccacggccaggcgcagcagcaggccatctggctggacaactacccggtggcactgatcaacgtgccgagtaccggcgtgccggaactggcctacctgcagccggatcacctgggtacgccgcgcgtggtgatcgatccggtacggaatgtctcgatctgggagtggagcaacaagagcgaggtgttcggcaaccagattccgagtgcagacccggacggggatggtgtggcgttcgatctggtgttgcgattcccgggccagcaggcgacggatgcgaatgggctgttctacaactaccagcgcgagtatgacccggcagcagggcggtactcgcagagtaatcccatcggtctacttggggggattgcaagctttgcgtatgctggtgggaatccgatttcacagtccgattctcttggattgtgcgaagacgataatggttctgatgctcccattcatcaaaagacatatggcaagtacttcaagtcatgcatgtcctacgttcagccgccgacatggttgactttgccggtgtctggtgcgtccgttctgacgttgtttgttgaagtgccctttgttgccggtgttgcaacagtggggggaggagcgctggcgagctatgaggctggagccgctatcgtctgcgctatggctggaattcaaactctgcagtga

SEQ ID NO: 502705 - DNA, 504 bp, Stenotrophomonas maltophilia
atgagaatccgctcgctgatggcagcgctgcgaggcgcagggctggtcgcgcttgggatgggcgcggccgcaagcgcatgcgcggcagaagtgctggtcacggcagagtttgccccgtcagccctggacccgggccggatggtcttccggaacacgacgccgcgcggaacctactgctcgtggcgcccagacttctgcacggcggatggcgcctactccatcgacgttccattgcagtggagcaaaacccacgagtacgacagtgatatccgcaagcgcttctatcttggattgcccgctcctcgggctgtcatgttgcggaacaccactacgggcatcgaagcggaagtccggattgcgatcgcgactgtcagtggtcatctgacgccaggaggtacaagcaaccctgtaaacacagtggaggtgttggggggggtgcagctacgttcgtaccggcggaaacgggtcgttcgtcatgttcggatggactgtcaaaaaccctga

SEQ ID NO: 502706 - DNA, 639 bp, Stenotrophomonas maltophilia
atgtcctggttcggtctgggtcttctcatcacggcaccttcgcccctgtctctgaccgacggaatctatgaaggcgagttgacctacactgcgggaggcgcgggcagcgacatcgactttggtgatgacgtcacgaccgaaccgatcacgttgaagttccgcttcacggtgtcgcaccagttccaggtacgtttcccaagtgacaatccgcaggtgcacttggcgccggaggcaggttgggtgcaatggaccgatcagggccgtgccccgacacgcctctatcaggagctgccattccatctgaccagctcgatggacttcagcatgaagctgcgctgtgagcacgacgcaggcactcgctgcggcattcgcaaccacgcacttggggaggttgtaccggtggatgtggacgtcaccctgcccggcatgcgcaatctgcgcgatgggcgcccggcgcaggatacaccgctgtcgcccgacgacgcacaggcgccgcgcttcacaccggatggctatctgatgcagcggcggtcgaccttgcggttcaccgcagggcgggacgccgtaacagagatgctgaaggcgccaggctcacattgggaaggcaacatgaccgtggtgtttgacgccaacccgtag

SEQ ID NO: 502707 - DNA, 582 bp, Stenotrophomonas maltophilia
atgttggaagcgctggctgacgtgtaccagcttgcttccaagagcgatcacgtgcggcgaatgcgctacgagcaggctcatggcgagaagaagctctacgaccggatgctagccaccgacctgctggagccgcacgaccgggcgatgctggaggcgcgcttggctgagtgcttgacgcgctatcagcctttgcatgaagagttccgcaggggtaagccttcccaggccgatcacttcatcgcagcagggctgccggaactgattgggccatacacgatgctatgcagcttcacccacagcgatctgactgcgttggcgctccggcaccaaggcgagcgcgggatgatccttcgcgcgcccgtagcatacgacgtgttgttcctcgtcctctcgctcgccacctactcgctggtccatgctgcacgtgcactcgaagcggtggtctacctacccgaagggagctacgaccttcacatggcgaggctggaagcgctacaggacgaactcatggttctcaggcccgaattgccggaggccgaccaggcaaacgaaagccgcccggaggcggctggtgcacagtga

SEQ ID NO: 502708 - DNA, 315 bp, Stenotrophomonas maltophilia
atgacacgcgccaacgcgaaaaccgccaccgcgctccccgcaattcacccgggagagatcctgtccgtcgagtttctagccccgctgggtatgtccgcccgcgctctggcccatgaaattaacgttaccccggcccgcgtttccgacattatcgcagggcgtcgcggcgtaactgccgataccgctttgcgccttgggcgctactttggcacctcggccgaggtgtggcttaacctgcaggccaactacgacctggtgacgaccagtgctgagttggccgatgtgatcgacgaaatcacccctcgggcggcataa

SEQ ID NO: 502709 - DNA, 279 bp, Stenotrophomonas maltophilia
gtgataaaaacgtatggaagtaaggataccgaacgaatagccagcggtaagaaggtcaaacctctggcaggtatcgagaggcagattcagatcaaactggtgtacctgaatgctgcggtgacgttacaagatttgaagtcaccgcccggcaaccgattggaagcgctgaaaggcgaccgagctgggcagcacagcatccgcatcaacaaccagtaccgcatctgtttcaaatggaaggatggtgacgcctacgatgtagaagtcaccgattaccactaa

SEQ ID NO: 502710 - DNA, 678 bp, Stenotrophomonas maltophilia
atgaacactaccgatcagctccccatcccagttgtccgggtgtcgcccacaggctgtgccttcaccaccagcaccgacgtggccgcattcttcgacaagcgccacagccatgtgctgcgcgccatagagagcctgttgagcgacttgagggagcagtttcagttgcaaagccaggcgcaggtggatgaacaatcggacgctcaggaccatcagcccaaaattgggctgatggtccccgaggatttcttccaggcggcagaggtggaggtcggcattggaagtggcgccgtgcggcgcgatccgatctacaacctgagccgtgacgggttcgccctgttggccatgggcttcacgggcaagcaggctctcgcgttcaagctgtcctacatatcggcgttcaacgcgatggaagctagactgcgccagccctacgtggctcccttggctgaggatctggagttcgcacggggcctgcgcgtgaaagacaagctcatgctccacgagcaggcctacaaggcctcccgtgcattgagcgccgccatcaacgaagacgaacgccgccaagcttattggcagctatatcaggtcaacacgaccctcggtgtcccaatgcccaccatggaagcactgggggttgagccgttggcccccagcagccgcctgcctcagccgcgctga

SEQ ID NO: 502711 - DNA, 1491 bp, Stenotrophomonas maltophilia
atggcaacccaatcagacatcgcggacgtaatctctcggatcaatgatcgttgggcgattccgaaggccagaaacgggcatttcggcaatgttctgaaatcgctgactatcaacaacgtccgcggtgtaaccgagaagattgagttcacctggccggtcactgcaatagccgggaccaacggcagcggaaaaacgacgctgctgcaactttgttccgctgcctacgtcaaggaaacaggcgggcgcgtctacaagattggagactgggtgcgcaacgcgcttggcgacgagaccccggcgttcgacgaaaggtcctcagtgagcttcacgttttgggatgattctccgcaagtcgagatcccttatcagaaggcccgaactcgctggggctacccgcgtaccaatccgaaacgcaatgtggcgtttattggcatcgggctgttcgctccccgcatcgaacgccgcgaccgcctccatgtttatcgcgcgcaggtcaaggtaaaggcgagctcctccctcccaaaggaggtcgtgcaggcaatttcatcgatcctcaatgcgggttacacggctggctcaattcacactgtcggaccggcttcagatcagtggacagagaaccttcctcagctggtgaaaaatggcaagcggtacggcgaacaccacatgggcgccggagagcagaagattgtcgcgctgattcgacaactggaggccattcctgcccggtcgctcattcttctggaagagccggaaatcacgttacatcccgacgcccagcgagggttggcctggtacctgatgagcctgtcgcatcgcaaggggcatcagatcatcgtctctactcattcaggcgagcttttcgagacgctacctcttgatggccgactgctgatgattagagcgaacgatgctgtcacagcggtaccacgcgctccgtacattgcggcagcacgccaattgaatggcgtggtgaagtcgaatcaggacctcatcttggtcgaggattcagttgcacaggcgttcttgagagaactgctgcgccagaagaacaaacagctgctggacaactgcgctattgtcccggtaggaaacaccgacgacgtctaccgcctcgttcagagttttcggcagatgaaggtgcgcgcaattggagtgcgtgacccagacatcggcgcttcgccatcgtctggactgttctcactgccgggagacctcgcgccggaatccctacttctaactgacgacaacattgccgctaccgaagattacttgaacggcatcacggcttgtttctccaaggcgcgcgtagcaggaattgggcattcgggtagtagttgggcaaagaaggtgttcccgtccctcgcccatcagatggacctaccccgagacgctctcgcagatcgacttacgataagttggctcagatcaaatagcgctgccgcgagcgcactagccgccgacatcgataccgcatttcttgcagcgtag

SEQ ID NO: 502712 - DNA, 327 bp, Stenotrophomonas maltophilia
atgactgacaaagccacccccaccgccggcgccgaagccatcgacgccaacacggtcaccctcgactacccaatccagcgcggcgagcaggtcatcgccaccatcaagctgcgcaagcccaacgccggggagctgcgcggcatcaagctggtggacctgctgcagatcgacgtgagcgcggtggccgcgctgctgccgcgcatcaccgagccgacgctgaccgctgccgacgtgaacaagctggaccctgccgacctggtcgccatcggcaccctcgccgctggtttttttgtgccgaaggcgcagcgggaattcctcagcgcgtag

SEQ ID NO: 502713 - DNA, 270 bp, Stenotrophomonas maltophilia
atgacacagcagcagaaggcaccgccgcgcgccctccccgcctgcgcggcgggccataaagccaggtacgtccatgatctacgccgtgagagcgcgggcggcggccacctgatcgagtgccgttgcagcaccactgcaaagcatccgtcgttcgacttggcttgggctcattggcacaagcaacacggcctgcaggcagtgcaaccggccatgcctatgccggcgcccgcaccccagctgcagctgcggctggttgggggaacaggttga

SEQ ID NO: 502714 - DNA, 1119 bp, Stenotrophomonas maltophilia
atggcagttgtcgaaaagcgcggaaagaagtggcgggcaatggtccgcatcaagccccatcctaccgcctcgaagaccttcaacggtcgcaaggccgctgaggattgggctcgcattacagaagacgcccttcgggctggcctgcctcccccgcaggagagcatgacgctggaaaccctgattgatcggtacatcaaggagatggaccgcttcaaacccatctcggccaccaagcgcgggaacctgcgcagatgggttgaaagcctgggcgaccgagaggtatccaccctcaccgggcaggacattttgaaccacatccgggccaggacggatccgtccgctgcactgaatggcggcaaggccccaggaccggcgaccatggcaatggaactcgggttcttggctgaggccctggccgctgctcggtcgctatggaacatgaccatccccgatgtggtcactgccgtccgcccagtgctgcgccgcgccggagccatcgccaagccagaggagcgcgaccggcgccctacagcccatgagcttgacgagctggccgccttctacaagttcaacttcggcgccatcccaatgcgcgacctgatcccgttcgccatcgattcggccatgcgcatgggcgagattgtcgcactgcgctgggacgactaccaaggcggcgacaagcccatgatcttaatccgggacagaaaggatcccaaggacaagaagggcaatcatcagcaggtgccactgctcgggcggacggcgacgatcatcgagagtcagccccgcaatggtccgctgatcttcccctacaaggcagacagcatcggagcgtcgttccgccgcgcctgcaaccggctacagatcgaggaccttcacttccacgatctgcgccacgagggaacgtccaggctgtttgaacaggggtacaccattcccgaggtcgcaatagtcaccggccatcgggattggaagtcgctcaagcggtatacgcagctcgcccccagttcgctgcatcggactccgtccaatctcttcgcgccactccccaggtcgctcgtagccgagccggaggtgcaaactagcgagccggattgcgatagtgggattgagcgctga

SEQ ID NO: 502715 - DNA, 1308 bp, Stenotrophomonas maltophilia
atgcctgtctacacgcgaagcgagttctacgacctcttatggtcggcgccggctagcagaatttcgaaagatttggggatctccgatgttgcgctaggcaaagccgcaaagcgtcatggcatcccggccccagagcgcggttactgggccaaggttgctgcgggaaaacgcgccctaaagaagaagcttcctcccagaggtttgggacaatctgattcgatacacgtaggccgagaggaagcctgcagccaaagcagtacgtctaagacggatcagagtattccgccactgcctagcccactcagtccctacggcgaaacactagatgatctacttgctcgtcttagagccacggtcgggctagtgagcgctcccaaatcgctggccaatccccatcccgtcgtagcgaagatgctagaaatagatgcgaagaggattgaaaagttcgcgggatctgactatcggtggagccacgagcaaccgtattacgcatcgccctttgagaagcgccgcttgcgcatcctcagcgcaattttcaaagccgttgccacaaccgggctgagcttcggcgccaaaggcaagaacgcagacgagttccacgttttcgctcatgagggaacttccatcacgttctggttggatcatccgaagcagacgtccgccagagacagctattttgcgacttccaaaccagaccgacccgcgtcggatccgttgaagttggagatccgctggcactggaggtccgcacctccatttagaattcagtggcaggacgagaagggaaaattgcttgaagacgaactaagcgaaatctccgcaacgttggcgatggctgtcgaagcatcctacagagaatggaagagtgaaaattatcagtaccgcgtccaacaacatgagcacgcggtgcggctagcagaggagaagcgcctgcaagggattcgcgacgaagaagcaaagatcgaagccgagcgacagggacgcattctaaagctccttaacgacactgaggcttttcgcatggccgaagacattcgacgctacgtcgctgcagttctccgggcgaacgcccaaagtccatcgcccgcatctccggatgacatagctacttggagagactcggcactggcctgcgcggacgatatcgacccagtgctgtcccgggctttcctgctgccatccctccccctgaccgatccagatagcggtccagactctgccgcatctccagcgtctgcacgaatcctggctgaaaccgccaggccttggcatccgaatcgattcttgcacttcaaccgtaagggctga

SEQ ID NO: 502716 - DNA, 1251 bp, Stenotrophomonas maltophilia
atgccgcagaaactcatcgatcaaaccaccatccagccggacggccgccctggcgacgacgcgtttaccgcgttcgcgacctgcaacgagaacttccaggacgccgagcagcgcctgacggcgttgggtgtccgcatcgatcaggaggccgccgaccgcgggcagcacgttgcggccgagtcagcaattcgagaagccgccgacgcggcgttgagcgcacgcattcctggcaagaacattgttatcaatggtgacttccggttctggcagcgtggtacatcgttcgtggggatgaccaacggcgcctataccgctgatcgtttcattccagtgatggtcggtgacactatcgactgcattcgtgcggaacatcagctgggcgatcctacaaacttgttcaacgcccgatacttcatgcggtgcagcgtaggtcaggttgcaggtaacggtaacctcgccactttgcaataccgtatcgagaacggtgtacggctgcttgcaggaaaaacggttaccgtcagtatgctggtgcgtgcatcgtcggctaccaaaatcggaatggaatttgaaatgacctttggtacgggcggctcgccgtctgcatcgatcgtggggaatagtcagcttgtaacgggcattactggtggatggcaacgtatcagcaggactttcacccttgcgggtatcgcaggaaagacgttcggaaccaccactgagggctatctttcgctgatcctgtggctcgatgcgggtagcaattgggatgctcgtgctgctggcgttgggcgccaaaccggggatttccagttctccaacattcaaatcgaagtaggcagtgttgctactgattttgagcaacgcccggatgccttggaattggcattgtgtcagcgttactaccgtaagtcatttccgacagctgtggtcccagcgaacaacagcaactactgtttgcatcggcccgctactgcatacaattcacaggggctgcgtgcgtcgatagaatttggcacaacgatgcgcgttgcgcctgccgtcactttctacggcggcagtgaaggcggaaatctgactccagcaagcagctggcgttggtacgactccgcaggcggtgcatggcgagccgcgaccgccatgcaggttgtgggtgtgtttcagagcggatttatcgttgacagtgtcactgccggtcacgctgtcgcctccacctaccttattgctggtgaatacaccgcagacgcggagctttga

SEQ ID NO: 502717 - DNA, 744 bp, Stenotrophomonas maltophilia
atgccggcggtagaaacggccaccctcaccggtggaacgtggttgtcggccgaccagggcgccgcgctcttcgatggcaagccggggcgatcgtcgcggatccggcggaccggttcgctggcgatcacgatcaccctggccgaggctgttgtgccggggatcatcgcggttctcggcctcaacatcccgcccggcgtgcaggtgagcgcggccggcgccagcgccgccacggtgcgactgcccgacggtagtgtgtgcgcgtggctgtttccgcaggccagcgctctggtctcgacagtgtccgtcgagatcgccacgactgccacgaacgtggacgtgggcgagatcgcgatcttccgggcagccgaggtgggcatcagcgacggctgggcggtggccatgatcgacaccagcgtgcacacccgtaccaagggtgcgcaggtcaacacggttgctgggcgtctgtaccgccggctgacgtgcaccttgtccggccgggcgacggctgccgtgcgcggcggtggactgggcgggaccgattgggagacgttggccgctgcgatcgcgggacgccggcgctcctgcgttgtgccgcagtaccgggacatggtcagtaaggcgttcgacccgctgctggcggcgcggtcggcgctctacggctacccgacacagctgccatcggcggagaacatcagccggcagtacttcaccggatacatggaattcgaagaggtcccggcgtag

SEQ ID NO: 502718 - DNA, 363 bp, Stenotrophomonas maltophilia
atgatggttcctttgatccaatcccttctggaaagcgatgcagccgttcggcaagtgctcggcgaccctgtccggctgttcctgggtagcgcgcctcagaacacgccgctcccctacgcgacttgggaggtggtcaacggctcgccaaccgcgatgctgtccgaaccatcgccggctgacggctggcgggtccgaatgaccgtatggggcgaggtcctcagccaagccaacgccgttggcgttgcgatccgcgacgtggtggagcgcgtgggcggcatcgagtcgtacaacccgactcccgacagcgacgacacggatgcgatgggcatttcattcgacgcgcggctgctgcagctgcgctga

SEQ ID NO: 502719 - DNA, 504 bp, Stenotrophomonas maltophilia
atggctgagcaagtgtcaattcaggggctggatggcctgttgcgctcgctgcgggaggctcccaaggccatccagggcagggcagtccaggccggcatgcgcaagggcggcaatgtcatccgggacgacgccagacgccgggcgccgaaagcaacgggcttcatggcgtctcagatcgtcacccgccgggccaactccaagagcagacagcgcgcaggcgtaggccgaagcggcgagtacttcactgtaggcgttaagacggggcgccgccgcaagtacgccaacaccaagcgcaatcaacggcgtgggcggaccggcaaaacctatgtcgatagaggctgggcctactactggcggttcgtcgagttcggcaccaagaacatgcgggcgtccccgttcctcacgccagcaggcgaggccaagggaccggaagcggcccaagtggtcatcgatgagacctgggcggcgctcgacaagcagctgaaaaaggatggctggcgatga

SEQ ID NO: 502720 - DNA, 336 bp, Stenotrophomonas maltophilia
atggctacttcagcaggccagcgccggcacctgatccgcttcgagcgcgcagtcgacgtccgcgatccgctaggtgggccgcccaagaaggaatggcagctcgtcgccgaggcgtgggcaaagaagacgaaccaactcagcgcgacggccgaggcggtcgccgcaggggcggagcgataccgcgagcaggtccggtgggacatgctcccgcgacatgtcgagcccacttggcgcattgtcgagcggggcaagccttatgcgatcaagagcattgcaccgagcaacgacggtagtgagatggcgatcatcgccgtagcggggttgggcaatggctga

SEQ ID NO: 502721 - DNA, 303 bp, Stenotrophomonas maltophilia
atggcaatcaccctcgacctcgcgcttgtgcgcgagcagtgccgcgttgtcgatgagatcagcgatgcgctcctgcagacgtacgtcgacgcggccctcgtgcacgtggagatgcactgcgatcgccgcctggttgagggtgagccgtccggcgaagaagagatggcgctcacggcggatgtgcaccaggcggttctgttgatggtcggcagctgggcggagaaccgcagtgccctgggtgagctgacctcggagattgccctcggggtgtcacgacttctttggtacaggaagcgattctga

SEQ ID NO: 502722 - DNA, 480 bp, Stenotrophomonas maltophilia
atgaagatcaaagccgaatggggcttccgcggcgacgccccgaagctcaacgccgagaccgccgatgtgaaggctggcgacgtgttcgacggcgtggatccggaatacggacacgcgctggtcggcaagggactggtggtacaggtccacgaaggtgccgcaccccaggagacaaagccggccaagcccagcgaactgaaggcgggcgagggcgacggtgtggacggaactaccagcaccgacgcagtcccaagcacagccgcaccggtggtcgatggtgctgcgtccggtgaagctgtcacggccggcgctgttgccgacgccgccgcagggagcccggcagccgatcaggtcggcgctgatgaaagggcgctcctgatccagcagctggaggccgctggcgtcgagttcgatcgccgctggggcgctgctcgtctggcagcggtgttggccgaagcccagaacaaggatcccgagtaa

SEQ ID NO: 502723 - DNA, 1212 bp, Stenotrophomonas maltophilia
atgagcgagaacatcagcgatatccgtgagggcctggaaaagcagctgaaggacggcttcgccggcctgcagaagaagtacgacagcgcctcggccgagatcgaaaagggcaaccaggtcaccactgacctgaagaagcagatccagtccgccaccgacgagatccagaaggtcgtcgacaaggtgttgaagctggaagagaagggcattggcctgggcaatcagcccggcacgaagaagggcttcatcgacttcatcaagggcaacgacgaatacaaggcgttgcagggccgtgagaagtcggccgctgagatcgaggtcaagaaggacgatctggcgtccatgcaggagaccaaggcggtcaccagcgcaggcatcgtcgtgccgaacttcgatccaacgatccagccgggcatccgccaggaactgcgcatccgcgacctgatcccgtcgatctccgtcaccggccagagctacacctacttccgcgagaagctgcacacccgcggcgccggcccggtcggcgaaggcggggccaagccgcagagcaacgttaccttcgagcagaaaaccgacctggtgaagaagctggcggtctggatcccggtcaccgacgaagcgctggacgacgtgccgcagatgtacggctacctgcagcagctgctgcgctacgacctgaagctggaagaagaggtccagatcctgaagggcgacggcctgggcaacaacctgcccggcctgatgactgacgccacgctgttcgatgacgccctttcgaaggcgagcgacacctcgatcgacactgtccgccgcgccatctaccaggtgcgcaagcagtcgaagctgtcggccgacgccacggtgatgaccgagctggactggatgaacatcgagctggagaaggacagccagaaccgctacctgttcgccaacctgcagggcttcgttaccccgatcctgtggggccggccagtggtcgcctcggacagcatggacgaaggcgacggcaccaccaccggtggcgagttcctggtcgccaacttccagcgcggcgccacgatctacgaccgcatgagcttcctgttcaaggtcggcctgatcaacgacgacttcgtgaagaaccagcgcgtgttgctggtggaagagcgcctgggcctggctaagcgccgcgtcgaggcgttcgtgaagggccgcttcaagccgcaggcgtga

SEQ ID NO: 502724 - DNA, 648 bp, Stenotrophomonas maltophilia
atgcttagcaagtattcctgcccgttcgaggtaaaggcggcagacgatgccggcaacttcgagggctatgcctcggtgttcaacaacgtggatctcggtgaggacctgatcctcccgggtgccttcgtcaaggtgaagacgactcggactggccgactgcgcctggcgctgtaccacaacctgacccggctgatcggcgatgccgagttcaaacaggacggaaacggcctgcacttgaagggaaaggtcaacctcaacgtcagctacgccaaggacgcctacgagctgatgaaggccggcaccttggacgaaatgtcagtcggcttcaacacgttggaggacgcgatcgagaaccgcgaggggcggcgggtgcgcgtcatcacgagggccgagttgtgggaggcatcggtcgtccccttcggcatgaacccggaagcacaggtgatgagcgtcaagtccgacgttcgcgccttcgaatcggccctgcgcgagcgcatggggctgtcccagaaagaggcggcggccgtcgcctcgctcggctttcccgcgatccaccgtgacggtggcatcgggggcacggagaccgtgaagcagctgaagcaactcggcacatccatcgaatccattttcaaaggtatgaaccaatga

SEQ ID NO: 502725 - DNA, 1260 bp, Stenotrophomonas maltophilia
atgactacctttcgctggtacaacccgctgagctggcggttcttcggatacgacgaccctgccaccggcaactacgtggaggtcgacctatccaccggtggccgaggcacgaaggcgggcgtccgggtgacgcccaagaaggccctgacggtcagcatcgtctggtcgtgcgtgaaggtgctgtccgagtccgccgcggggctgccttggaagctgtatgaggacgcgggcggcctccgccagctggtcagggggagcagcccgcagaggcgccgtctgcttcgcctgctgagtaagccgaatccgttcatcaagtggctggacctgatcaaggcggtcgtggtgaacatggcgctgcgtggcaatgccttcgccatcatccaacgtgacgacgacggtggatggatcggcctgattcctgtggcggtggatagcgtccgcatcgacaccgacgacggcctgatctactgggcgacgatcaacggcagcgagacgccggtctcgccgcagaacatgctgcacttcaagctgttcagcccagatggcatcaccggcctgtcgccagtcgagtatcaagccgaaaccatcggtctcgcgcgcgctgcgcaggactggtccgcccggttcatgcgcaagggtggcttcaccggtggatacatcatttaccccggcttcctgaccaaggagcagcaggcgcagatcaaggcgaagttgccggatatccgtcagggcgatgtagacgacctcggcaagatggccatcctgcagggcgggccgacgatcacgccggccggactgacccagaaagacagccagttcatcgaatcgcagcagttccaggaagaggcgctcgccggcatctggggcgttccgctgtacctgacgaaccgcgctcgctccacgtctgtgctgggctccaatctggagcagcaaaccagcggcttcgtcaccttcggcctgaagccttacctcgatgccatcgagagcgagatcaacgacaagttgttcgctgatggcgacatgttcgtagaggctgtcgtggagggcctcctgcgggccgacagcggcgcccgttctacctactacaagacggcccttggcggctccggcggctctggctggatgacgatcaacgaggttcgggtgaaggagaacctgcctgtgctggaaggcgagcagtacaaccaggtcacacggtggaccagcaacaagcccgattccagtaacgacgacccaacgggagatcccgccaatgcttag

SEQ ID NO: 502726 - DNA, 1908 bp, Stenotrophomonas maltophilia
atggcggtgacgaagaagaccagggcgaagaattcttcggtggccccagctccggccgaccgcactaaggcgtatgcgctggatgtggtggctggccggatcgttgccggccctcatgtccgaaacgcctgccggcgccacctgcaggatctgatagaaggccccgaacggggcctttacttcgaccacggggctgccgagtacgcgttccgctacttcgagaacgtcctgatgctctccgagggtcagttcgagggccggaagttcgagctgcacccttcgcaggcgttcatcatcggctcgctctttggctggaagggcgcagacggccttcgcaggttccgccgcgcgtacatcgagcaggggaagggcaacggcaaaagcccgctggccggtgggctgggcctgctggggatgacggctgcaggcgaggctggcgcacagatctactcggcggcggcgaagaaggatcaggctggcatcctgttcgccgacgcggtgaagatggttaagaagtcgccgctcctggccaagcgcatcgagttcgctggcggtgaggggcgggagttcagcatggcgcaccacgccagcgcgagcttcttccggccggtgtcgcgcgacacgggccgcaccggctccggtcctcgaccgttcttcgtgctggtcgatgaggtgcacgagcttcccgaccggcgaatcatcgaaatgctggagcgcggcttcaagttccgccgcgagccgctgctcttcatgatcaccaactccggtagcgaccggacctcggtgtgttgggaggagcacgagcatgccgtcaaggtcgccgccggtcataccgaggcggtgaacgatccgaccttcgtcggcggcgttatcgatgaccgcaccttcagctacgtgtgcagcctggacgacggcgacgacccgcttgaggacccgagctgctgggcgaaggccaatcccctgctgggggtaactatcaccgagcagtacctggcggacgtggtggcgcaagccaaagcgatccccgggtcactgaacggcattcttcgtctgcacttctgcgtgtggaccgatgcggagaccgcctggatgacgcgcccaacgctggagccggcgctggccgacttcgacccgcgcatgcatgaggggcgcaaggtctacctgggcctcgacctgtcgcaggttcgcgatatcaccgcgatggctgcggtcgtggagaccggcactgtaccggtggaggtggaggtcgagggcgagacgctgatcatcgagaagccgacgttcgacgcctggatcgaagcttggacgcccggcgacacgttggatcaacggcagttgcaggacaagctgccctatcgcacgtgggtcaacggtggacacctgcacgcgccacaagggcaggccatcaacttccggcacgtggcccaggtcatggccgagtacgacggccggtatgacgtgcagctgatcgcgtacgaccgctacgcgttccgccgcttcgaagaggaggtcaacgacattggcctatctgtgaccttcgcggagcacccgcagggcggttgcaaaaagggcaagccactggaagcggcggtggaagccgccgagcagtcggggcagcccgtacctgaaggcatgtggatgcccggatcgctgcgcctgctggaagaggcgctgctggagggtcgcctgcgcctgcgccgcaacccggttctggtgtccgcagtcatgtccgccgtcatcgaatcggaccgctggggcaacagctggctgtcgaaggccaggtcggcaaacaagatcgacgccgcggtggccctttgcatggccatcggcgcggcacacgccatgccaccggatgccggcggcatagacgactacctggaaaacggcttctttggactgatcggatga

SEQ ID NO: 502727 - DNA, 339 bp, Stenotrophomonas maltophilia
atggcggcgggaccgacccagcgccgcggcaggacccggcagacaggcggtagcgccttcgcccacctgtacggcaccgcgcgctggcaacgcacgcgcaaggcgcagttggagcgtgagccgctgtgcagcaggtgcaagaccagaggccacgtcacggttgccacggtgtgcaaccacaccaacggccaccctgccggcgagacggaggagatgttctggactggtcccttcgacagccagtgcgccaactgccatagcagcgaccaggcccgactcgagcgaggcgccgcgcaggtccgtgggtgtgacaccgacggttggccgatcggtcactga

SEQ ID NO: 502728 - DNA, 279 bp, Stenotrophomonas maltophilia
atgcgcgtcatcgtagttgctaccgctgccctcctggccgcgtgccaggcagcacctaccaagccgaacccgccgccggcagccgtcatcaccctgccggtggctacctacgtcccgatcgatccccaactgcgcaagcgctgcaagtgggtgaaggaggcggcgccgtccgccgtattcgaggtgagcaacggccggaagcgttgcctgctgcactacgaggcgcagctcgacggcatcgaccaggtgcagggcaaacctgtcccggattcgccctga

SEQ ID NO: 502729 - DNA, 489 bp, Stenotrophomonas maltophilia
atgacgcagatcactccccaacaggctggcggcgtgaacgtcgtggccttcctcgacatgctggcctggtccgaaggtacggacaacggccggcagccgaccaacgaccgcggctatgacgtgctggtcggtggtggcttgttccgtggctacgctgaccatccgcgcgtggtggtggatctgccgcggctgaagatccagtcgaccgcagccggccgctaccagctgctgcgccgctactacgacgcctacaagaagacgctcggcctgaaggatttctcgcccctgagccaggacctgatcgcgctgcagcagatccgggagcgtcgcgcgctgccgttgatccaagcgggcaaggttgaggaagccatcaaggccgtccgcaaaacctgggcgagcctgcctggcgctggctacggccagcacgaacacaagtttgccgacctgttggccgtgtaccgcaaggccggcgggacggtggcgccgtga

SEQ ID NO: 502730 - DNA, 765 bp, Stenotrophomonas maltophilia
ttgaagaccaagacactgtttccctggccgggcggcaaaacacgcctggcgaagcatctgctgccgctgatcgacgagcggccacacacctgctacgtcgaagccttcgccggcagcgccgcgatgctgttcgagcgtgcaccggccaagattgaagtcctgaatgacacgcacggcgagctggtccggctctaccgcgtggtggccaaccacctggacgagttcgttcggcacttccgttggtcactgactagccgggaaatgtaccggtgggctcagctgcagcacgtcgaaacgctgactgatatccagcgcgctgcgcggttctactacctgcagaagctgagcttcggtggaaaggtggaagggcagtcgctgggcgttggcccgacggcggcaaaacgcatcaacctgctccggctggagcaggatctgagtgatgcccacctccggctacagggggtggtgatcgagcagctgacttggcagcggtgtatcgagaagtacgatcggcctgaaacgttgttcctgctcgatcctccgtactgggagaccacgggctatggaagcgagttcggcatggatcagtacgagctgttggctgaaaccatgagccagctcaaaggccgggcaatcctgaccatcaacgaccaccccgccatgcgcgcgctgttcgatcgcttcagtcgggtcagcgtgccgatccgctacaccgtgggcggtggtcaaggcgttgctcggagcgagctgatctacaccacctag

SEQ ID NO: 502731 - DNA, 240 bp, Stenotrophomonas maltophilia
atgcccgccccacgcacgcgccgcctgattgaagatcaccgcgagctgttgccggagtcgtgccggaagcgctgggccgaactgctcgcggcgcgcaggacggccagacacgacgctgccagggaggaagcggagcgccttatgcaattcggcctcggtttcgtgaaggcgctctatctgaccgggcagatcagcatcaccgcccgggacgacttacaagccgctttgatctcggcttag

SEQ ID NO: 502732 - DNA, 504 bp, Stenotrophomonas maltophilia
atggccgacgtccagcagctcgaacatatgaagcgcctgaccgcggcgaatggatggcggtctatcgtcgcccgcgcgctgaaggatagggcgcctcatttcgacaaggcggcgttcgacacgtactgggtcgaaggtggtcaccggatacgggagcaagttggggatgaccaccagctggctgcattcctacggctcagcctgccgcgctacaagaccgaggcgggcgagaggctggagttgtacaggggagagaacgccgaccggctgcagctgggccaacttggctttgcctggacgccggatagagacactgcggagatgttcgccagtgggttgaatgcctgcggtagcggcggggtgctcctccgcgcgctggtcggcgcggaaatcattgcggggccgaacgcccacagcatatacctcggcgagcaccagtacactgtggaccctactgccgccttcccggttgaacggatcgctgagttcccgccgttcccgtga

SEQ ID NO: 502733 - DNA, 375 bp, Stenotrophomonas maltophilia
atgagggatctgactttggcacaggccgctcgcgatgcggtgtacctctgcgcagcctgcggcggcgatgggatcgtccgaatcagcgtcacccgaaaccccgaaggaagcatccgccgccgccccaacctggttgccgcccaatgggcttgggtgggtagcgaatcgcgagcaaagctgctcgtgcgccggcttcgccgccagtgggctgaacgctacgttgtcggggagggctaccgcttcgactacgccgtcgagggtgctgagttccgggacgggctcaaccaagcattcctcgacgtggtgcgcggtgctgcccgatgggacaagctcgggccggtggcactccgggtactgcgggcaaccgctgcctga

SEQ ID NO: 502734 - DNA, 1341 bp, Stenotrophomonas maltophilia
atgaggcgcgaggactttgacgctgaatcggccgtgctcgcttgcctgcttcgggacgggcaagcgtattggcggatcgccgacttcctgtcgtgcgacgacttcaccaacgccgggaaccagcggttgttcaggacgctccagcaggaaatcaccgcaggacgaccgaccgacgcagtcaccatcggtgagctcgatggtgggctggcgacccttgcgctggatatcgattcgacctccatcggcaacccgaggttcatccgcagctatgccgagttggtcagcaagcgacagctgctgcggcgactccgcgcagccggccgcatgatcgccaatcttgagccggacgaggatgttttcggcgaggcgcagcgaatcctggcgtcgtgcgcaccacggatcacatcgggtggcccgaagcacatcagcgagttcgtccgtcagtccatgcgcggcctgaccgatcgcgcccattcggaccgtgatctcaccggggttccgacgggctatgccccattggatgacttgaccggcggctggcagccaacggatctgatcatcatcgcagcgcggcccagtgtgggtaagtcggcgttctcgctgcagtcgatcctgcatggaacacggcccaaggaaggcgtgaatggcttcatggcgtcactggaaatgtcgggcgagcagttggctgatcgggctatttcccacatcggtcggatcaacgccgtacacatccgccgaccgaagttgatggaggaggacgaatgggaccggtccgcgccagcggccaagacgctgatggagcactcgctgttcattgacgaatcctctggcctgaacgtcgaaggcatctccgctcgcgcccgccagctgcactcagagaacccgctgggcttgatcgcgattgactacctgacctacatcgacctgcctcgcagggagaccacggagcaaggcattcagcacgtcacccggagtctgaaggggctcgccaaggagctacgagttccggtgatcttgctttcgcagctgaaccgcgacggcgacgacgagcccagcctgaagcacctgcgcggctccggcgcgatcgagcaggacgctgacgtggtgatcttcctccatcgccctgacaagtcccgccgcgacgttgtgaaggtcaaggtcgagaagcagcgcaatggcgccctcggcgagttctacctgaacgcgatgatggagaggcagcgcttcgagcctatggattggaacccgccggctgcacccgagcgtaaaacgctgcgctcggtaggtgcagcacggcagccaaacctgcggaaaaactggcaggagcgtgacgatgagtaa

SEQ ID NO: 502735 - DNA, 819 bp, Stenotrophomonas maltophilia
atgacatgggcgttggaccagcaggacgtgaccgactcgatctcccggcacgtgttgctttgcctcgccaactatgcggacaaggacggcaagaacgcattcccgtcggcatccacgctcgcgcaggacaccggcttggcggtccgcacggtgcgtgtccggctcgcccaattgctggaaacgggcatcatcaagaagggcaatcagatgatagtggctgcccacatcccggcagccgatcgccgtcctgtttgctacgacctggtcatgtcacggggtgcatgtggtgcaccccgtgagggggagcggggtgcacgccacgacaccaacggggtgcacgccacgaccgaacggggtgcacggcgtgcacccaatccgtcatataaccatcagaaagaaaaccatacccctgtagtccccggcggggacgacacagctgatccgcttgctctggagaatccagccagcgacgacggaaccgatcccctcgaggccatcgtcacggcatacaaccgcatcctgggaaaccgcccgggttgccgggccagcctcacgactacgccgaagctctcccgcgcgctgggcagagcctccaccttggcgcagacggtgtgcaagcagcatgggctggtctttgagccggccgagttttgggaggtctacttcacgtcctgcctggacgacaagtggctgcgcggcgacacgcccaatcccaacaaccccaagtggaagcagagcctgccgacgctgatcgatgaggaccggttcgcgcagatcatggacacggtcctgtcggaaatgctggagggccgggaatga

SEQ ID NO: 502736 - DNA, 339 bp, Stenotrophomonas maltophilia
atgccacaccacgattccgatgcaaacctgcattgccaggggccgcgtccctatagcgaagttatgcagcaagcgcttactcgcgttcaggagcgccatgccaggcccttggtcaagctgcaggagcgcctccccgacggccgaatcgcggtagagatctacgaccggacccgcccgggcgacgaacccacctacgacttctactgttccggcccgcagcaggcgctggagtggatccagcaaatgtccagcaagcgctggatcaccgcagagcacttgggcgccttcgccacgttgatgattgccgcattcccggaagtctcgggggcatcggcgtga

SEQ ID NO: 502737 - DNA, 381 bp, Stenotrophomonas maltophilia
atgggcgcaggggtcgtgaatgaggaattcccggaagtgattcggagcatggattacgccgagtgggatatccggcaacgcctgggctatgtgcccaaaccaggccggctcaagctcatcactggccgaggcccgtcgatggcaccgatcatcaacaacggcgacgtagtcatggtcgacaccgccgtcgactacttcgacggcgacgccatctacgtgatcaacattggcggcgaaactcagatcaaggggctgcagcgccggtccgacggcgtgtacatcgttagcgccaacccgctcttcccgccctacgcggcaccggacgacttgttcatcgcgggcaaggcggtggtgcagtacagcgcgcgtcagatcgcctaa

SEQ ID NO: 502738 - DNA, 255 bp, Stenotrophomonas maltophilia
atgaactccaactgccgctgcattagggccggttacgcccacggatcggaccgcaaggtctctacgctgattcgggtgggttggatcctagtcgcgctcacggcgtcggtcgtcgtgccactgcgaatcgcagagatcgtcgcagcgaaccatcccagtgccattttttgcgttgccgtaccgagtgacgcatctgccccgactcttgcagtttctcacgccgaccagaaccaaggaaacctgaaaagtgagtag

SEQ ID NO: 502739 - DNA, 387 bp, Stenotrophomonas maltophilia
atggcgaacaacagtgtactcccggcagtgccggccgcagtcccccgcctcgcagatagcgagcactacctgacttcgatgtggagggataaccccctctcggactttctgaccaatcggctggtccgtgttgaccggaacaccaaagccaccgtagcgatcatggacgtgcttcgccgcgacttcacggccagccaggacgcgcgcgatatcggcaacgatgaggaaccggtcctgcacgacaagctgaacgagcacacgattgatggcctgatgctcgcggttgaaagcctgttgagcgactccgagagcctgctcgactacattcgcgagaaccaggacaacgtctgccgccatccgctgaagaaggaggccgctcgtgtctga

SEQ ID NO: 502740 - DNA, 252 bp, Stenotrophomonas maltophilia
gtgtctgagatgaccgtcaccaaggaagaagcgttcagcctgatcccagtgcaggaaaatgccccgctgttcaaggtgtgcgccgggatcgataccgctcactccgagctgaaggccagcatctacttcgactacgtccagaggcaactgagcaacctggacagcgacagggtcaccgacgatgacatgttcgttctcgctgacctcctcgaaatgtgcaaagcactgcgttacgcgggaggtgcccggtga

SEQ ID NO: 502741 - DNA, 261 bp, Stenotrophomonas maltophilia
gtgagcggcggtgcagatgcacagaagactactgagatggcaattccaaactcgccgctcgtagtggccgctggctgcgatcttgatctggctttgagcaaggcaaggctgctcaccgaccacgtgcaggaactgctctggcagggcatgcggcaagccgatgggaaagacgtttccttcggctacgacaccgtcgtgacgatggatttcctactcgacattgtgacctgcctgtatcgggccgctggagccgaagcatga

SEQ ID NO: 502742 - DNA, 315 bp, Stenotrophomonas maltophilia
atgagcatgttcgaagacctgctggacatggcgcacgtggagcaggagccggactacctggtcgacgcgaaaggcatgcgctgcgttcgccgcgctatcacgtttggcctccacgcactggtgcaggtccagaaggccaaggaggcggagagcgccgctgatgggagcagccaaacttggccggacgatctgcgactcgctatgccgggcgaatcgtttgcttcaagcgtccaagaactggtcgatgcgctgctctggatggaatacgccagccacgtgagggaggtgcgcaatgacgctgcagctgatcactga

SEQ ID NO: 502743 - DNA, 492 bp, Stenotrophomonas maltophilia
atgacgctgcagctgatcactgaactgcggtccgccgccgccaccctccgccggcctggtggcacgaccaccgaccggatcagcgccgagttgctcgaacgggcggcgcaggccctagcggtgctgcagcgcgcgccgctgccggctactaccgtcacggacttgctgccggatatgcgggacgactggacaccggagatttacgggacctgggcaatccgtgcggccgagcgcgcgcacggcatcgggaccaccatcccgaacccaccgccgcccagctgggccgaggccccggacggctataactaccgggcgatggacagcgatggccgctggtactggttccaagaccgcccctacagcgagaccatcggcaactgccaagtgtgggacagcgagggtggctatcgagaggtccgcggcctgaacttctaccctggctgggccgacacgctggaagaacacccggaggtcggcaatgcccgcggctga

SEQ ID NO: 502744 - DNA, 219 bp, Stenotrophomonas maltophilia
atgcccgcggctgagcactcaacgttctggctgctctacgggcagtacggccccacgatgaccgtggaaaagttccgagaggagttcctgccgaagatgaccatgaagacactgcagaactggatcgccaggggtgatttaccgcgacctctaaatggggttctcgacgtacgagacgttgcggcctggtgggacgaccagagaagcgggcgtaggtga

SEQ ID NO: 502745 - DNA, 693 bp, Stenotrophomonas maltophilia
atgcttgataattcttcaatgacttacgcgcatgatgaggcaattaagctggttgaatggctcctgccagagctaacggctgaagacgctctggcagtggaactgccatacctcgacgtgaggcgcaaggctgacatcctcgtcgttggccccaatcgattgtctgcaattgagattaaagggccgagagacaactttggccgactggccgcacagctggaggactatcagaacatgttccttgacgtgagcctggcagtcccagagcagcacttggccagtgctcgtcagatcattccgcgcagtgtaggcatcatacttctcgcgccagatcgcgcatcctgggtacgatcccctcgagctcgccgacggctcaagtcggaacatgcggtccgctggctggacactggagatctatcttcgcttctaggatctgccgtcgttcgtggccaaggcatcgaagacgcgcgacgaaccgcacagcttacaatgtcggacgcagacttgaccggtttcgccattcaatcagtcttgggtcgttgccgagatcgctacactaggtttctacaagagaaggggccaagcgttgacctagacgatcttcaactgctggcgctatcgagcaagttgcgggttcagtctaaaaacctgcctcgaaatgtggaagttgactcgcacagagatccaaaatga

SEQ ID NO: 502746 - DNA, 1062 bp, Stenotrophomonas maltophilia
atgtacaggctacagggacgtgagtatgtaccggcgcttcgtacacgcgattcagaattgaaggcatttgagaacctgacgccggaagtgaggcgtcttctgttgccggtattcgagctaacaagatcacggcgatccaaaaccaatcccgatggatcagttgtcaagactgtcgagcggctgatctccctgatgggcgagaatccatttatcgtggacgtaacgtcgctcgattctcaggcaaacgcggaaacggccgcttttttagatccagcagactcgttccgcaactggtgtaacttcgtgttgatgcacttgccggagacttgcattccagttgtgcatttgagcgatcctttcgaccgatcagaatttgcagcgcagcgagcgaggttggaatcaaagttccgcggaattgctctgagggttcctacagagtacgacgacgcgcagcatctcgcggctgcgctcaaaagcagtccaaaaattggctgcgtcgttttgctagttgatgcaggctttgttcctcagggctcttcagcgtcggcttccaagtcttgtatgcaagttgcccaactatttgctgggctagtggatttggtcgcgccgctgacgagcagcttcccgagtagcgtcactgaagcgtcgttcggcgggggggacgcatacggcgactttgttttggaggaagtaacggtttctgaggtaatgaagctggtgggtgtaggtgccacaagaattgttcatggcgactacgggttagtgcatccaaatgatttcgaagggactgttaccaattgggtcccccgtgtggatgtgcctcttgacacaactggcttctactaccgctatcggcgtcccgccggcggatatgctcttgccgcagctctcgccgtcaaggatgtgaagtacaaagctctgccttgctgggctcacgatatggtggcaaaggcagcggctggagatccagagggccgcagcccatcattttggatctctgtgcgagtcaacttccacatttcgaggcaggtttttagactgaacccgcaacttgctcgatag

SEQ ID NO: 502747 - DNA, 531 bp, Stenotrophomonas maltophilia
atgatggcagtggtcaaaaaacgaccgtccgtggtggtggatcacgcggcagatatggcgaatattcagcaggtgcgagccttgctggatggcgctgggctgggcgatgcacctgtagatgtgagcggcgccgcctccctcttgggcttgcagattgtgtacgagcaaatggccgacgagatgtcaggctacctggagaaccgcaacgggcagtgggtagtcggtgtcaacgcgtaccacgcaggcgtccgccagcgctttacgatcgcccacgagatcgctcactatgtgctacatagaaagcagcagggcaccttccgggacgtcatattcatgcgtcggtcctctaacgcgaattcgatggagcgagaggcagacacgtttgcggcgcagctactgatgccagaggatcaactcattagggatattcgaagtggcatggtaaacgtcatgatgctggcggccaggtacaacgtatcggccttggcgatgaagtatcgtctacagaacttgggctatgcggtgagctga

SEQ ID NO: 502748 - DNA, 876 bp, Stenotrophomonas maltophilia
atgcaggcattgggcgcgcttgggcgcagcgaacgggtcggcgtcggccatgggtattggaaggtgctggccctgtgcctggcgctcaccgcatgccaggcgccttcttcccaggcatcgaccgaaacggcggcccccgcgtcgattgctgcggcatcgccgacagccccttccggcccggcatcggcagattccctccactacccggatgcgtcctataccgacggtcgcctgcgcccagcctatggctggtgtgtggatggggtggaagatgcaggcaagctccaggcctgcggcaaggacgaactcgcctaccaggaagggcgtctcgaagcggcggccagcaaggcgctggccggactcgacggcgctgcccggacggcattccaggccacccaggcgagctggcgcagcgatacagaccgttattgccgcgatgtccccaacagcagcgtgcagcagctgcagggcgcgcaggaatgccgcctgtaccgtgttgccaaccgtgccgaccagctgctggcgcagagcgcgccgccggatacctcgtatacccaggcagcgctgcgtccggaatacacccgttgcgtgcaggacgcccgcggcatggacgaccagttggaagcctgcgatacggccgagctcgcccatcacaaggcgctgctggaagcacaggtcgcgcgactgatggacggccccgacggcccgggcaaggaccgctggatggacgagcaggccaactgggctgcagacacggacaaacactgcagccaggccactgacagcgtgggcccggcgttggatgcacagtcgtgcctcatcaatcgttacgccaaccgtgcggtggaactgcagaagggcgtgttggcgcgatga

SEQ ID NO: 502749 - DNA, 624 bp, Stenotrophomonas maltophilia
atgatcggccagtcggtcatcaacgtgacgtccggtgcccgtggccgcctgtcctgcctggtggccggcgtgctgctgctggtgctggtggtgtacggcagcgacctggtgcggcagatcccgatggccgctctggtggcggtgatgatcatggtcagcatcggcaccttcagctggcgctcgctgcgcgacctgcgcacgcatccgcgcagttcctcggccgtgatgctgctgaccgtggtggtcaccgtggccacccacgacctggccaagggcgtgctcagtggcgtgctgttgtcggcgctgttcttcgcgcgcaaggttggccgcatgctggatgtgcagcgcgaggatgtcgcagacacgcaggtctaccgcgtacgcgggcaggtgttcttcgcgtccgccggccagctgggcgccgcgttcgactaccagcatgtggcgccgaaggtgcagatcgacctgcgtgatgcccatctgtgggatctgacggcggtggccgcgctggaacgcgcgcaggaaaagctggccgcgcatggggcgggggtgacggtggtgggcctgaatgcggccagccagacgttgatcgaacaggtaggcgggcgcggaggcgggcattga

SEQ ID NO: 502750 - DNA, 711 bp, Stenotrophomonas maltophilia
atgtctgttggtcttgaagtcaccaatgacagcggcgttccggttcttgtgaacgcacattccttcgtcttcttttcgatagccaagggcacgcagtccattgcaagcaatacgtccgcctatggcgcgagcgggtttgtaagccttcccgcacagagcgtgccgtacctggtgttcatccgctgcaatggcggatccgcacaggtgatgtcagcgctgaatggcttttactggagcatggggcaagggaccaccagcttcgagtggtgggcatgggggcgggcggtcaacagtggaagtacaggcatgcaggtctacaacgccgacggatccatccagtgggatatgtcaaaccgtccactgcgcatcgctggtttggtcgataaatcgggtggaagtgttccaggctttaccgagatgtccaccgacaatgtgaggcaagggccactgttcaacggtcctggtgagaatctcgcctatctgatgtccgacattggactgtgccatgacatctacgcctactacggaagtggcccgaccattcgcggcaacatgcgctatcagccgtacatcaatactccaaatgcttcgcaggtgcgattgaactactgcaggcgtagagagaaccgtcaacgttcgttgagcggcgcgtcctaccagagtttcacgggacagttgccgaacttcctgattgccgcacacacctactag

SEQ ID NO: 502751 - DNA, 318 bp, Stenotrophomonas maltophilia
atggcaacaggtatgcagatattcggcccggatgggcagatgtggttcgacaccaatgatcgtgccggcaagatcatgggcactctctcggtcgttggaagctcgtccagcagcgtgggcctggccggcctgggtgagccatttgccatcctgcccagccctggctccgacagttggcaggaccagaatggcaatcagttttccgcgcctgcgctggggtacatgtcgtttgtcgacggcggcaatacattgcggatgcagttcacgttctcgccgattgccaacccgactgcttccatctactacggagtcttctga

SEQ ID NO: 502752 - DNA, 711 bp, Stenotrophomonas maltophilia
atgccccgacaagcgcgcctgatgctggccggccaggcctatcacgtggtccagcgcggtgtgaacaagggtgcgatctttgtcgacgacatcgaccggcaactgttcctgcatctgctgcacagcgctttcctcaagcaccgcgtcgcactgcatgcctacgtactgatggacaaccacatccacctgctggccacgccatccacgcagcgtgggctggccgatgcaatgcgcatgcagggcaacaactatgtgcaggctttcaaccagcggcacggccgcaccggtcccctgtggcagggccgcttccattcctcgatgatcgacagcgacgcttacctgctcagcgtataccgctacatcgaacgcaatcccgttcgtgccggcattgcggtcagtgctgaagatcatccgtggtccagcgtgcacggcaaccttcaacgacgcgatgaccccatgctgaccccgcatcccgcattcagagcgttggccgcgaccgctcgcaacaggacgacggtgtatgcgcgattcctgcgcgatgtgaatgcgtccgccgatctgcccgcaatccgcagtcatagcgccaaacagcgtccgttgggggatgctgcgttcctgcggatggtagagaagacgctcgggcggccggtggcgatgcgaagacaaggccgcccgcgcaaggaggggacgggaggggcagaaacgacttaa

SEQ ID NO: 502753 - DNA, 453 bp, Stenotrophomonas maltophilia
atgtactgctacgactacaggatctcgctgcgcgtgcagcacccaacagaggccggcgccgggattgccgcccggctggatctggaaccggcgttttcccgagacgtcggaaccggataccgggatcgcgacggcagcctgatcagcgggcatgcggagacccgcgtggtgttcgtactggagaggggcaaggacggctggctgatggatgcctggccggcgttggtcgatctcctgcgggcacgcgccgatgtgatcggggaactgctgcaggagggggcttcgatcggcgtgcgtgtcggcatctttggaaagaccgcatgggcgggttttgtgctggatcagcagttgctgcgactgttggcggacctgcagctgggtttccaggtggagacctatttcccggagccggcggacacgcccggcgccagcgacgaggtggcaggcagctag

SEQ ID NO: 502754 - DNA, 417 bp, Stenotrophomonas maltophilia
atgcatcacctgatcctgctcgccgtcctgctctgcccggccctggccaccgcggccaactgcaccctgcccgccacgctcgaccaacgccagttcaccaacctcagcgacccgttgtacgcgccggacaaccccaacgccggacgcatggtgcagctcagctttgctggcagccagtacgtgctggacatcctcggcaccgacctccgcatcggcggcagctaccgctaccagcgcctggccccgcatatcgcggaaatccagatgaccgaggcccatccggccggccccggccactacaccctgctgctgacctgccagagcgaccgccagggccgcttcatctacacccagcatgacggccccatcgcaccgcgccagcgccagaattccggccgatggaccatgcagccatag

SEQ ID NO: 502755 - DNA, 1116 bp, Stenotrophomonas maltophilia
atgcttacggctgcggctgagttgctgccggatgacagtgtcgcagaggtgtgccgatttgcctggggcgagttcaagagcggtagccgccattggctggcggccaggatcgcggcgcaggcggcctatcgtctccccagattgcttcatgatgactgggatgccgtccttcgcctgtcggcacacgagccaatagaaggcccgttctggcgggagctgccgattgaggtcggtcggagatggattcaggaggcaagagggccgtcgtcgtctgatgctggtttgccgggattacccctggagatgagtggggtcgtggagttccaggacgccgcgcgtgacctatccggttcacgggatgagccatgggcggcagttggaagggagggattgtctggtcttgagctgggctcgggacgcgcgctgcatggagggcgtggtctccatctgcgtttcagtgcgcagcaccagcgcttgcagctggcagaatccacaagggtcgagcgccgcctccagcggctgcatcccacctggaaggacgggaatgcgcaggcaacggggcatatgggcggtcgcctggaagggcgatgtggaatatgcaactccccgttgcagcgcttgctggaactggagctggcgttgatcggtccgtgcaccctctcgaaggtgacgctcggcatatgtctggactgccccgacaacggagagtctggttggtgccacggagatcccgtgtatttccgccacgatacacagggccttcccagcgcccatgaatcgcaggtattcgatccgcgggcatgtccggaaacgtcaaccaacctgatcgaggcggaggtcgatctggtcgagcttccgggtcggttctggcagccgccgagctatgtgggtggctggcagaactacagccgggtgggcggactgccatcctggatccagagcgggctctatctgtcctgtcccgattgttgccgcacgatgttctttgtcatgcagcttgattcccacattccattggacgatggctccctgatgcagtggatgaacggaggcatgctctacacgttctggtgcgaccagtgcaggatcagcgggcactacagccagtacagctga

SEQ ID NO: 502756 - DNA, 435 bp, Stenotrophomonas maltophilia
atgttcacaaggattgcagccggattgctgctgtgtgcactcgccgcgcctgcggccgcccagcagatttacaagtgcgtcaccaagaccgggaccgaataccagtcaacgccgtgcgccaacggtgaggccgccaagacgtggtcggtcgaggtagcacctcgatctgagggtgtcattgaaaatgagcgccgcttggacgccattcgtcagcagaattcagcgtctatcgcgcctcggcctgcaccaacgcggcctgtctatcggaatggcggtggcggcgcacgcctccacagcatttcccagtacagggacccggacgcatgcgaagccgccaaggctgagcgggagcgtgttttccgcatgtacggctccaaccggccttacatggtcggtcgccagatggacgacaaggtctggtccgcctgcaagtag

SEQ ID NO: 502757 - DNA, 627 bp, Stenotrophomonas maltophilia
atgaccagcagcgcacgcgaggtgttgaagtggttggccgtggttctcatgacgtgcgaccacgtcgccaagatcatctatggcggctatgtgccaggtctcagcgaggcgggcagggtggcgttccccctgttcgcgctggtgatggcctataacctcgcccagcccggcgccgacccggtcaagtcggtgcgcaggctcggcatgtgggggctgatcgcacagccggtccatgccttggcgttcgggtactggataccgttgaacatcctgctcacgttcgcgctgtgtgccgccgccatctacgcagccggccaacgaaggtgggttgtcctggcattcgccgcggtggtgctgccggcattcgtggactaccaatgggccggggtagggttcgtgttgctggcgtggctggccttccattggggccagtactggctgctggtcccggcgttcgcggcgatctgctggttcaacggcaacctgtgggcgctcgcagcgattccggtggcgctgggcctgtccccggtggcgtggccggttccgcgtggccggtgggccttctacggctactacgtgggccatctggcctgccttgggctggtggcgcttatactgccgccgtga

SEQ ID NO: 502758 - DNA, 1449 bp, Stenotrophomonas maltophilia
atgatgccgcgcaccttcgcggctgcgtgccttcttgtgcttgtccagttggccgctggcgtcttcgcctcagctgttccgttcgctgccaatgcgcaggacagctacaagtgcctgtccgcctcgccgcgcctatgcgatcaaggcgaagcgtatgccgaggcgtggcagtgggcgcgcaagacggctggcggctcgtataagccttgtgtggagccgcgcacaggctcttacgttgctttgatctatgacagcgtctgtggttccggtcctctggccggtgtcaacacgttctattacgggtctgattgcaagtcgcgcctggacggcgaggcgggcatgatcaatggaacgctgtacagcggaggtgtgtgcaacaagggctgcaaggtgcaaccgaaccttgaccctgcggtcaacttcacgctgtctgacgccgccaatccgaacggcattcccatcaggcgcggcacatggaaagcgaccggcgatgtatgcgacagcgacttgcctgctcagcctgaaaagaaggatgagtattgccatcaagccggcgcgtacaccgtatgcaagtccaaggatagaacctgtttggggacggccagtggcttcaggacgtgtgcgagcgacacagcgaacaccaccggtcacatcgccacgaacaattcgcgcacgcaggccgcttcgatcagtgcgcccaacacgcctgctaacccgccgaccaatcgcccgggcgagaactggcagcccaatggtggtggcggaaacatcacgaacaacaacggcaacaccacgaacaattacaactactacaacaacaagggcgagcccaacggaaataatcccacgccgggtgacgggtcgggtccggggcagggcggcagcaacggcaacggcggcacgccgggggaaggcggtggcgaagagggcaacggcaacagcgctggtggtggcggcgactgcaagacgccacccacgaccagtggcgatccgattctcggcatgatcgcgtcgcagacctgggcaacgcgctgcgccactgagaagggcaattccggcaccgtgaccggcgacgtgggcaactgcgatgcgccgttctcggtgacgggtgacagcctgcaggccaaccaacttcgcgcccagcgggcgcagctttgcagcggcaagccgggttccggggaaggcaacaatggtgatccgcatgagggagccgaagacgttgacggccccggcaagtggtcgtggaagttcgatgagagcctgatcgacaaaagcggctttggcggcggctcctgcccgcagttcggcaccgtggactttggccgattcggcgcggtgtctctcgatagcgtcacatggtggtgtccgctggtcgcggcgatgcgtgccgtgatgctgctgctgggcgctttcatttcgttccgcatcgtctttggagatggatcatga

SEQ ID NO: 502759 - DNA, 270 bp, Stenotrophomonas maltophilia
atgcctatctgccgcgtgaagtcggctgctgtcgacgaacagcacaacgccaagaccaactccatcatccgctcccagatggtcggcctcgacctcggcaacggcttcgagttgccgttccgtgtcggcctcggccagcgcccgccgtatccggctggggagtacgacattgatcccaaatcgttcgcgctgtcgccctacggcgaccttgtcctgaagcgctacgtggatctcgttccgctgtcggccaagcccgccaccaaggcttaa

SEQ ID NO: 502760 - DNA, 1056 bp, Stenotrophomonas maltophilia
atggccgttgatcgcgcacgcttccgcatggctgtcgagggcggcgcgtggggcttttccccgctttcgcccggtgaaaagggccggctggcggcggcggcaattggcccggggagtaacacgggccaaaagggtcagcaggacgcaatcatcgactacctgacctttgtggtcccgctttccgcccttgaagaagtgaactgcaagaagctggacctcttgctgttccgcatcttcggttttcgtggcgaagtggttgccggtgcgattcgtgagaagagctggaacttctacgagcagtcggcggtgttgatcgaccgggagaatgaggtcgttggccgcgtggggatcggcggcaagaagaacaccgtgtgcatcagcctcactggtatgggttgcaagtggattcgtgaccccgcccgcatctacaagcagctgtccatgctcgatgggaagatcacacgcatcgactgcgcacacgacgactacgaaggcgaacgcctggacgtgcatgcgctccgcgaggttgccgcacagggcggctttatcgagggcggttgcccgccacgtcatcggttcatttccgatgagggccataacaccggctgcacgctgtacgtcggcggcaaaggccacaaggaactgtgcgtgtatgagaagggcaaggctgaaggcctgtcgtcctcgcgctgggtccgcgcggaagtgcgcttgtacggcaagcacatggaaatcccgctggacgtgctgttgaaccccggcgcgtatctgcgcggttcgtacagcgccttgcagaacctcattacgggcgtgtgcacgcgactgcgcacgctgcaaaagcaagtggaaacctctgtcgaagcgggtatcgagtgggcgcatcgacaggtagggcctttcctcaacgtccttcgcggagcgctcggcgattcatgggccgacttcgcagagagccgcatcctccgtgacggtcaccccggacggtttcgcggtattgccaagggtgaaccactccatcgctacgtgagagaagaactatgcctatctgccgcgtga

SEQ ID NO: 502761 - DNA, 141 bp, Stenotrophomonas maltophilia
atgtgtgaagtgaatcaggacgcgctcaccgtggtggttgggtttgtcgtcgtcgtttgcgcgggcgcgctagtcagcctcgggctggagttcgcatgggacgcgctgcgcacctactgggggcgccgcaatggtcgctga

SEQ ID NO: 502762 - DNA, 414 bp, Stenotrophomonas maltophilia
atgaagaaccagaagggcttcacccttatcgaactgatgatcgttgttgcgatcatcgccatcctggccgccatcgccctgccgatgtaccaggactacgtggccaagtcgcagaccgctgcgggtctggctgaagtcaccggtggcaagtcggcgaccgaagtggcgatgaatgaaggcaaggacgtgacgactgctgcggatatcggcctcaaggtttcgacccgctgcaccaagctggatgtcaagggcaccgcttcgactggcgaagccagcatcgcttgcaccctggcaggtaactcgcaggtcgccaacaagaccatcaccctgtcgcgcgcggcagctgacggtacttggagctgcgcgaccaccgttgtgaagaagtacgcaccgacgggttgcaccggcgtctaa

SEQ ID NO: 502763 - DNA, 297 bp, Stenotrophomonas maltophilia
atggcattgcatgagatcgcctcgatgcggttgttcgcccggcccggcggtcctgatgcgattccggatgaaaccaagatcctcaatgtccgtcgtctgctggagctacacggcctggcggcgaagatgcttgaagcggtgaacgcgcacctgcccgaaagggccagagcctgcgcgcaggcacgatcgtggatcgcctccatcatccacggggcagctcaaccaagaacgccgcaagggcgggagattctgagatgcacgagacccgcaagggcaacccgtggtacttcgacatga

SEQ ID NO: 502764 - DNA, 309 bp, Stenotrophomonas maltophilia
gtgctggagaacgagcatgcccatacggtgacccaagccagtggcaatattgggtgcgagcaacccaatgcgcgctgggtcaacgtggtgttgtccaatctgaagcgtgcgctggacggcacctaccatgccttcagattctgcaagtacgctcatcgctatctggccgaggcgcaatggcgctccaaccgacgcttcgacctgtcggcgctggtgccgcgcccgctccgcgctgccgcacggatcaccccgtggccggaacggacactgcgagatgtgcccgtatttccggctgaagcatcgtgctag

SEQ ID NO: 502765 - DNA, 588 bp, Stenotrophomonas maltophilia
atgaagattatctacagtgccgcctcggttctgatgctggcggcatgcagccccgccccctctgacgtgctggaggaggcaaagcacgcacccgttgaggctgcctccgcagcggcgacagccatcgacaccagccatggttcaatcgcaggtctccgtacgggtatgaccagggaccaacttgtcgcaaccgggcacgccataattgaacgcttggtcatgcaagaaggagacgagtacgtggtcatggacgtctcattgcgcgacggcgtaaccgtcgaatgctggattgacgatggcaggattgagcggatgcgaactacagccgaaggcatgagcgacaagaagggagttggcgtcggctcaactctggccgagttgaaagccgcctaccccggtggccgtctgattgtgggaattgaggacgggagacgctatgccaacttcgtcaaccactcaaggctagtcttcgagatggacatggacgcgcttccgaaagcatgtttcgatgacgaaagtgacggatgtgaaatacacccggacttgcgggtgcgtagcattgtcatgtattccagccccgcaggttga

SEQ ID NO: 502766 - DNA, 3744 bp, Stenotrophomonas maltophilia
atggcattcgtgaacactgaaaaactgcgcatggccgcggcggttctgctggggctgatgatcatcttcctgtgccaggtggcacacgctgacgcttggattgaactcactgggccagcccaaatctcctacacggcaccagcaacctatcagttgcagctcaaaagtggcgtcacaagcactggccccaaagctgagtatctggaagacatacagctcacgcgcaatggccaagtgatctcccgacttccgaacgggacctataccgagaacggcctgtcggcgggtacgtatcagtatgtctacaaggcatttggcgtgcgcaacttcaacggcaatgagtcttacagacagctgatctcacccacgatcacggtcacggtggcggcaccgccaaccccttttgacggcgcggagtacgtttccgcaagctggcctaattcggccgatagaggaaccccgttcagcggtactgtcaccttccggaacacgggcaacacaacgtggcgagcaggggaaggctatcgactgggtcaggccgagcgctacgtttccggcgctacgaaactcggaattgccgaggttgccgtaccccacgacgtggctccgggtggcacagcaacgttcgcgttcagcggagtagcggccagtgagaacggaccgacaacgctccaatggcaaatgaaccggaatggtgctcgctttggtagcaccagcagcgagcagatctttgagacgaccggaaggctcaatcgcggcgtcatgtatgagcaagaggtcccgaccagcatggagaccgggcggacctatcgagtcaagctgaagttcaccaacaccggtaacacgacgtggtcggcgtcggcgggctatgcattggggtcctggaatcccaatgacaatgttcggtggggcagggcgcgggttccaatgccgaatgacgtcagtccacagctgcctgcgttctttgaattcgacgtggtagctccttcattgccaggtgtctacagcttccaatggcggttgctggaagagggtaaggaatggtttggtcgggaaagcgacaatgtccaggtgacggtcaacgggccgccgtccaaggtaatcggcaacatcgatggtgtcaccagcgacgggcagatccgaggctgggcgtgctcgacgggcattgattcgtcgattgacattcatgcctacactggtggagccgccggcagtggtgggacgatcttcctgaccggcaaggccgacttggcgagtgagccggcggtggctacgtcctgcaaggcgggaggcaatcatcgcttctcgcttccaatgagcaacgagcagcgccgccagcgtgccggacaaccgatctatgtccatggaatttcccccgttggacaacccaacgatacccttgatggctccggcgcctttgtggttcctgcagcccccactggcacggtgtccgcgactccggccatgtgccaaattgcatcgggcgctcaaacctgcaacgtcacgttggcctggtctgcaacggactcacgtgcggagctctggcgtgatggcggggtgttagtgggcagtggtgccagcggctctcttgctgcacccatcggtgctggaacgagccggttcactctcactgtagacggcgatgtgatcgctagtgcacttaccaccgcaaggagggctcccatagcgcctgtcgacccagaaaatccggcgccgacggtttcccggagatacgtctacgacgacaacctccggctgtgcaaatcaattgagcccgaagtcggtgcaacggttatcgagtacgacgctgccggtaatattgcctggagcgcacaagggcttgatctctctgattcctcccggtgcgatcgcgatgtagctttttcctcgactcgacgcgtggcgtatgctcatgacgcacgtaatcgcatcgtccagacgacctatcctgatgggcttggcaacctccaggtccagtacaccgccgatggcaagctgaagtcagagacggctgtcaaccagaatggcgtcaccgtcatcaccgggctcagctacaactcgctgggcttggtcgttggccactccagaattgttgggacagcaagcccaaggacctccacctttgcctacaacgggcttggtcaacaggtgctcacgcgctatccggacggctatgaggttcagcagactctgaacgcgctggggcaaccactcaagctgcaggatggccaaggcaccgtgctggccagcgaggtgagctatgcacccagtggcaaggtctcgagcatgacctatggcaatggagtcactcgtcgcgtacaggaaaatgctcgtcagctggtgagcgaggtgctagacgtcgaggttgtcaacctaaattacagctacgattcggcaaggaatatcgtcactatccatgatggcctgcgcggcgacgcgggcactgtatcgctgggctatgatcgactcgaccgactggtacgagccaactcaccttcgttcggtggtaatgggcattatgtgttcgcctacgataccttagataacatcatctcgatgcgccttccgggaaagcgcgagcgcacgtatcactacgatgcgtggaatcgcctgcaattgcttcgcgaccatgatggcaacggcgtatttgcaatcgggtacgatgcggcaggcaatatgacgactcgaaatggccaggtgttcgagttcgatgttggtgggcggctccgcgctggcggactcgtttccaagtacctgtatgatggtggcggcaatcgcgctgccgcggaaggcgagctgtaccgtacttggaactacttggcagatggcaagctgatcgagtcgacaacggggccagatgtgtccgactacatctatttggggagcagcctgctttccattcgaaccagtacccccaatgcagtcaagatggtctaccagcattacgatgcgcgctcgacacttgctgcgaccagcgacaccagcggcaaggtgttatcccgccacatctggtcaccgtacggcgagccggacattgcgccagacgcctcgacgccaggttacgcgggacatctcaccgatcccgatacaggcttggtatacatggggcagcgctattacgatccagcgatcgggctgttcctgagcgcggatccggttacggcgcacagtgatcctgcaggaatgttccaccgctacagatacgcaaacaacaatccctacaaattcatcgaccccgatggtaggcaggcagtccccgtccgcccgcttgtcttctaccaaatcacaacgcgcaccacgaccgacagcggagcggtcaacgtcgccaggacgaatgtttcgaactacggaatcgtccacggtgcgcaaacggaagtccgcgggaccgtcacgcttctaccccaaaagtcactaggcgggacaccggccaaccccgggcctgccgtgacaaccagattgcttaatttcagcgataagacccagcagaacattgaagtgacgagcggccaaagaaccgtggagcaaaaccaggctgtgggcggtgcgactcggagccagcacctgcaggacaacgcggcagacattcggatcagtgggagcacgccgaagcagaccgctgatgcggcccatagctccggtgagttcaacagagtcaatcaatatactgacggccgcggcgtgcatgtagatcttaagcaaggcggaacgcagggacgattcactgactggaaacctcaagaatga

SEQ ID NO: 502767 - DNA, 696 bp, Stenotrophomonas maltophilia
gtgcggcacccttgggtggcgatggcgctgtgcctcgccccagtgattgcggtaccgcgccagtggtcggtaccgtccataccctcacctctcgcgttccagagcctctctggcgtgcgctattcgcagctgcgtcgccaagcggtccagttcgtgaaggcacagccgaggcagggattccagctcgtcgaacgacatgcagacggcgctttccggattcactgcagagacgttccagtgctgtggttggataggcgctcgcagcatttgctgctgcgggtttcactggatgcgaaacagcgagcgcccgacgttctgcagttacgggcgctgctgcaacgacagatgcatccattggactacctggaacaggtgcttgctggcgtgccggagcctgttttgatggatcgggtgcggtggatacttgccggtgggtgcccgatggggcgcgatgtggcacgcaatagtcgagcgtggctcgactctaaagagggaatgctgcgctcaacgaggagtgttcagaccccacttagtcgaacaacgcctcgatcgccgccaacccggcacttgcccgctccttcttccgcgccgcatccgccaccgggtccgcgccatcgcgctggatctcctcggccggaatctcctcgaagaaccggctcggcttcagccgcacgtgctcgccaaacttgcgcgtga

SEQ ID NO: 502768 - DNA, 636 bp, Stenotrophomonas maltophilia
atgagcaccacgctgtatggttcgacaagcaccgccgcgctggtggtgcactggctgctgatcgagctcggcatcgagcacgagttggtgctgctggatttcgacgcgcgcgagcacaagtcggcggagtacctggcactgaatccggccggcgtggtgccgacgctgctgatcgatggcctggtactgactgaagcggcggcgatcgccctgtacctggccgaccgccatccggacgccggtttgttgccggcactgggcacgccgcagcgcgccgatgcctaccgctggatgttctggtgtgccaatacgttgcagccggcctatcgcgcctggttctatccgcacgaggtggcgggcgaggcaaacgtggaggccagtcgcgagatggcgcgacagcgcctggaagcggcctggcagcatgtggccacgcacctgctggcgcatgggccctacctgctgggcgccacgccctgcgtggtcgactacatgctggtgatgctgatgcgctggtcgcgcaacatgcccaggcccagtgacacctggccgtcgctcaaggcacatgccacctcgatgaaggcgcgcccggcgttcgccgaggcctaccgccgcgaaggcatcaccgactggcggtaa

SEQ ID NO: 502769 - DNA, 342 bp, Stenotrophomonas maltophilia
atgcccagaccgcccaaaatgaccacgctgccacctgcagtcctggccgaggtacaggagagactgcggaacaacgggtattcgcagtctgtcgaaatctcccaatggctggctgagctcggcttttccatcagcaagacgacggtcaacgactactcacagcaactccgcactttggacgctgaagatggagatatcatcgccacgatgatgcagcgtcgtcggaagtctggggccttgagcagcagcaagatcgggctactgatcgaattggggcagcttagagttcgagagcatcagatcctcacgcaactcgctaacctggaacaggccggcgagtga

SEQ ID NO: 502770 - DNA, 465 bp, Stenotrophomonas maltophilia
atgacgcgcattcgcaaggccggcgacggccgtaaccgggtgctggccgcgatccacgccggcgccaagaagctcggtctctccgaggacgtctaccgtgacttggttgagcgcgtctccaaggagcacggggcctcccagcgaagcgccggcaaatgcgatcgccggcagctcgatgcgatcgccaacgagctgcgtcgcctgggtggaattcccgccaaggcggcgtacgcagctaaacgttgggcaggccgccccaagggcgacctgtcccctcagctgtccaagatcgaagccctgctggctgattcggggcgtgagtgggaatatgcccattcggtggcccgccacatgttcaaggtaggacgcctggaatggtgcaacccggatcagttgtccaaagtgattgccgctcttcagatcgatgccaatcgccgcgcccggcgggaggccccttcggcatga

SEQ ID NO: 502771 - DNA, 612 bp, Stenotrophomonas maltophilia
atgaccccatccattcccgaaggctaccgcgaggaccgtaacggtcggctggtgcccgaggcacagatcaagccgatcgatctggcgcgtgaccagctggtgcaggagaagatccagcgcgccctggaactgcgcgaagcactgcgcacgttcaaggcggatacgttcgccgatatcggcgcgttcgtgcagctcagcggcgagcagtacggcgccaagatcggcggcgacaagggcaacgtcagcctgtattcctacgatggccgcttcaagatcctgcgcgcctgccaggacaccatccagttcgatgagcgcctgcaggccgccaaggccctcatcgatgagtgcctgaacgactggaccgaaggctcacgcgccgagctgcgcaccctggtcaacagcgccttcaaggtgggccaggacggcagcatcaagacggcagaggtgctgtcactgcgccggctgcagttcgatgacgcccgctggcagcgggcaatgaccgcgatcagtgatgcggtgacggtggtgggcagcaagacctacgtgcgcttctacgagcgcgatgcacggggtcagtaccagccgatttccctcgacgtggccggagtctga

SEQ ID NO: 502772 - DNA, 276 bp, Stenotrophomonas maltophilia
atgaaccatgaacgtaactccgatgtgctgtatgccgccgcgaacactgcccgcgagctggagaacagcggcatcgagatcttgggcctgcacagcaacggccgtcgcgcggtgctgattctggaccgccctcccacgatggtgggtggccacctcaagcgccgccagcccaacggcagcggcggccaggaccgcgtgatggccgccgagtaccagggcgtgcagctggagtggacccagcgtcctccggtgctgcgggaggtggctcatggctga

SEQ ID NO: 502773 - DNA, 390 bp, Stenotrophomonas maltophilia
atgcagctggccctgctgccgcaagagctgtccccacagacggtgcttttgcagttgcagggccgtcgcggcgccgtcaacggcatcaccgcccgcgacctggtgcagcagatcacctcacgtaccagcaccgccgacgagcgccgcctgcgccagatcatcgagcagctgcggcgcgagggacacccgatctgcgcccacccggctcacggttaccaccttgccgccagtgcggccgaactggaccgcgcctgcaccttcctggtcgggcgcgccatgacctccctggagcaggtcagcgcgatgaagcgcgttgcgctcccggatctgtacggacaactcgggctggacaagcccgctaccgacgaggaatccaaccatgaaccatga

SEQ ID NO: 502774 - DNA, 309 bp, Stenotrophomonas maltophilia
atggccgttccgaccctccagcgttgccttggccaggtgcacaaccgcaagcgccacagcgcccagcacccacagcgaaagaagtccatcggggtgctggtgcaggactgccacatgttccccacagcgtcgcgagtgggggctatccaggtacaggaccctgactccaggcgtgagtacctgatcgaggtgtggatccacaccggcgtgctggtgatctcgcagagcaccaacaagcgctggctgctggaactggacgagattctggacctggcgattgccgccggcattgatcggggggccatctga

SEQ ID NO: 502775 - DNA, 243 bp, Stenotrophomonas maltophilia
atggctgaccgcgcccccaccgacgggctgccgtacctgcgcagcttcgcgcatcagctgctgcgcgaggcagaactccccgatcgccaggtaacggtgatgcaccgggatctgttccgccgagcgcacatcgactggcaggatggccagaacatggcctcgctgctggacagcctcaacctgcagcagctgcgtgcactggtcgaccagctgcgcgacggcgatgaagacgaggaggaatga

SEQ ID NO: 502776 - DNA, 933 bp, Stenotrophomonas maltophilia
atggcagagaagcaacccaacaagcgcggcgccaagccgctcgcccaggccgagccggtgggcacggaactggacacgagcaagctggtcgagtgcagccaggaactgcaggtgatggcgcaggccgaggcgcaggtgaagagcctggccaccacgctgggctacgcaggtgccttggacaccgactcgctctggagcatggtcgagtaccgccaacgccgctccgtcgaggacatcctcgaaatgggccggggcctgctgctcatcaaagagcaagtcgggcacggagagttcattgatcaatgcactcagcgaggcctacatcgacgcatggcgtcacgcttcatgggtgtcgcccttaaattttccaaatgggactctaagtcccttttggctgccgcaggcacccaaaccaaagtgatcgagctcgccgtcctggacgatgaagagattcaggcactggactccggtgactcagttgccggcatcaccttggacgacgtagagcgcatgagcgccagccagctccgcaccgcattgcgtgaagcaaaggctgacggcgaggcaaaggaccagcgcatcaccaagttgagcgacgatctcaacaaggcggaggagaagacagcaaaagcacagcggaagtggaagaaggccacgcccgacgagcaatcgcaggaattgctgacccagctggagcaggcggccgcccaggtgcgcatcgccattgccagcggcagtgaagaagctggcttcagtggtgcggtgattgcgctgatgcagcacgccgaacagcacgacctcaatgtcgaagagcaggttgccggcctgatcgccagcctgatcaacgacctgcgccttgtccgcgaccaccaggaggtcggcgtgacggtgatccatgaccgccgcctggccgactggaagcgggagggctga

SEQ ID NO: 502777 - DNA, 294 bp, Stenotrophomonas maltophilia
atgagcgagcaaagcatcttcgcccgcctgctgttcgccttggccgggcacagccactccggcctgcgcctgaagcccattgccgacggcattggcgaatcgcccagtaccacgttgcgcaacctgcagcgcatggccgaggacggcctggtcgagcgctcccccttcgaccaggacaactggcgcctgtccccccgaattgtccagatcgccttggcccatcaggccgaggtagcccgcgaagagcgccagctggacgacttcaagaaccgctacagccgtagccccaactga

SEQ ID NO: 502778 - DNA, 234 bp, Stenotrophomonas maltophilia
atgaacacttccggccgccccctggatgaggtgcccacccgcgaactggagctgttgctcgcctcggcccgcgaccagtacgccacggccgtgaacaactggcagtgcgccgtcgaatcggacgagccgctggccagcaccctgccgctggctggcgccgtggacgcggccgatcgccgggccgttcgcatcctgaaagagctggcccgccgccagcagggagctgcagcatga

SEQ ID NO: 502779 - DNA, 213 bp, Stenotrophomonas maltophilia
atggttcagcacctacctcccggacgcgatctgatgaacaaggtccgcgccggcatgaccctccagaacactaccgtcagcgcctggtgccgccagcacggcgtgaaccccagcgcagcccgtcaggctatctacggcacttgggcgggcccgaagggccaggcgctgcgcgcccaactgctcaaggcagccggcgtgagggacgtggcatga

SEQ ID NO: 502780 - DNA, 372 bp, Stenotrophomonas maltophilia
atgattcgattgaaaaagaaggtggtactcggtttctgtttagcgatctcggcgtatgcgtatgcgcatgcgagtgggggcgtgcgagaggctactccgaaggagcttgccgctattaaggcgggacttgaaactcagcttaaggatgcctctagtgctcggttcagtaatgtccgggtcaatggagaaggctcattctgtggtctggtgaattccaagaacggcttcggcgcctatggcggctacaccccaatgactgggttgctgttcgatctaaatggaaagttgactgctcatgtaatgggcctcgactctccggaggcagtccaaatggtatgtgaggacaaggggctaagcctcccgccggcttga

SEQ ID NO: 502781 - DNA, 507 bp, Stenotrophomonas maltophilia
atgattcgcgccctgatcgcaacggtcgccctgctgctggtgctcctgctggtggccattgccgcagcacttctctaccgcggcaatgccctggatgcgcaggctcgtgacgccacggcgcagcagcgtctgaccacgcttgaatcgcagcttgaagacgagcgcagcgctcgtggcatcgagcacacccaggccaaggcgatggcccagatcggagacgaacatgaaaatgatcgggaggcgtccgcgtccgtccctgctgccgttgtggctgacgtgcgtactggcgatctcaggctgcgcaacgacctcgccacctgccacaccgctcgcctgtcccaagccgtctctggcgccgtcgaacgtaatgcgagcgcccaactacgagcagaggtcgcgggcgatcttgttcgagtcggacgcgacgccgacaaccacgtccgggcctgccagcgcgtcatcggtgtcctcaccggacagcacccttccgtcgaggccaacccatga

SEQ ID NO: 502782 - DNA, 558 bp, Stenotrophomonas maltophilia
atgcctcccgtgagcaagatcgacctattgccggccgaggtgcgcgacgagctggatcggcgcctggtcgccaatgccttcggcggcagcatctcgctgtccgaatggctgggcgagcagggctatgagatcagcaagaccaccgtcaacgagcgggccaagcggctcaagcgccgcctggcctcgatcagtgccagcaccgaggccatgaagctggtggccgagcaggcgccggataatgccgccgagcgcggcagtgcactgctgggcctgctgcagaccgacctgttcgaagcgctgctgcagttccaggaagcggccgaccaggacgatgagagcatttccccagccgatcgcattgcgctgtacagcaaggcggccaaggccattgctgaactgacccgctcttccatcgtgcgcgagaaatgggccggcgagatccgccagaaggcgctggtcgacgcggccagccgggtcgaggaggctgcacgggccaagggcctggacgccgagggcgtggagttctggcgcaacaaagtgctgcatggagtcggctaa

SEQ ID NO: 502783 - DNA, 1527 bp, Stenotrophomonas maltophilia
atgaccaccgcccgcccagagatcggccgcgagattgccaccactgccgatggcatcgacatcacccgtggttacaccgggccactgctgctgccctttgacagtgtcctgcgcaaccgcggcggctacgaccttcagatctacgaacaagtgctgtcggacccggaggtgaagaccaccttcggctctcgccaggattcggtggtggcctgcgaatggcaggtggagcccggcggcgagaagcgcatcgaccgccaggcggcagagtatctgcaggagcagctgcatggcatcggctgggacaacgtcacccgcaagatgctcttcggcgtgttctacggctatggcgtggcggagatcctgtacaaggtcgacggtactcgcatcggcctgaaggacatcaaggtccgtaaccgtcggcgcttccgttacggcaaggaaggtgatctgcgcctgctcacccagacccagatgaccgagggcgtgccggcgcacgcgccctatttctggaacttctgctccggtgccgaccacgacgatgagccgtacggcctcggcttggcgcactggctgtactggccggtgctgttcaagcgcaacgggctcaagttctggctgatcttccttgagaagttcggcatgcccaccgcggtgggcaagtacgacaccaacgcaaccgatccggagaaggccaagctgctgcaggccacccgcgcgatccagaccgacagcggcatcatcatgcccaagggaatggagctggcgttgctggaggccggacgtagtggcacggccgactacaaggccctgcaggactacatggatgccaccatccagaaggtggtgctgggccagaccgccagtactcaaggcacgccaggcaagttgggcaacgaccagctgcagcgcgaggtgcgccgcgacatcatcacctccgatgccgacctggtgtgcgagtccttcaacaaggggccagcgcgctggctcaccgaatggaacttccctggcgcggccattcctcgggtctatcgcgtcacggaagagccggaggatctggacgctaccgccagccgtgacaagaagatccttgacctgggctacaagcccaagcaggtctacatggatcagacctacggcgacaactacgagcctgtccaggcgccgcaggatccgcctgcggtaccgacggcgatcgatggcgcccagttcgccgacgccggcggtgcggtggtcagcttgctgcgcaggcactatcccgccgcctttgccgacggcaccccgaagacgcccgatcccgctgtcgagctgggccagcagctcgatcgccggctgtcgcccattggtgctggatgggtcgagcagatccgccagctggtcgatgaggtcgactcgctggagcaattgcgcgaccggctgtttgagctgcacccgaacatgaccctggacgactacgcctcggtgatggccgatgcgatgacggccgcgacgctggctggccgtaccgacatccagggcgcgggagactga

SEQ ID NO: 502784 - DNA, 945 bp, Stenotrophomonas maltophilia
atgtctggacaaatgacccccggccaggttcgcgtcgttgacccgatcctttccgaacacgcccgtggctaccgccaggcgcagctcgtggccaccgcgctgttccccttcgccgacgtcgccgcctatggcggccaggtgatcgagttcggcaaggagtccttcaagatctacaacgccaagcgtgcccccggtgccaataccaagcgcatccgcttcggctatgagggcaagccgtacgccatcgtcccgagcgcactggaagcgccggtgccgcgtgaacatatgcgagatgcaagccaggtgccggggatcaacctgagcacccgggccgtgaacatcgtgctgcgctcgctgctgctggagtacgaggtggacagcgccaagatcgccaccaatgcagccaactacgacaacgaccacaaagtcgcgctggctggcaacaacgtgtggtccaacgctgcttcgaaccccgcgcaggacgtcgaaaccggcaaggaagctgtgcgtgacagcatcggtctgtatcccaacaccatgctgttgtctgccaaggcgttcaagcagctcaagcagcatccaaagctgattgatcgctcggccagcaccggcattcgcaaggtcaccttggatctgctcaagcaggttttcgagatcgacaacatcgtcgtcggcggcggtgtggtggccgatgacaatggcgcattcggtgatgtctggggtacttcggctgttctggcctacgtcagccctggcgctgacgtgaacgccaacgtcgaggagcccagctacggctatggctatcgcatcgaaggcatgcccctggtcgaagttccctactgggacaacagtgccaagagctggatctacggggtcagcaacgatgccaccccggtcctggcaggcatggccgccggctatctgatcagcggcgcaggcaactga

SEQ ID NO: 502785 - DNA, 492 bp, Stenotrophomonas maltophilia
gtggccaagccccgcactgcgccgcccagcgcacccaagaccgtccaggacgaccagccggccgacgtgccagtcgtggcggaagacaagactgtggacgcgccgccggcggcggatgactcggtaccggagcaaggccagagcgagctgcagtccgccgcgtcgattgtctctgcagccgatggtgctgccgtcgaccaatcgcaggccaaccatccggcagcggaccaggacgccatcgacgcgggtgctccgtcgccggaagccgacacctccattggggttgccgccggtgggggcgattcgcccaatgcactggtatctgatggtctctggctgtctgcatgctttgaagtactcagcccgttcaagcacgagggcgtggtcgtcaagccgccggcttggatagagatgacctgggaagaggctcaggcctaccaggatgcgggcgtactcggtgacgaacctgcagacccggaagggtcggagtaa

SEQ ID NO: 502786 - DNA, 477 bp, Stenotrophomonas maltophilia
gtgagcacccagcccttcgacactggcttggtgcgcgatcgcatccgacagggcgtcagcgacaaggatctgcgtcaggtccagggcagcgccgactacgccgccgttacagcgctgcgcgacttccccgcgccgtgctgctacgtgctgctggcccgggagatgccgctggagaccaaaaccggcgtttcgatccccggccagcaggcgcgcctggcgcagttggtcgaagtgaacttcgcggtggtgaccgtctgccgcaactaccgcgagcagcgcggggcgcaggtgatcgatgagctgcgcctgctgctgggcaaggttcgtcagccgctgctgggctggacaccgcccattcctggtggccgtgcctgccagctcatcgagggcaacctcgaggactacgacgctgccaccgccctgtgggtcgacgtatggaagacccaagccgttcttcaacccgagattccgcgatga

SEQ ID NO: 502787 - DNA, 510 bp, Stenotrophomonas maltophilia
atggccacgcgaatcggcaatcaggaccaaccgccgtccgaacccggctcgctggattcggaggcagtcgccggcgaactggacatcctggctgcgcagcagcagggccaggtcgacggcaagacggtgatcgtgcgcgagtacggcttcttcgaaggggcgcggatcctgccggcagcggctccgctgctggccgacctgcagccgctgtttgaggggcgcgatccgccttcgatgctggaggtgaccgatgtactgctctcgcatccggatgtgttccgccacctgctggcctgtgctatcgcccctccgccgggcgagggtacggataccgccgccgaagtgcgggcgcaggaagcctggctggaaacgctcaatgaaaccgatggcgagcaaatgctgctgttgtggtggcaggccaacggaaattttttgctgcgccggctgctgcgcaacgccgtcggcaaaagggtgaaccagtcggctacggacgcgtcttcaccgacctga

SEQ ID NO: 502788 - DNA, 3465 bp, Stenotrophomonas maltophilia
atggctgccacccgcaaccttgaactggcgatgcgcatcgccctggatatcgagcaggcgcaaaagagcctgccggtgctgcagcgggggctggcctcgatcaaggatgctggcaccgccgctggcgcaggtctggagggtgtcaccaagggtgccgacaaggcggccggcgcgctggaccaggccagccgcagtagcgcttcagccgcggaccgggtgcgcacggccggcacatccatgcagaagacggtggccgatgagatccgctcgatctccgagctcgatgctcgtctgcagcagggcgcagccagcatgtccgagctggctgacaccgaggctctgcttgatcgggtcatggcccgcgggctgatcaccaccgaggactacaacagcgcactgaagacgctggacaagcaggaagcatcgctgagccgcactgagcagcagcgtcaacgctccctggaaggcgtcatgggccggtacgacggtgcgtcggccaagctgcagaaactcgagcgcgacgagcgcgaactcaagggcgcggtggatgccggtcgcatcagccgcgagcagtacaaccgcgcccttgcggggatcaacatccagcgcaacgccgtcaacctggccgagatcaacaatcgcggccgcgggccgggcgctatctccgccgggcagtaccagatggccatgcgccagctgccggcgcagatcaccgatatcaccaccagcatcgtcagcggcatgccgatctggatggtggccgtccagcagggcggccagctgaaggattcctttggtggcgtggtgccggccgcgcgtgcgctggttggcgctattacccccaccatcgccgtggtcggcggactggccgcggcagtgggcggcctggtactggcctggaaacgggcggccgacgaagagatggctttccagcgggcgttgatcgtcaccaacaactatgccgccaccagcactgccaacctgcaggcccggcgcgatcagctcaccggtcttcaaggggtttcccgaggcaacgctgctgaggcgctgacgaaggtggctcaaaccggtcgtttcaccggtgagcagttcgagctcgtcgcccgcagcgctgcgaagatgcaggcctccgccggccaggccatcgataccaccgtcgccaagttcctctctctgaggaaggatccggtcgaggggctacttacgctcaccgagtcggagaacttcctgacagaagcccagctcgcgcgtgtgcgcgccctggtcaaagagggcaaccagcaggaggcagtggcggaggcgatcaagatctattccgatcgcctcgatgaggtcgcagatcagagcgatgagacgatgccggcgctcgcgcgcggttggcgggatgtcaagaaggacgtcagcggcgcctggggcgcgctgggcgacttcaccaacgcggtggtccagctggctggcgaatggggtgtgctggccaggctgccgcggctgtccgatctgttggggatgggtgtggtcggcagcacgctggccaagaacttcgggctcccttcctttgctgacctgaccggcaagatggctgcgcgcatccgggcggcctctggaaccaatgcgcctgtgaaggtgcagatggctggcatctatgcccccctgacgccggaggaagaaaaggcgagggaagagttcgagcgccttcgcttaagcaatctgagcaaggagaagaagcttgaagaggaaatcgccaagatccgggcactgggtaaagccggccgcatggacgataaggcggtcaaggccttggaggcggaggctcgagcacgttatgccgaaagcctacccaagaagcccaagggtcccaagtcagaagcccagaaggatgaggcagccgcgcagcgcgaactggagcgcttgaagcaacagatcgagctggtcggcacgctcgatgagacacgcaagaaggccacggaggtgtcccgcgtccaggccgccatcgatgagggcaacttccagaatgcgtcgtcgaagactaagcaggagctgctggatagcgcgaagaagcttgatgctgcgaacgctctggttgaatccaatcggaagctgctggaggtgcgggatcagattgccaaccttgaagggcgcggtcccgatgcacagcaggccaagagcttgcgcgagctcgaggtcacacgccggcagatggtcgaggctggcaaccagtccggtgtggccgaggtcgaccgtgccaaggagctggtccgcctcacagccgaactgcagaaaatgcaggagacctacaaccgcgcgatgggtgaaatgggcttggctcagcagcgcatccagatcgagctgcaggccgggctgatcaccgaagcgcaggcgcgccagaagctggtagatctgtcccggcagcagctgaccgccctgggcgatcttcccgatcgcatgcgcgccaccgccgaggcattgaagaaccccgaagcgctgcaggcagctgagcagatggccgtcaagctcaaggagatggccgccaccaccaacctgctgcagcagaacgtgcgcaccacgttccagagcgcattccgtgatgccctcatgtcgctggccaatggcaatgccaccttgggcgagatcgtgcgcagcttcttccagtccatcgccagtggtctggctgggtatgtggccgatgagctgtcggccaagctggcgtccaccctgactggaaagctgttcgacaagggcgccgaggtcggtaccgaggtggctgcggcgaccgcaacgcaggcgtcggccgcggccttgtcctctgctggtggtgttgtcaccgccggtgcaagtgccgtgaccagtagcgcctcggccttggcgggcgccggcggcggtctgatcaccggtgcaggggctctgtctgcagccgcagtccaactcaagcaagccgccatcgcactggccgcggccaacaatgccaaggccgttgtcagtatggtcggtagtattgctggtgcggccagcaacaccggcacggtcagtgtgggtacgcctactcccgtcagtagagcgcagggtggtcccgtttggggtgcaggtacaggcaccagtgacagcattcctgcctggctctccaacggtgaattcgtagcccgggccaaggttgtttctcagcccggtgcactcgcattcctgcatgccttcaacgccatcgggatggatgccgtccggcgatggggtgcctatgcctttgctgacggcggtctggtcagccagatgccctcgctgcagcgctcgccagtgttcaacacagtggcggcggctccgaccggctcgcctactcagctgggtatacgcctgatcaatcaggtatcgccgggtctgttcgaggactacatcgacgatccaggcagcgacagaaccatcatcaacaagatcaaccgcaactctgcggcgatccgccaagtattgggactctga

SEQ ID NO: 502789 - DNA, 975 bp, Stenotrophomonas maltophilia
atggcctgggcaaccgacaccgcagccaacatcaccgacctcatggcccgcctgcgggacttcctgaccaccaacgcggccctggtggcagcgaaccaacagtggcaggtggtgggcggcgtggccagcggcccgatcgcggccaacgatttcgtgtcactgaagggacgcgggctcgctggtgaagatgagatctatctgtcgctgctggcgtgggtcgtgccggccagcaactactacaacatgaccctgcgcggccacgttgcgtacaaccccgcgctgccgagcatcgacccgcctggcgccaattcgaactacatctcgatcttgggcgtgaactcgcccatcaagtactggttcatcgccaacggtcgttgcttcaaggtgatcacccgcatcaatggtcgctacgacgccatgtatggcggcttcatcttgccggagcacctgccgggggattggagctatccgttgttcatcggcgcgtccttcctggggaggaacgcgcaggcgtcgctggacacctaccagcattcgaacttctggaacgcgaatgctgatggcagcggcaacctggcattgagtcaggggtatctgttcagtccggtccaggcgtggatgccgattcggaacttctacagcggcaccaccttgacgaccgcgcgaatgaccttgccgtggtcacgtggcgtccgtcagcagaacttccggaactgccttgacggtcagcgttggctgcaacgtggccagctcgtcggcattggctgggtgcctggcaaccacgaccgaggtgggcaggtcggcgacatgccagagcgcgggcagttcttcggcagcttcgatggcgtcttctacacaccatcctttggcgccacggcagagcagatcgtgaccgtgaatggtgtggactacctgctggtgccgaacgtgtatcgaaccggcgacggcgaatacgccgcctttgctttggagtga

SEQ ID NO: 502790 - DNA, 975 bp, Stenotrophomonas maltophilia
atggcatacgccgagttcaacaatgtcccgaacgtccagacgctgatcgacctggtcgtgcagttcgcgcaggccaatggctggaccgtcgaacgcaacacgctgtcaggtgccaatcgcactgccacggtccgcattcctggggtatcggactatgtgcacctgttcaataccggtcaggacagcctgcggtcgcgcatctccattggctacgacggaggcgcgacgcctgcgcagcagcccttggtgtctcctcgcgacatctcgtcctacgagctgaccggccccttcccgcgcctgaaactcttctccaatgggaccgcgatccatgccgcgatcgctcaggcagtcgctggcgaataccgtcatcacgcattcggcgtgctggagaaggctggcagctacgcgggcggaacctatgtcgatggaacctattgggcacgcaccggtggctggagcggactgattgggcccgccgggtccaacgtggtcctgtttggcaacaacaccagcaacaccggctgtggccatgttcgcgccgattgcattgaggatggaaggagcaacagctaccaccagctgtgcaactacttcagcggagcgctcggtgtagagggtcaggccggcagcggtgtcgggtcgatctaccaagcaacgacgtccgacagctacgacagcatgtggcttggctacgtgcttgcgggcgcggatgacaacacgttctctggccgcagcgtgtttcagccgatccagttgaccgtccggcggcctggcaccacgccttaccactccccgatcggccatgtcatcggcctgcgcgcttgttacatggataggttggagcccgagcaggaagtcacgatcgcagacgagacttgggtggtgttcccctggctgcgcaagttggcgatgagcagcaacaccaacgcaccgccagcaagcggcaactatggctgggcggtgcggaagtcctga

SEQ ID NO: 502791 - DNA, 1701 bp, Stenotrophomonas maltophilia
atgggcgtcattctttccacccagagcagcacggggccgaactggcgcagcgccaacctgagtctcccgcgcaccaggatcccgctgcagttccgcgctgcgctggcaggcgttggtttctacgtggggcctggccatgaggccacggtggtggaacccgagcagcggtcagctggtccgaacctgcgcagctcgttcgatgactggtactacaagatccacgtcctgcctctgcgcattgacctgggcaacctggtcaccaaccaggtgcgctacgtccaggtctggaactcatacctccagcagcagaccctggcgtcggtgacccttgagaacggcgaaggcgtcgagctggtaggtcctggcgccccgccgttggcattctcggccctgcagcttcgccgttggcagctgtcggtcacgacagaaggtccgccggtaatcgcggcgtcgctgtcctacgacttcgtggccctggggcgccgcaccgtcacgattaccggcaatcgcatgtcggcgtggatgctgccgccggattgggagcggcctgtcaccgaaacgctggcatgggcgaccgacgtccagcagtcgatcggcggcggcgaagcccgattcccattgcgtggctcgccgaggcgctcttgggagttcagcgtgctggccgaccggcgcgagcgccaggtgcttgaacacgcactgttcgactggtcggcgcgtacctgggcgctgccggtctggaacgacgtgtcgtggctgagtgcgcgcctggcgctgggggtgcagtccatcccggtacaggccgccacgcagcgcgactaccgccccggcggcctggccatgctttggaaggacgtcaccacctacgagctggtggaagtggccgacattgctgccgacagtctgcagctggcccgccccacggccaacgcctgggcacctggcacacgggtgctgccctgcaggacagctcgtattgccgagacccccagcctggaacgcgtgaccgaccaggtcatgcgctcgaccgtgcgcctggcggcggtggagacctgcgactggccagcagcggcgccggcggcggtctatcgcggtcgacctgtgctggagcagcgccccgacctcgaccaggcgcagacggccgagttcggccggcagctggtggtgatcgatggcgatatcggccctgttgccgtcgatgacatcaccggcaaggcatggccactgcagtcacatgcctggcagacctggggacgcacggagcaggccaacctgcgcagcttgctgtactggttgcaaggccgggcggccgctctgtgggtgccgtcttgggccgacgacctggagctggtcgagccagccctgaccacctccagcggcatcgtgatcgcctgggcgggtgtggctcgcttcgggcgtgctcagtccggccggcgccacctgcgcatcgagttgttcagtggccaggtgctgtaccggcagctgattgaggccacggagctggatccacagcgggagttcctgcagctggacgcgccgcacggcatcgccctgcagccgagtgccatccgcttgatcagctggatggtgctggcccgcctcagttccgacaccgtggagctgtcccatgaaaccgatggtgagggcgtcgcgcgttgccgcgtgtccttcgccggcattggcgctgaggagagcgaaccgtga

SEQ ID NO: 502792 - DNA, 783 bp, Stenotrophomonas maltophilia
gtgagcctgttctcccgccatgttgagctgtatgagtttgggcgtggttcccagcgctggcgctacacgtccagcgatcgggtggagatctacgactcgcagtcgttcagccccgaggcaatcaagcgcggccgacttggccagtctgcccaggaggccaggtccaatcttgaggtgaccgtaccgctgtccctcacgttggcttcggtgctgcggccctatccgccgaccgatcggatcattgttcggtggcggcggatccggaagagcgacggcgcgatccgcggcacctggaatggcgtgctgagcgacttcagcgagcgacagaatgatctgatcctgacctgccagagcaatgccggcgccgccgcgacgaacggccttcgccgttgctggcaggcgcagtgcccgttcgcgttgttcgatgccgattgcggcctgaatccggagctgttccgagtcgatggcgtgttgtcggccgcatccgctcagacgatcacgtccactgccttcgcggcgaagccggacggctggttcgtcggcggcttcatcaaatgggtgcagggcacggccatcgagtaccgcttcgtggtgggccatgttgggccgaccctcaccttgcttaccgcagcgccgctcgctgcgggcgcactggtgtctgcctaccccggctgtggccacgccctgcagatctgccacgagaagttcaacaacgcaccgaactacggcggccagcacaccataccgccgaagaaccccttcggacccgatcccatcttctaa

SEQ ID NO: 502793 - DNA, 231 bp, Stenotrophomonas maltophilia
atgtgggttcaaatcgtcgtaatgatcgtggcgctgatcgtcagttacgtgatgcgcccgaagcctacggttccgaagccggccgccctggaggacttcaatgtccccaccgccgaggacggtcgcgagtgcagcatggtcttcggtacgaactggatcgatgatcccaacgtgctgttctacggcgatctgcgcaccacaccgatcaaggtcaagggtggcaagaagtga

SEQ ID NO: 502794 - DNA, 228 bp, Stenotrophomonas maltophilia
atggatcgtcctgtcctggttaccgtcgagcacgcccgcgcggccaagctgggcgaacacagcggcgtgctgtgcgccgccggcatccgcagctggatggatcgtcacggtctggatctgcgtcgcttcctggatgaaggcctgccggtagagcagttcgaagcgctggacgacgccttcgcacggcgcctggcggcgatcgcccgcgaggaggctggccgtgggtag

SEQ ID NO: 502795 - DNA, 2259 bp, Stenotrophomonas maltophilia
gtgggtagtggcaagaaacagaccgtaggctatcgctactacatggccctctatatgggcgaatgcctcggcccggtggacgcgctgcgggagatccgtgtaggcgaccgcaaggtctgggacggtagcgcgcaaacggcgtggaccaaggtgctcgggatgaacatccccaggacggttcctgccaccggcccgattacagcgtctcgctcgatcaccatcctggcgccggagatcttcggcggcgacaagggcgaaggcggcatcgtcggcacgctggaggtgcgcatgggcgagcccgctcagatgccaagcacctatctgcagtcgctggtgcccggcccgtggccagccgcccgtggcctgttcacgacggttttcaatggccaggtgtcggccatgaacccgtacatcaagaattggacgaagaaggtctcgcgctggcgccaaggctggaagaaggggctttggcagggcgacctggtgcagatcgatgaagggatgaacccggcgcacatcatctatcaggtgcgcacagagggcatgggccacccgatcgacgtgatcaacgacgagagcttccgcaaggcggcacagacgttgaagaacgaagggttcggcctgtgcctgaagtggtcccgatcagttcctgcaggcgagttcatggacatggtgtgcgaccacattggtggcatgcgcatcgaggatccggtgacggggctgaccgagctggtgctggtgcggccggactatgacccagccaccctggaagagatcggcccggcgaacatcatcgagctgcttgagtggcaacagccgatgctggaaggcagcgtcaatgagatcacggtcgtctaccgcgatatcgccaccaacaaggacgcagctgtcacctaccagaacctggccagcgttcaggcgcagggccgggtcgtcagcagtcgcaagaactatcccggcctgtggaacgcagcactcgcggggcgggttgctgcgcgcgaagtagctgcagtgagcagtttgccctgcagggtgaagatccgggtgcgtcaggatgccggccccttcaagcgcgggcaggtgcgtgccctgtcgtggccacggcgcggcgttgcccgcatgccagtgcgcatcctggacgtcgacgacggcacacagaccgagacggccgtggtgttgaccgtcgtccaggacgtcgccggcatggccgctgccagctacatccagccttccgagaatgcctgggtggagccggacaccaagcccaagccggtcaccgtgcagcgcctgcaggaggccagctaccgcgacctggccacgactctcggggcgtcggagctgtctgctgtgtcgcctgacgtcggctacctgacgtcgatcggtgtacggccgacctcggtggcgttcggctacacgttgcagacccggttgggaagcgcgccgttcgccgaggcgggcgcagccgacttcgctcccactggcctgctgatcaccgcaatgacggccaccacaacggcgatcgcgctgtccgccggcgtcagcctggacatgatcgaggtcggcaccgaggcgctgatcgatgacgagctggtccgggtggtctcgatcgacccggtggcggcgacgctgaccgtggcccgtggctgcgtggataccgtgcccatgccgcacgccgtgggcacgcgggtgtggttcaccgacgaatacgtcggcttcgatggccgtgagtacctggccaacgaatcgccccaggccaagctgatcacccgcaccagccagggcgagctgaacccggatctggctacgacgatcgggctgacgctgcagcgtcgccagatccggccctatccgcccggccgcttgcgcgtgcagggcgaggcctacccgccagagctgtggaccttcggcaccgaactgacggtgcagtgggcgcaccgcgatcgcatcctgcaggccgaccagctggtcgacaccacgcagggcaacatcgggccggagcctggcaccacctacaccgttcgctggtacctcgccggggcattggtgcggacgcaggccgccatcagcggcacgaccgacacctacacgccgcccgccggcagcggtggaaagcagatccgtgtcgaagtcgaagccatccgtgatggctaccgcagctggcagatccagcagcacaccttcctgtaccgcgcgcagctggtgaccgaggcaggcgatcgcctggtcaccgaagcgggcgaccccctgattctggagtaa

SEQ ID NO: 502796 - DNA, 1275 bp, Stenotrophomonas maltophilia
atggtcgacgtaaagatctctggcctccccaacgccgctgcgctcaccggcaatgaggcgattcctgctgtccaagggggcagcaacgtgaaggtcctggtcagcgcgattcgtaaaggcttgctcgacgtgggtggcatggatgcaccggccgagaaccagtccctctacttcaacggtgaggcgtggttgccgtacagcctcacctccgccggccgcgccctatccgccgtcgcaggcaccgccagcaccttcccgtacttctcggcggcgaacgtggtgacgctgggggcggttggagctacggggctggcttcgctggctgcagccaatgctgcggctgggcgggctgcgattggtgcggcggccagcggtgcgaatacggatatcacgtccatttcagccgatgaccttgtcttgaatggcgtgacaaggctgacgctacaagtcgcaggcggtactacaaccggcccgagaatcaccagctatcccgcgagcaatacgtcattccccgggaacatctattacgacctaccagtaaccgcaagccagatgctcattggcctttatgccggttcggttaaaaacctccgcgcatatgccacaggtgtcacgtgggttagcgaccggatgattgttgacaatgtggcaaataatgtccggccgaacacgacgaattccacgtcgctaggtacttcgggcgcggtttgggcgaatttttacgtgcagaatgccccaatcgtaggttctgacgaccggctgaaaaccgagcctcgccagctgcgcgaagctgagttcaaggcggcatcggcgattgcccgcctcccggctgtctggcgctggctgaaccgcgtgcacggcgacgagaactgcgagccggaaggcaatgaggcccgcaagcacttcggcccgaccgtgcaggcggccatagccgtcatggagggcttcgggctggacccgtttgcctactcctacatctgctacgacaagtgggaggcagagccggagcagtggcacgagtggcccgcgaaggaggcggtctacgagaccatccctgcggttctggacagcgagggcgaggtggtcgagccggagcgcacggtgctgatcgagcctgccgtcgaggctgggcgcgagctgatccagccagcccgcgaagccggggaccgctacagtttccgcaaggaagagctgctgtgcttcatcgtccgcgcactggcgcaggagattgacgggctgtcggagcgggtggccgccctcgaagccgggaagtag

SEQ ID NO: 502797 - DNA, 762 bp, Stenotrophomonas maltophilia
atgaagaccacaacgctgttcccctggccgggcgggaagacccgcctactgccgcacctgctgcccctggtggccgagaacccccaccgcacctatgtcgaggcattcgctggtggcgcggctctgctgttcgccagggagccggccagggctgaagtcctaaacgactgccacggcgagctggtgcgcttgtatcgcgtggtggccaaccacctggaagagttcgtccgccagttcaaatgggcgctgacgagccgcgagatgttccgatggtgccagctccaacacccggacaccctgaccgacatccaacgtgccgcacgcttctactacctgcagcgactggcatggggtggcaaggcgactggccagacccccggtttcggccggggcggcaagggcctcaacctgctgcgcattgaggaggatctgagcgctgcgcacctccggcttcacaaggtcaccgtcgagcacctgtcctggcagcagtgcgtggccaagtacgatgccgccgacagcctgttcttcctcgatccgccgtactgggagaccgaggggtacggcgctccctttggcatggaccagtaccaggagctggcccgtcagatggcagggctgcgtggcgcagccatcctgacgatcaacgaccacccggccatgcgggaggtcttcagtcagttcagggaccgggtggtgccaatccgttacaccatcgggcgccaggccgttcagcggcgggagctgatctacacgacctggtag

SEQ ID NO: 502798 - DNA, 1206 bp, Stenotrophomonas maltophilia
atgagcacgtcggaatcacccgcaaagaccattggattcatactcaagctcatcaggaagcacggctgggtcgtaggcataggcagccttttgcttctcatccttcagttcgtgagaatgaactatgtgccgcaactagcgattaccgacctcggtgtcgtcggtgcctccatgctggccgtcagcgtgatcggtgcggtttatttcttggtcccgctattcctcccgggctatgcattccatctgctgagcgaggccagggtcatccgcagacctcagcgtcccgagctccggcgtcagtacgcaacacgccggatagccgtaatgagcgagtgcggttgctgcggctcgtcactaccagttcagtcgctgactaaacgcaggaggtacgtctgggcgctctcgctgctggccatctgtgcaggcttcctgctcgcgttcctgacccacgcagtgcttctgttcggcctgtcggaccatctggtattcgaacttgtctacgtcgtggtcgcgctggtgctggcggcggttctgctggcaagtgcccagaccctaaaggggcgacgcttcctcagccactgcgggctctcatggacaatgattctcaccattgccgcgtggtccatctacgcggtcgtgattccgaccgcaacgttgctctacgaatttctggctccgccggaggcgcagatcaagccactgggcatttcagcactgcttctgctggtgcccatcatcaactgggtgatctatcagtcaggccgaaagaagacgtggaaccgcgtcggaggcctcaccgtagtcgctatcagcctgctcttggggctgggtgccttcaaccatatcgccgatctcagctttgccgcactcaagctgggccgcatggaaggccaaaccgtcatcctctccgccagaggatgcggcgtcctccgggaggccggcatcatcgaccaatgccgggtcacgacgtacgacaacggcctttacagcgcagggccggtaagtgtgatctcaaggattggcgcggaggtcctgattggctgtcggatcgccgatacgccgacggagatgcgcagcgtccccatccgccgggaggatttttctggcttccggcctgcggcatggagtggcagctcccagcggcgatcggcacttccccgagttgcaactcgtgcttgctcggcagcagtcgctacgccggaatag

SEQ ID NO: 502799 - DNA, 933 bp, Stenotrophomonas maltophilia
atggctcgggaactttgcttcaatgagaggagcttgcctgtggcgcaagccgatcgtcaggaagtggcgcgacgaattgcggacatgagcgatgctatctcggtgttggttcatcagaagctcgctgatcctgtcttgcggatgggctgcagcctgactgatcttgtggtgcaaggagatgccacgctatatgactacctaattgagggacttcgaggggagcattccgagagaagcgtgttcatgatgggccttctgcacaaagtgccctgtgaggctgatttgtcaggggagcttgtgaagcggagcctggagatcgaatctgaatcggtaggtttgctatggtcaatggtcggtgatttcgtagcctgtagcgtggccggagacgaactctggcgtcaggataaagcggagttcagctgcgatgtgttgaatgagcagggtagcgtggagagatatacgtactccgttgatcatgtatccattccagatcatgcttaccaaatcgttgatagacatctggatagtctggctgttagcaccacatcgacagcattctgggctgacagagcggtacttctgccccatctctcatttggcctcgatgttgaggcgcagattgccgggatcgatgaagcagagtttcgcttgattcttgggcgtcttcgtgagctggatgccaccgcaaaggagtggaagcagcaagaaactagcttgccgaggtggcggagctacattacacccgaaagcgaaagcgcgaaaaagaacccaaaggtagtttcagcacgaacattcaaggatgacgcgggagctgctacgttctttgaatggcatgctcgatttggggggggaggtagaattcatatcttgtttgagaaggtcgggcataagatcaccgttggatactgcggtaaccacctctacttgccgtag

SEQ ID NO: 502800 - DNA, 1110 bp, Stenotrophomonas maltophilia
atgcttcgctctgtaagcctgaggaattttaagtgcttcgtaagcgctgaggttccgcttggcgggttgactgtgttcgcaggccaaaatggctctggaaagagtagtacgattcaggcgctgctcgtcttgcgccagtcgcatctggctgggtatctgggggtggggcagctgctgtggtctggagacctggtggatctgggtggagcgtcggaggttctatgtcaggcagctgaccaggattgtattgaattgtgccttgtgacgggcacgggtggaatagagtttaaactagattatgatcgggagcgtcgtgaccttctgccaggtacttgggttgatgctgaaacgatactggcgccttcccttttctctcagaaatttatgtatgttcgtgcggaaaggatcgggccaaggaagattttgcctgcttcagattccaagctaacatcaaacgatatcgggtcgctgggtgagtatgtggttcaccatatttatgccaaggctggtgaggtctcagcgagcgatccaagatactgtgctagtgcgatttcaagcatttttattcatcagcttaatggttggctcgacaaggtttcgcctggcggggaagtggagattagcttgatcagtcaagctgacgccgccataggtggattcagctttaggcaggagggcgacgtaaataccagggtattccgctctacgaatgttggatttggcctaagctactgccttccggtaatcttctcgctgttggcttcagatgagggttcgctcgtgataatcgagaacccggaagcgcatttgcatccttcagggcaaacacatcttggtcggcttgcggcaagggccgcggcggctggggttcaagtgattgttgaaacacatagcgaccactttttgaatggtgttaggattgaggttaaggcgggaattctcccatcctcagtctgcgcagttaattatttttcgcgaagtggggcagtcggcagagttgaatctccgacgctcgacggagatggaagattgagccattggccgcgcggattctttgaccagcatgagatgaatttggcggcccttctcgcacccaagagagcatcgtga

SEQ ID NO: 502801 - DNA, 1326 bp, Stenotrophomonas maltophilia
atgacgacaataaaggacctagccgaactgattcaaaagccgtctgaatggctagcttctgagttgtcgtctgcgggaattctgatctccgacttcgagcggcctctcacgcaattcgaaaagatcgatatccttcgattcttgaggcaagctgcgccttcgcggaaagggcgagaggctgtctccgtagcaagtgatgagcttggagatcaagccttaggggacggcgtcgagctggaactggatggctcagacgatagcgattcatcgctgcacatagatagtccctttgatccggaaaggattagggtcaagactgtaaatcgcaccgtggatcttgtgattcgtagaattggtcatggcgagatcgacgtcgcaccagagtttcagcgtcgcgcgcgtgtgtgggacaagaggagaaagagtcgcttgatcgaatctctcctcctaaggatcccgcttcctgttttctatgttgccgcggatcccgcggagaactgggccgttgtggatggtttgcagagaattaccacgatccttgactttgttgaggggcgctatccactttatgagctggaatatctcgaaaagtttaacgggatgtgcttttccgatttgcctcggcaaatacaaagaagaattgaagagacggagctggtaattcatgtcatcgagccgggtacgccagagtcggtgatgataaacatcttcaagagaatcaataccggcggtgtttcacttaatggacaggaaattcgaaatgccctcaatagagggccggtacgtgattttctgaggaagttgtcgtcatcagaagcatttctgcgcgctactgacgggagcgtgaatgacaacagaatggatgcgcaggagtgcgttctaaggttctgcgcatttcatatggataggtacgagaagtacatgtctaatgatctggatggcttcctaagcaatgcgatgaagaagataaacgaactcaacgacaaggataggaagtccttggggcgtgatttcgagcgcgctatggatgcggcgcattcaatattcggggaaagggcgtttagaaaaatatacgatgtggaagctgcgcgtcggcatccagtcagtaaggcgctattcgagtcttggagtgttaatctggctcgcagatcagatgatcagataaggactctagctgtccggcgaaagcatttgatcagggttttctctcaagagataaatagcaatcgagaattcgaactttcgctgtcttactcgactggctcggcgcagcgcgtggcaacgcgattctatatggttaatcagattattttggaggcactttaa

SEQ ID NO: 502802 - DNA, 621 bp, Stenotrophomonas maltophilia
atgaccgacccgcgtactccctgcaccgtgtgtggcgccatgatcctgctggcgacggcggcccggaacgatgggctctgcatgccgtgccggaatggcacgcggcaaagcatggaaatggcgaagacgcgagatcgggaggttcgcgaggagcgcaagcgcttcgaggaatcagcagaggggcggcattggcattggttgatcgaacaagtccacgggaacggttgtggattttccggattgtcagtgcaggatcagcgctactttgcgatcaacgcgctcatcaatgatgtctatcgtggagggcttgatgcctatttccaaaattctgctggcggctacatcgcggaagcgcttgcagggcttggggagatgcagcagcttgacgtgcgagacatcgtgctcgcggcccagcagctactgtttggcaatgaggccatggaagatcatcatgcgcagagacgcctgcagatctatcgtgccgacgggtatctcgacgatgaagtcgaaacagcacttgatgcgctggatgggcgattctatgcactggtcgacgacggccagcttgaagaactgctgaaagcgtacgcagaacgtcacaggttgtacgccgcgttctag

SEQ ID NO: 502803 - DNA, 900 bp, Stenotrophomonas maltophilia
atgtctccacgagtcaaagtcctgagcttctctgcattgatactgatcgtcttggcgggagtcagtttttggtatgtcccaaccaaagcggacacacaacagcgcaaacctgattctcaaaccaatccgccaaactccaaggatcaggccaactctagcgataccgcctcatccctcacaggtcctgagttgagttccaacacacaggatgcagcagccggatttcttgaacttcgttcacgtgcagaagccggggacgtagtagcacagcgcaaactggggcagatttaccagcattgctccgttttcagcatttcccattcgaacatgtatgcgacgttggacgcatacgcgcgcctcagcgggaaaacgcaaggcgcatacgatgacatcaagaagcgcttcgcagcgacctgctcggtcgttgacggcggcgacgtgatactcgaagagcactatacaaagtggtttgaacgcgcggcaaaccacggcgatccttacgccaggatttacatggcctccagcaagtggaccagcctcaaacctgatgactatcagctactggcacgcgatgcggtcaattctgcagacccggaggcaatttttgcactgggagatctcctagcgctcgcgccagagggaaccgatctcggtgccttcaatgcaagcgctacgggcccatacgccaactatgcctggggcatcgtcgcctgccgaatgggggcagattgcggagccggctcattccgcatggattcactatgtgtcaattcgggcgtgtgcggatcagagaattttgaagacgccatcaggagcagggtggttcctgctggacagcaagagtcgcttgatagagcaataggagaagtaaacagagcagttgggaagaagccatcttga

SEQ ID NO: 502804 - DNA, 495 bp, Stenotrophomonas maltophilia
atggcggccatccttccttgcgcgcacgccatgagtgagtaccttcgccccgtgcagcctccgcacttcgccgccatcggcgcgtggctggattcggccagcgcaacccggcgctgggccggtcccggcgtggcgtatccgctcgtgccggacgcattcgcgcacgcactgcaactggagcagcgcccgggttgggtgctgctggatgcgcatggccactgccttggtttcggccagtactggccaacgacctccggcacgctgcacctgggccgcatcatcgtttcgccgcgggcacgcgggcgtggactgggacgtgtactgatgcaggcgctgatggcgcaggcgttgcagtcgcccggggcggagcggctgaccttgcgtgtctatcgtgacaacgtcgcggcggcgaccctgtaccgcgacctgggctttcagccgatggaagacgcttcgacgccggaactgctgttcatgcagcaccgtgccggctga

SEQ ID NO: 502805 - DNA, 705 bp, Stenotrophomonas maltophilia
atgggaacggcgttctacacaatcgcaggcacggtcaacaccgccttcatcctgctgagcctgttgggtgtgggcgcgcagttgcgcttggtgcgcgaccgtcgggaacgagcggatgcgactgaaagcgccactgccgtgctgtcgctgaatcagttcacggtcagcttcctggcctacctgtcctttttcgtctatggctacagcgtcacgccgttcaatcactttattgtctggcctcgcttgctcgcgtcggtgctggtcatggccatcctggtggagatctggcgcgaccgacggaatcgctctgccacgaccagcctggtgacggccgtgctgctgctggcctgcgcactggctggcctggcttggggcgaccgtcatgtggatgagggcagggtagtggccagcgcgatgatcgtgggcatcactgccttgctggcgcagggttacgcgcaccagatcctgctgatcctgcgcaatggccacaccggtgcggtgtcgttgcggatgagtcagctgatcctgctgatggatctatccacgattgtgtttgccttcgccatgggcatgcggatgggatggccgttgctgctgctggcagtggtgagtggcagtaccaaactggtcatcctttacctcttccattggcagcaaggaatgtccgcgcgggcgcggcgaagtcatgctggggcgtctgcgtga

SEQ ID NO: 502806 - DNA, 243 bp, Stenotrophomonas maltophilia
atggtcaatatcaaggtggtgctgactgatgagctcaaacaattcgtggaccaggaagttcgagaaggcgactacgccagcgcttccgagtacgttcgcgaccttctccgtcagagtcggcaaagcaaggctgaagacctgctacgccagttaatcgcggaaggccttgcttcggggcctccggcccccctgcctccggggtacttccagagactgcttgagcgcgcgtcgaatcgagaatga

SEQ ID NO: 502807 - DNA, 870 bp, Stenotrophomonas maltophilia
atggagggcccagacacggaaaaagccgaacggggaggcccgtccggcttttgtgcattatccgggtttccggggtccgctgccacctttccgacggacggcttcaccggccggtcagccgccctgcccggtagtgccggccgctggccggcaatgccaaccaaggttggcatctaccagggcctggccacgcaagtgcagggcggtcagctgccccgcccggtcgtgccggccgctggccggcaatgccaaccaaggctggcatctaccagagcctggccacgcaggtgcaggtcggtcagccgccccacccggtcgtgccagccgctggccggcaatgccaaccaaggttggcatctaccagggcctggccacgcaagtgcaggccggtcagctgccccgcccggtcgtgccggccgctggccggcaatgccaaccaaggctggcatctaccagagcctggccacgcaggtgcaggtcggtcagccgccccacccggtcgtgccagccgctggccggcaatgccaaccaaggttggcatctaccagggcctggccacgcaagtgcaggccggtcagctgccccgcccggtcgtgccggccgctggccggcaatgccaaccaaggttggcagctaccagagcccggccacgcaggtgcaggtcggtcagccgccccgcccggtagtgccggccgctggccggcatgccaaccaaggttggcatctaccagggccaggccacgcaggtgcaggccggtcagctgccccacccggtcgtgccggccgctggccggcaatgccaaccaaggttggcagctaccaaggccaggccacgcccgtagacgcaggcggccgcgccggggcgtctag

SEQ ID NO: 502808 - DNA, 663 bp, Stenotrophomonas maltophilia
atgcgtctttcgcagctgatcgtgctgggcgtgctgctgggcgtgggagcaggctggtggctgcaccccgatgcgggtgagccggtggcggtttccccgcccgcagtgcaaccagcggtcgctgcggttgcaacgccgcgcgtaggcgctccggctcccacggccttgtcgccgtccagcgccactgatgcaccgtccggcctgctgctgccggtgcagggcatcctggcctcgcagctgcgcgataccttcaccgatgcacgcagcgaaggccgcgtacacgatgccatcgacatcatggccgatgcaggtactcccatactcgcggtggctgatggcacggtggaaaaactgttcgacagcaaacgcggcgggctgacgatctaccagttcgagcccagcggacgctggtgctactactacgcgcacctgcagcgctatgccgatggcctggccgagaaacaggcgatcaagcgcggggatgtgatcggctacgtcggcagcaccggcaatgccagcgccgaggccccgcacctgcacttcgaagtgcatgtcttggggccggagaagcagtggtggaagggagagtcgatcaatccctatcccttgctgaagtcggcggcaccgatgcccggcgctgctggcgccgcaacgccacagtga

SEQ ID NO: 502809 - DNA, 774 bp, Stenotrophomonas maltophilia
atgactgcaaagatcgtcgatgatctgaccgatacgccgagcaacaaaaaccgcgaagcggtcggtcagggcatagccaacatcgcatccggctttgttggcggcatggccggttgcgccatgattggccagtctgtcatcaacgttaagtccggcggtcgtggtcgcctctcatcactggccgcgggcgtattcctattgttgatggtggtatttgcaggcccttgggtaaagctgattcccatggcggcgctggtcgctgtaatgatcatggtctccattggcactttcaactggggttcactggcggcacttaaggcaaatcccaagacttctagtgtggtgatgatcgccacagttatcgtgacggtgtccacccatgatctggcaaagggcgttttgatcggcgtactgctctcggggctgttctttgctcgcaaggtaggccaggtgcttcatatcggctccacttctgaagaaggtgggcgtctgcggtgctacaccgtgaccgggcaggttttctttgcctcggctgaccagttcattgctagcttcgatttccgcgaggctttggagcgcgttcaaattgacgtgggccgtgcccacttctgggatctcagcgcggtgggcgcactggacacggttgtggtgaagttcaggcgtgaaggtactgaggtcgaaatcctaggaatgaacgaagccagtgcgacgctggtggatcgcttgggcgtccacgacaagcccgacgccgtcgagcggctgatgggccactga

SEQ ID NO: 502810 - DNA, 891 bp, Stenotrophomonas maltophilia
atgacagacaagattggacactcccatatagatcacagcggcagtgtattggccgccaccgacgcatccgcttacagcgagagcgtggcgcattacgccgcttgggcagcgcacagactggaagccccgctggaataccttcatgtgcttgaccgccatccggaagcggccagtaccgcggacttcagtgggaacctcggagcggatgcccagcccaggttgctggaagggctcgccttgctggacgagacccgcagcaagctgggccaagaacgaggccgcctagtgctgcaacaggccaaggggattgcggccgctttccatggcatcgaggcggagacgcggatgcggcatgggtccttggtggacaccctcatcgagttggaaggcgatgcacgcctgtttgtccttggcaagcgtggcgagcatgcggatttcgccaagggacacctgggcagccaactggaacgcgtggtacgtgcagtccatcgcccattgctggtggcgtcgcgcagctacacggaaatcgaacgcgtgctgatcgcgttcgatgggagcgccacgacccgcaagggcgtggaaatggtggcggccagcccgttgttcagtggactcgatatccgtgtgctcaccgtcggagcgaccaatgccacaaacgaagccgcattgcgctgggcgctggacacgctggccgcggccggattgtctgcggccggcgcggtgcgaccgggcgaagcggaagaggtgatcggccattacatccgtgacgagcatgtggatctgctggtcatgggggcctatggccactcgcgtatccgccagctgattgtcggcagcaccaccaccacgatgctgcgcacctgccgcgtcccggtgctccttctccgttga

SEQ ID NO: 502811 - DNA, 1104 bp, Stenotrophomonas maltophilia
atgatggacgaactgctggagatcgctgatgttcgactgggcggtgatcgcccatgggatatccggttgctggtcgatggcgtcccggagcgcgtatttgcacagggcaatctcggccttggggaaagttacatgaacggcgcatgggagtgcgatcggctggacgaactgttcgatcgcatcctgcgtgcgcggctcgatcgccacgtcaaaccgttgcggctcatgtttcattcgctacgggccaagctgctgaatcggcagacatcgcgacaggcctgggaagtcggcgaggcccattacgacctcgggaatgatttctacacggcaatgctggacccgcgcatgacctacacctgcggctactgggccgatgcgaagaacctggcggaggcgcaggaagccaagctcgacatgatctgccacaagttgcgcctggagcccggcatgcgggtgctcgacatcggttgtggctggggcagcttcatggcgtacgccgccgagcactacggcgttgagtgcgtgggggtgacggtttcgaaggagcagaccgcatgggcgacggagcgttatgccgacctgccactggagttccggctgcaggactaccgctccatcaacgagcgcttcgatcgcatcgccagcgtcggcatgttcgagcatgtgggtcgcaagaaccatcgcagctacatggaagtagctcatcgctgcctggccgatgacggcctgttcctgcttcacaccatcggcaagaaccggcgcaagtccactaccgacccgtggatcgatcgctacattttcccgaacggcgagttgccgtcgattggccagatcggtgatgcttgcgacgagctcttcgtcgtcgaggatctgcacaacttcggcgccgactacgacaacacattgatggcgtggcatgccaacttcgagcaggcatggcctcatttcgaggacgaactggggcaacggttccatcggatgtggcgctactacctgttgtcctgcgccggtgcattccgcgcccgcgacctgcaactgtggcagtgggtgctgtccaaggatggggttcgtggcggctatcagcgcccagaaggcccgaggtaa

SEQ ID NO: 502812 - DNA, 513 bp, Stenotrophomonas maltophilia
ttgctcctgatcccccagcacaacctggtactggccacccggggcagcacgcagttctttctgcgcatctatgagcttgcgctgcaggccagcttccgagcggacttcaccatggagcagctgggcaaagagctgggcctggtggtggatcagttgtggccggcctatgagagggcggctctggacgccggcataccgcgggaggcactcggcactgagctggtactgggtggctggtcaccccgcgcggggcgaatggtggccaccgcctatgcgaaaagcgacagcggcacggccgcggtggtccagccgctggccggcgggctcgcgtccccgggggagccactacaggggagacccggcagcttcgctcccgaggcactgttggctgctgggcgcgcccagtcggtgtggctgaatgaaagggccggccgtctggtcgcaggagggcggcttctcgttgccagcctcaagtccacccaagcgctgatctcagacctagggcccgtatag

SEQ ID NO: 502813 - DNA, 513 bp, Stenotrophomonas maltophilia
atgctcactcccagcagctatcaaggcatccgctccaccccgattccgtctggatgggtccagacgggtgaccgctgggcgctttggtacaacggacgggagacggccagcgtggtgccagatggccggccaggcctgcgcctgtggatggaaggccagaagttctggcaggtgaaggatgtgcgcgtggccagcctgcggcagggcaagcgctttgccgaacgctggtgtgcggccagactctacccgggcgtacccttgcgagaagcggtggcccgcctgaccgatagcacgcccattgagccagcgccgctgctccctggcctgccgccgacgcgcgagcaactgcagcaggcccagcggctggacgaggcctcagctgtggcggccgcccgggttagggcggcgctggcaccgagacaagcgccggtggtgaccagacccagggcaaaggacccgatgaagacatgggttggggcagggagaagccagttgccgcgagcgcacgtctga

SEQ ID NO: 502814 - DNA, 447 bp, Stenotrophomonas maltophilia
atgatgaccgccaccaatcgcaagaccgccagcttcggcgtgccgtgggagtcggcctacgggtacgttcaagcagtccgggttaacaacacgattttcgtctccggccagctttcgcatgcaccggacgggcagttggtcgcacctgccgaccttggtgcggacggcaagcctgccaacttcgacaccatggaagcccaaatgaggcgcacctatgagaacgcgcaggtgctgctggccgagctcggcgggtcgcttgccgacgtggtcgaggaaacgctgttcgtcatcgacgtcccggcggctttcgcagccagtggcaaggtccggccggccgtgtacggccaggcggtgccgcaggtggccagcaacttgattggtatctcggcgctggccttccccgagcagctgattgagatcgccttccgggcggaagtgcagggttaa

SEQ ID NO: 502815 - DNA, 630 bp, Stenotrophomonas maltophilia
atgctgatcatcttcgccttcaacgtgatgttctggatgttcttcgaacaggccggcagctcgttcaccttcctggccgagaacatcgtcaaccgccagttcggtgactggaccttcccgaccgcgtggttccagtcggtcaactcggtggccatcatcaccctggcaccggtcatcgcctggatctgggtggccatgggccgcgccaatccgtccatcccgcgcaagttcggcctgggcctgctgttcaacggcgccgccttcgccctgctgatgttcgccctgtcgcagatggtcgttgacggcaagatcccgttctggaccctgttcatggtctacgtcatccagtcggtgggtgagctgtgcctgtcgccgatcggcctgtcgatggtgaccaagctggccccggtgcgcctggtcggcttcggcatgggtggctggttcctgtccaccggcatcggcaacaacctgtcgggcatcttcgccggcgtggtcagtggtgaaggcggcatgacggtcgagtcggccctgaaggggtataccttcgggttctgggccctgatcggctccggcgtggtgctgttcctgatcgccccgctgatcaacaagctgatgcacggcgtcaagtaa

SEQ ID NO: 502816 - DNA, 1140 bp, Stenotrophomonas maltophilia
atgcacagcgaccacgccgaacgattgcccgaacccgccagcgacctggccgagggtggggcaggcgagggcgtgaccctgccgccgcaggaagcgctgctggatgacgccggtaccggagaggacagcgtcgacctggcgccgccacgccatcgcctgccgcagatcgcgctgcccgacaacgtggtgctgaagggggcggtgcagaagctggtcgagcagaagtcccggcttgatgcgctggccgccgaaggccagctggccgggctgctgccgcccgaatggcagggccacggcgcgcgcgcgatcgagctgtccaccttcatccagggcgtgctgcccttcctgcagaccggcgagcgtggcgagaccgcccccgcgcgactgccggtgcgccatgtgttgggtgacgacagccgctggggcctggacgatgcggccgaaccgaaatcactggcgtggtatctggccagtgacgagcgcgccacggccggcagcaaggatgtcgccgaggcgtatctggtgggcgcactgggcctggcgtggatgcaggaaggtcgcagccgccccggcttcctgcgcgcgatgggccaggacagcctggccgcgcgggtgaccatgctcggctatccgccggccaacgaactggcgctgtacagcgtcactgcgcacggccagccgcagatctggtgcgtgcacgggcgccgccgcatgcgcccgctggtggcgccgtggttgagcgtgccgctgctgaccgcctacggcgtgccggcgccggttgcgtggccgtccagcttcccgccggtggaagcggtggccgagctgctggcgaccgcccgcctggggcgcgcgctgccggaagtggacctggccaaggccgtggcgaagatcgccgaggacgccgcctctgacgcctggcagccggtcagcctgctgcagctcaacacctggtcaccgcgctggcacttcttcctgggcaccttcgtcggcctgccgtcgttgctgctggtggcggcggcgctggcgctgccgggggcggtcgaagcagcgacggtggccgcctcgctgggcttcgccggcggcgccatcgcagcactggccgtgccgtggatccacgcacgccgcaagcacctcagctga

SEQ ID NO: 502817 - DNA, 894 bp, Stenotrophomonas maltophilia
atgctgaaaggcttggcgatcaccccgcccgtggtcgggcggatctcaatcggccgcgtggtcgagcgcaacggcaagcgtctgccggagaaggatgatcagttcactttgaccagtcaggtacagaaccgggaaggctgggtgctgcatccgttggacgaggcccttcgccaggtggccggaggcaaactgcgctcaatcccggtgcggctgctgttcaacgatccgggactgaaccttcgtgctgactactcgctcttcgaccggacgaccggcaggccggtctgtgtcggcaacggtgagaccagccggagaatgggcaaggaaggcatcaccccggaggcttgccccggccccgatggctgtcctttcgcgatgggcgaatgcaaggcctacgcccgcttgaacgtcagggtcggggacgaggacgagttggggagctttgtgctccgcaccacgtcgtacaacacgatccggacgctggcagcccgcctggcctacttcgatgccgtctccggtgggcgcctagcctgcatgccgctggaacttaagctccgcggcaagtccacgacgatgagcttccggtcggcgatctactacgtcgacctggtgatcaggtcgggcctgtcgttggagcaggccatcgtggaggcaagaacgcttgaccaggcccgcaaggaggccgggttcgatcaggcggctctggatgaggctgcaaggcacgggttcgccaacggtgcgttcgaggacctggttgaggacgtaccggccgtggttgaggagttctatcccgcccaggcgggtgtggctgggaatggcgtcacgaacgggactgcaggcggcaacttgcaggacaggctggaaaacaaggtcgcccgattggggacctgctaa

SEQ ID NO: 502818 - DNA, 978 bp, Stenotrophomonas maltophilia
atgagcagatcagcggcgattcgcctggtcggcacgcgctcgatggagcgtgaggagtggttggaagtccgcaatcgcggaatcgggagctccgatgctgccgctgcggtggggctctgtccctacaagagccagcttgagctctggatggagaagaccgggcggacgacccgggatgatgaacccggccaggacagtcccatgtactggggcaccctgctggagccacttgtggccggtgcgtataccgagcagaccggacggaaggtccgccgggtcaacgcggtgcttcagcatccgacctacagcttcatgctggccaatgtcgaccgggaggtggttggcgttccggacgtgcagatcctggagtgcaagacggccggggagtacggctcacgactctggcgggacggtgtgcccgagtatgtccaaatccaggtccagcaccagctggccgtcaccggcaaggcggccgcagacgtggctgtgctgctctgtggccagaagctggaggtgcaccggatcgagcgcgacgaggacgtcatctcgcgcctgatcgtgctggaggccaggttctgggagcacgtgacccaggataccccgcccccggcggatggcagcgactctgccgcccgagccctgcgcagcctctacagcggcaacgacaccagtatcgacttcagcgaagacgccgaattgtcggccaccttcgacgggctggtgctgctccgtgacgagatcgcccggatggacaagcgggccgagcagatgcgccagcagttggagcagtccatgggtgaggcctctcgggcgatctttccgagtggcgagatcacctaccggcgttccaaggacggtacgagtgtcgatctcaagcggttgaccgagtctcacccggacctagtggctgagttcaccgtcgccagacccggatcccggcggttccggctcgttccccatcaaacccaaggagcatga

SEQ ID NO: 502819 - DNA, 318 bp, Stenotrophomonas maltophilia
atggacgtcgatcagctcgacgttgcgtacatcgccataggggccaagcaagcactggacaagagtggggctccgtacgcgaaggtcccgttccaaggggagttgggctacgtccaagcatgcatcgatcaggctgagcttctgactcgggcctggcgcgcatgtagtgaggtgttccccggcgtctggtgctacgaggtggccgagcccttcggcgtggccttcggcaagcacctcctggccggaggtggtcctgagagcgctcagagcatcctcaacggagtgctggcctcagcgatggcgacaaccccggtgtag

SEQ ID NO: 502820 - DNA, 957 bp, Stenotrophomonas maltophilia
atgcacctggttgaaacaatggcctatgccggcgaacgaccgtggcacggggtcggcaacaagcttgcgccgcagcagcccatcgaggtctggaagcgcgaggccgggatggactggtcgatcgaagagtccgaagtccgctacgtggtcgggaagaacgggatcggggccatcaacgctttcccggaacagaaggtcctgtaccggtcagacacgcaagccccgctgtccgtcgtctccaagcgctacaaggtcgtccagccgggggagatcctggagttctatcgcgacctgaccgaggtcggcggctttgagctggaaacggccggcgtactgcgcgaaggccgtaagttctgggccttggccaggactgggcagagcacggtgctcaagcggaaggaccgcgtcgaaggctacctgctgctggccacggcctgtgatgggacgctggccaccacagcccagttcacctcggttcgggtcgtgtgcaacaacaccttggccatcgcgctgggcagcaatgcgggcgccgtgaaggtgccgcaccgcagtcagttcgaccccgacgtggtgaagcgtcagctggggatcaccgtgtcgacctgggattcgtttgtggcccagatgagggcgctggtggacaccccggtggacccggactcggtggacggcctcctgcgccgcgtgctgacctaccccaaccccgacgggcagggagtcgcggtcaacgagcaggccttcacggttgcccgtgcgctgtacgacggcgcgggcaggggttcggagctgtcaacggccaaggggacagcctggggcgtcctgagcagcgtgacggagttcgttgaccaccaccggcgtgccaggagcgacgaccaccgcagggatgcggcatggttcggggcgggcgcccagatcaagcaacgggcctgggacgaagccataaagctggtggcctga

SEQ ID NO: 502821 - DNA, 195 bp, Stenotrophomonas maltophilia
gtgccggactgcgtccatgatccggtaagcgttcgcgccggcgacctgccgttcttcgtacccggcaccgagggcgtgctgatacatccgaaggtagccccccaagacgacgagcacgtcatcacaaagaactatccgaactcgctccacaagacggacctcaaggagacactcgattccgacggcatcgaataa

SEQ ID NO: 502822 - DNA, 540 bp, Stenotrophomonas maltophilia
atgaagcctattccattgctcttccttgtcgttgcgctcgcaggccccggctgcgcctccgccacgtacccgactgcactgccgaccgttgcggatgcggtgtcacctgcgccgggcatcgtgtcggcggggcggctggatgccgacgacatctcacgcgtgcgtgatgctggcatccgccacgtcatcgacctcaccttggatgcggagacgccagatttcgacgaggcggcagccgtccgcgcggccggccttctgtactccaacctgccattacgcggtgcagtggatctcacccgtgagaacgtgatggcgtttgatgccattgttcgagacgcgaaacgtccggtgctcgtgcactgtgccagcggcaaccgtgtcggtgcgatggcagcgctccgggccgcatgggtggacggaaaggaggccgatgaagcgatcgcgatcggaagaacctgggggctcaagggtcttgaggaagaggtgcgccgcaggatcgaggccgacgcttcccaggccaggagcaaggtcccgggctaa

SEQ ID NO: 502823 - DNA, 414 bp, Stenotrophomonas maltophilia
atgaagttctcgattgccgcgctgctgtcgggtgcgctgtttggtctggggctggcaatgtcgggcatgaccgacccccgcatcgtgctcggcttcctcgacgtgttcggagatttcgatccgacgctggcgttcgtcctcggcggcgccgtcaccaccaccgggctgctgttccgcttggtgctgcgccgtggcagcccggtgctcgccgatacgttccagctgtcgaacctgaagcaggtcgaccgcaagctgctcggcggtgcggcactgttcggaatcggctggggtatcgccggctactgtccaggtcctgcactcgcgggcctggggatcggctcggtcgaagcgctgtggttcatcccggccatgctggctggcatcctgttgcaccgtgtcgtcaaccgcgcctga

SEQ ID NO: 502824 - DNA, 417 bp, Stenotrophomonas maltophilia
atgaccacgtggatgatcgccctggcaggcggagtgttgatcggcctgtccgcgaccttgttgctgtggctcaacggacgggtcgcgggcgtcagcggcatcctcaacggcgttctgttcccgaaggcaggtgatgtgtcgtggcgcgccatgtttttgctgggcttgatcgtcgccgcgggcctatacatggcactggtgcccggtgcaccactgccgcggacggactattcgcgagtcgggctggtggtcgccgggctgctggtgggcttcggcacgcgcatgggcaacggctgcacgagcggccacggcgtgtgtgggctcggccgactgtccatgcgctcgctggcggccgtcctgaccttcatggccacggccattgcaaccaccttccttgtgcgccacgtctggagttga

SEQ ID NO: 502825 - DNA, 873 bp, Stenotrophomonas maltophilia
atgaatccgcaggtccagaacttttacgacccggccacgttcaccttcacctacgtggtctacgatcgtgacggcggccatgccgccatcgtcgacccggtgctcgactacgatcccgcgagtgcccgcacctcgacggccgcggccgaccgcgtgctcgcgtttgtgcgcgagcattcgctgatcgtggactggatccttgaaacccatgcgcatgccgatcacctgacgtccgcggcatacctcaagcgcgaaaccggcgcgaaggtcgcgattggtcgcggtatcacccaggtgcaggagcgcttcaaggcgctgttcggcctggagccggagttcgccaccgacggccgtcagttcgatcggctgttcgctgatggagacacgttcgccatcggggagctccaaacgcgtgcgatcgcgacacccggtcacaccgacgacagtctgacctatctcgtaggtgacgccgcgttcgtgggcgatacggtgtttgcccctgaaacgggcacggcgagggtggacttcccaggaggcgacgcgcgcaaactctaccggtcgatccgcaccttgttcgatctgcccgccgacacccgcctgttcctgtgccacgactacccgccggccgagcgcgaggcgcatccgcagagctcgctcgacgagcagaagcagcgcaatgtgcatgtgggcggcggggcagatgaggagacgttcgtcaaaattaggaccgaacgggatgccagactggcggcgcccaagctaattctgccggcgttgcaggtgaacattcgcgcgggcgagctgccgccgacggacgcgaacggcatccgctacctgcggctgcccctgaaccaattgggaggtgaggcatga

SEQ ID NO: 502826 - DNA, 315 bp, Stenotrophomonas maltophilia
atgccctcgcccgagcagatggcgcaacatgccaatgaagcggccgcactgttgaaggcactggcccatccggcacgcctgctcgtgctgtgccagctggtcgagggcgaggctccggtaggagagttgcagccgattaccgggctcagcatgtccgccctgtcgcagcacctggccgtactgcgcgagatgcagctcgtcacgacgcgtcgcgaggcgcagaccatctactacgcgctagccgagggccctgctgcaagcgtgctcgatacgctatacgccgcctactgtggcagccaggaggctgtccaatga

SEQ ID NO: 502827 - DNA, 786 bp, Stenotrophomonas maltophilia
atgaccacgttccagttagtgatgggggtcatttccggcggcgtcgtcggcttcacgctcgggctggtcggtggcggcggctccattctcgcggtcccgctcatggtctacctcgtcggggtgcgcgacccgcatgtggcgatcggcaccagcgcgcttgcggttgcggccaacgcacttatcggcctgaccaaccatgcccgcaagcgcaacgtgaagtggcgttgcgccgcggcgttcgctatcgccggcgtgctgggcgcgtggttcggggcgatgctcggcaaggccatggacgggcagcagctgcttgcattgttcgcgctcctgatgctcgtggtcgccggcatgatgttccgctcgcgcggaagtgaaggggatccggcggtggtgctcaatcggggcaacgcgccgaagctgctgggttcgggcgcggtcaccgggctcctgtcgggtttcttcggtattggagggggctttctggtagtaccgggcctgatcgcctcgaccggcatgccgatcctgttcgcggtcggttcatcgctgctcgccgttaccgccttcggactgaccaccgcattgagctacgcgagctccggactggtcgcctggtcgcttgcggtggcgttcatcggcggcggcgcggtcggcagtctgtttggcgcccgcctcgccacacgcctgggcgaccgcaagggcgtgctcaacacggtgcttgccggcctgatcgtcgtcgtcgcggtgtacatgctgtaccgcaccgcgagtgaactcggccggatctga

SEQ ID NO: 502828 - DNA, 441 bp, Stenotrophomonas maltophilia
atgaacacaccctggcgcttcgctgaagatcactacgccggtgggcagcccacgccggcgcatctggccgaactcgtgcgcgagggcgtgcgcacggttatcaacctgcgtgccccggacgagcccacggaatatgacgaagccgccgaggccgcccggctcggcttgaactacgtgtcgctgccgatcgccggcgccgccgatctcgaccgagcccgggtgcgcgagttcggccagacgctggacgatgcgcgccgcgaaggcggggtcctgatccattgcgcgagttccaaccgcgtgggcgcaatgatcgcgcttgacgcgacacttaaccgcggctgctcgctggaagcggcactcaagcgcggccgtgaggccggtctggcgacgctggagccggccgtagtggcgctcgcggaaaaagaaggagcccggtcatga

SEQ ID NO: 502829 - DNA, 765 bp, Stenotrophomonas maltophilia
atgatcggtcccgccaccatcttccgccagctcttcgagccggtgtcttcgacctacacctatctgatcgcctgccccgaaacgcgcgaagccgccctcgtggatccggtgatgcccgcctggcagcgcgacctgcaggtagtcaacgagctcggtctgaagctcgtcatgacgatcgacacgcacattcatgcagatcacatcacgtcggcgtcgatgctccggcgggaggtaggcagccgcatcgctacccccgcgctcgacgcattgtcctgtaccgacgtgccgatggaagacggcgtccccctgcaggtcggcggcgtgcgcatagacccgatgcacacgcccggccacaccgacaaccacttcgcgttggtgatgaatgaccgcgtgttcaccggcgacgcgctgctgatcgacggctgcggccgtacggacttccagagcggcgacgcgcgtgaactgtacgagagcgtacgcggtcggctgttcggcctcccgggcgagacgctcgtgtacccggcgcatgactaccaggggcggtgggtatcgagcatcgcgcaggagaagcagcgcaacccgcggctcggcgccgaacgcacgctcgaggatttcgtcgagctgatggaaaacctgaacctgccataccccaagttcatcgactatgccgtgccgggtaacaaggcgtgcgggcagtgtcctccggacctgccggagcaccttcgccagtactgtcaggaaatggcggaaagcccccaaggttag

SEQ ID NO: 502830 - DNA, 1329 bp, Stenotrophomonas maltophilia
atgagcctgcgattccgcctggtgctgacaatcggcatcgccttggcggtgctgtggagcgtggcggcggcgtggatgctgcgtgacctcgatcgcaacctgcagcataccctcgacgaccggctggcgatgtcggcacgcatggtgtccggactgctggcgcagggcgcgttggtgggcgcctcgccggtagcggcggctgatgcggtgaccgttgccggcagtcgcgggatggcgtgccagatacgctcgctgcgtggggaggtgatcgccaccacccagggcgcatccagcgcactgatggcgaccgacgcgccgggctatcgcacgcgtgagatcgagggtacggcgtggcgtacctacacgctggaggcgaacggttacagcattaccactgccgacaatctcggtgagcgtgccgaactgagccgccagatcgcgctggcggccgggctgccgttcctgattgccgcggtgggtggcttgcttgcgttgtggctgggcgcgggccgtgcgctcgcgccgctcgatcggctgcgtcgcacgcttgcgcaacgccagcccgatgccgacgagcccctcgacgcgcaaccaatgccgggcgaactccggccattggtcgaatccctcaaccacctgctgcagcgcgtttccgacgcggtgtcacgagagcgcagcttcaccaaccatgctgcgcacgaactgcgcacacccttgactgcgatcgacactcacctgcaggttgcgcggctgactggtggcgaggactcacgacgtgcgctggccgatgccggtgaaggcgtgcagcgtatgcgtgcgacgctggaccagttgctgatgctggcgcgggtcgaaggacggctgccgttcgacgacggacagtggatcaccgccgcgcaggtggtggagcaggcggtggcggccagcagtccggcggccaatggccgggtcgttgtcgtggctggaagcggtagtcaggcggtgccggcggtgccccccgcgctgtccgtggcggcgttgcgcaacctcgtcgacaacgcgttgcgctattcgcctccgggaagtgccgtagaccttgttgttgatgccgatgccaccacggtacggttccgtctgaccgatcgtggcgctggtctcgaacctgacgagtaccggcaggcgacgcaacggttctggcgaggacgcgcgaccggcagcgcaggaggcagcgggttggggttgacgatcgtcgaggcaatcgccgagcgtcatggcgggtacgtggtcttgcgtcccagggagggaggtgggacggtctcggagctcgtcctgccgaggcaggacggttag

SEQ ID NO: 502831 - DNA, 525 bp, Stenotrophomonas maltophilia
atggtgctggaccttgggctgcccgacgaggacggcatgcagttgctctcgcgcatgcgccagcgcggtgatgaattgccggtattgctgctgaccgcgcgcgatgcggtggaagatcgcatcgcaggcctgcaaggcggcgccgatgactatctggtcaaaccgttcgatctcggcgagctcgtggcacggctgcacgccttgtcgaggcgtgccgctggccgcagcgtgaacctaatcgaagcaggttcactggcgctggatcccgccagtgggcaggcttggctcgacggcatacccgtcgacctgtcgcgtcgcgagaccgcactgctcgccagcctgatgcaggcaggcgggcgctgcctgtccggcgaacagctcaaggacagcctgtacggtttcgaacaggaggtcggcagcaacgcaatcaacgtgcacatccatcacctgcgccggaaactcggtgccgatgtcattcaaaccgtgcgcggactcggatatcggttcggcagggccgagccatga

SEQ ID NO: 502832 - DNA, 1947 bp, Stenotrophomonas maltophilia
atgcggttgctgcgccggttgttgctaagcctgttgatgttgccgatgttggccgttcccgtggccgcaatggcgcaagactggctcgcgtcaccgaacgggcagcagcccgagttcctcgaggccagcgaggtgttcagggtcgaggcaacggccgtgaaggatggcgcgacccggctgagaggcacgatcgcgcccggctattacctctatcgacaccgcctgagcgttgttgtcgacggcggcaaggcgttgccgctgcagttgtcgaacggcaaggcgaaaaccgacgagttcttcggccgcaccgaggtctattacgacaccgtcgaaatcgtagtcaatggtggcaacgcgcgctcggcgacgctgcattggcagggctgcgcagatgccggcatctgctatccgccgcaggccatgcgggtcgatctgccatcggtcgagacgtcaccggcaaccaaggccgctgtggacaccgcagcgacggcgccctcggaaaagacgacaagcgacagtgccccgcagccgcccaccaccccctctgcgacctccgtcgcacaaaactcggcagacgtcggcacatcatccgtcacgggctcgatcagggaggccgcccccgcgccttccgttgccggcgaggaccagcgcttcgccagccgcctcgccgatgccagcctgttcgcgtcggtcgcggtgttcttcggcatggggctgctgctcgcgttcacgccgtgcacgctgccgatgatcccgatcgtttccagcctgatcgttggtggacagccgaccacgcggcgtgcgctcgccttgtcggtggcctacgttctgccgatggcgttgacctacgccgcgctcggcgtggccgccgggatcgccggtgccaacctgcaggcggcgttgcagaacccgtggctgttgggcgccttcgcggcggtgttcgtggtgcttgcgctgtcgatgttcggtgcgttcgagctgcagttgccggcgtggctcggcaaccgcctggatcgcgccggtcgccagcagcgcggcggcacgctcgctggcgccgccgcgctcgggttcttgtccgcgctgctggtgggaccgtgcatgactgcgccacttgccggcgcgctgctctacatcagccagtccggcagcgcactgaccggcggcctggcgctgttcgcgcttgggctgggcatgggattgcccctgctcgcgattgcggtgttcggcgcacgcatcctgccgcgccccggcgcgtggatggatcgcgtcaaggcggtcttcggctacgtcctgctggcgttggcgatatcgatgctggcgcgggtgctggcaccggcgacggcgctggtgctatggggcgcctggctgctcggcgtggcggcgggtttcctggccctcgtcgcaccgcccggcagcggcccgctgcgcctgtggctgccgcgctattttgcagccgcgtcggcggtctgggcactggcactcatgatcggcggtgccagcggctccggcgacccgtggcgccccctggaacgactcggtgccggcggtgcgagtgcgcagacagccgcgccgacggtcgccttcgtcgaagccaagacggccgacgacctgtcacgtcgcatcgccgaagccggtgcgcgaggccaatggacgctggtcgatttctacgccgactggtgcgtttcctgccatgtcatcgaacgggaagtgttcggtgatccgcaggtggcatcgatgctcgccggcatgcaggtcgtgaggcccgatgtcaccgccaacgatgcagccgatcgggcattgatgagggcctggcaggtggccggtccgccgacgttgctgctcatcggacccgacggccaagaacaccgcgccgagcgcacggtgggcgagatcacccccgaagcattcctggcccgcctgcagcgcgtccagcaaggagcgcaatga

SEQ ID NO: 502833 - DNA, 852 bp, Stenotrophomonas maltophilia
atggtcagtcttggcccgtttcccatgtccctggtggtgctgctggtcgcactcgcgattgccgcactggtcgcccggcagttcgttgtgcccttgcccgggcaacccgcgatcaagccgctttcgacgttcctcgacatgctgatggtcggcgtgctcgcggcgcggctagccttcgtgctcgcatggtggccgcagtacctcgcggatccgtggtcaattgtccgcatcggcgacggcggcttctcgatctgggcgggcgtgctcgcgggcctcgcattcggcgcatggcgagcgcgaaacgctcccgcgctgcgacgtccgctgctgttcggtgcgatcgcagggctggcttcctgggccgttctcggtggcgcgctgctgttgatgcagcagtcggtgatgaaactgccggcaaccgaactgagcacgctcgacggcggcagcacgaagctttcggcgatgaccggcgagccgatggtcgtgaacctgtgggcgacgtggtgcccgccgtgtcgccgcgaaatgccggtcctggccaaggcgcaggaagaacgcggcgacgtgacgttcgtcttcgtcaatcagggggaatccgaatcggagatccgtgactacctgcgcgagagtcacctgcaactgagcaatgtgctgctcgatccattctcttccgtaatgcaggagtccggctcgcgcggcctgccaacgacgctgttcttcgatgccgacggccggcttgtggacacccacatgggcgaactctcgaatgcgagccttgccgtaaagctgcggcgcttcggtgctgcaccctcatcgagtcccccaacccttccaaccaaggaggtgccgtga

SEQ ID NO: 502834 - DNA, 831 bp, Stenotrophomonas maltophilia
atggcacgagtgaaccccactgcaatactgctttcgtctgccctgctgctcgccaccggttgcagtcaggccgccgaggaaaagtcggtttcgaccgcaccggctgtcccaacgaacgccaccagcaacccggcggctgaaaagcccgcggtgatcgaagccattgaagcccagggtttcgaagtgctcggcgagttcgacgccccatcgggtcttcgcggctttgcaggcgtcgcaggccatcagcccgtggcggtatacgcgaccaacgacggcgaacatgccgtcgttggcacgctgatcaatgcacaaggcgaggacatcggcgccgaggcgctgcagcgacttgtcgccggtccgatgtcggcccgcacctgggcacagctggaggcgagcgagtggatcgctgacggcaaggccgatgcgccccgcgtgatctacacgttcagcgatccgaactgcccgttctgcaacaagttctggagtgcggcgcggccgtgggtggattcgggcaaggtgcaactgcggcacatcatggtcggtgtgatccgtcccgacagcgccaacaaggttgccacgatcatgaccgccagctcgccgtcggaggcgctccgtcgcaatgaaaccagctacagctcaggcggcatcaagccggcggcctccgtgcccgccaatgtgcgcgccaccctcgatgcgaacgaaagactgatggtccagctagggttccaaggcacgccgggcatcctgttccgcgacgacaacggcacggtccagcgccgagctggcatgccggcaccagatgacctggccaccgtgctcggaccgcgctga

SEQ ID NO: 502835 - DNA, 549 bp, Stenotrophomonas maltophilia
atgcggggcacatccttgctattgggcctggtgctggcgggcatgacctacttcgcgcaggcggcgacgccggcgacgtctcccgcccacactaccgccatgcatggcaaagcgatcgtcctgccggacgccgcccaccaacccgacccgaaaatgcgccagcgggcggtattcagcctgaccgtggcgccggcttcacccgctgcgacggatccgggcttggagcgggtcgcgcgcgccgtcaacctgctcaaggcaagcggagtgacgaagaagcagttggacttcgtcgtgctgctcagcgaaggagcaacggattcagcgctggctgatcccgcgtaccgcgtccgccatggggtcgctaacccgaacctcgggctgatcgcgcaactgtcggcggcgggagtgcaaatgttcgtgtgcggccaggccttgcactcccggcagctggacagcaactcgctggcacccagcatcgcaatatcgctttcggcgttgaccagcatcatcacgctgcagcagcaaggctatgcgctggttccgctgtga

SEQ ID NO: 502836 - DNA, 1224 bp, Stenotrophomonas maltophilia
atgaccgaggcacccaccgacaaattttcagctggcgagcagggactgggctacatctatcagccgcgccttgccctgctccatctcctgcagttgccggaggacaccgccgtcgtcttggagaaggacgacgacctcgatttcgtcgatgatgccggcggcaagaccctggcctcgctcaaacacaagaaggccggcgacaagttgactgatctggcgcccgacttctggaagtccgtcaacatctggctggtgcggtacaaacgcgatggtcgcgccgcctcgaacctgcggttcttcctgttcaccacaggcacggtgtcggccagttcgttcctcgcccgctttctgcccgaccagcccgccgtctccggcgatcaggccacgctgaccgagctggccgaagcggccctctcggagacggcatcgaaactcattgcaccgatcgccgtggcgttcaacgaactgaacgactcggagaagcaggatttcctcgaacgcatccagattcttgatggcagcccgcgtatagacgacatcccagcgacgatcagggacaaacacatgcgaagcatccggcgcgaataccgccagttcgtgttcgagcggctggaaggctggtggatcgccgccgtgatcgagcaactgaccggcgccaggccggaaggaatcttcggctatgaggtctcggacaagctctccagcttcgccgaggaatacaaggcggacaacctgcccatcaccttccgcggcaaggaacccgccggaggggtcgacgccgattccgatccgcgcctgttcgtggcgcaactgcgcgagatcggcatttcctccaaccggatcagaagcgcaatcctggactactaccgtgcattcgagcagcggtcggcatgggcgcgcgagaagttgttggtgtccggcgagatcgaggagtatgaggatcgtcttgccgacgagtggagccgttacaaggatgtcgccttcgagaagctaaaggacgacagcgccgaggacgcgctgcgagaggcaggcgcgaccctctacagctgggcggagttcgagaccggaaaggtcgagtcgctgcgcatccgcgcgcacgtggccgaaccctacgtgctccgcggtagcttccacctcttggccaatgcaacgcccgaaccccgggtttactggcatcccaggttcctcgaccgcctcggcaaattgctgggggtggccgcatga

SEQ ID NO: 502837 - DNA, 495 bp, Stenotrophomonas maltophilia
atgaaacgctgggaccagcgccccttcgagattcggaatctattcaaccccgccttctgcggcctgatcctgtttcgcgccctgaacgggtacgaggaagaagacgcccgcggcatgcctttttcgctgtcgcttctggttctgcccctttgcctgtacaaggattcgcgcgaggtgatcgccagcagcccgcgcagctatctactcaagaccgcagagaagaaccagcagatcatggtgggctttgccgatcgcgccactcagatgctgccctacgctttcgaggggttcggccttctaatggaaaggggttgcatcgccgtggctgatgatggtcgcatccaaaccgttcccaagaaggtacgtaagaccgtcgatggaaccggaaccgccgagaccatcgcctgccagaaagtggcacgcatcgtcggaagggaattcgcacgcatcgccgaccgggcgaccgtttacacgactttcgggattcgtccatga

SEQ ID NO: 502838 - DNA, 1956 bp, Stenotrophomonas maltophilia
atgaagatcagctcgatccacatctacagccacgacggccagcgccgtgatctccagttcaaggtaaacgggctcaacgtcattaccggtcggtcttccaccggcaagtccgcgctgtccgagatcatcgaatactgcatgggacgttccaccttcaacgtccccgaggggatcatccgcgacaaggtggcctggtttgccgtgatctaccagttcgagaaagagcaggtgatggtggccaagccgactccgcctggcggcggcgccagttgcagtatggcgatgttgcggcgagccccccaggtgcaggcgccggacttcaaggacctggtggtcaacactgacgacgacagcatcaccgaacttctgtcgcgactgctcggcattcccgagaaccgcaccgacgtcgcactcgaacacagccgcgacagctacgacgcgaacgtcaagcatacgttttactacctgttccagaagcagggcctggtcgccaacaaggatcagcttttctatcgccagaacgagcaataccagccacgggcaattcaggacacgttgcccatcctgctcggcgtttcctcccacgaccgctatgaattggagtctaggctgcgcaccgcacagcgggacctgaagatcagcaacaagaagctggagcaggcgcgcaacgcagtcgacacctcgcatgagcaggccatcggcctccactcggaagccaggacggtcggcctcatcggcaacatagacggaaaccagaacaccgacgggatcatcgatatattgaggtcggcactgtcgtggaagcccgaaacggtgcccgacgacgatggcagccgggtctcgcttctggaagaggaactaagccagttgcgccgagaacgccgcgacacccaggcccggatcgacgccgcccgcctgttcgccaagcaggcgggcggctacgaaagcgaggccgccgaacagatcgaccgactggcctcgatcaaggcgctgccgaaaaatcccgatagcggcgaatggcaatggccgttcagcgaacgcaacctggcgctggaatccccggttgccgtcgtcctgctcaatgaactggattcactcaacaaggaactacgcatcgccaccggccagcgccccaagctcgaagcgtacctgaccgaactggccgacactgcggatggaatcgcggacagaatcaagcagaaggaagcggagttgtctgcggcgatctcggccaacgaggtaatcgcccagatgggcacgcgcaacaatgcggctgcgcgcgtggtcggtcgcatcagcctgttcctggaaacgctgctacccaacgaggatcttaccaagctggaagcggagaaccgacgcctcggcaacaaggtgaagcaacttgaggatcagatcggcaccgatgacagcaacgaacgcctgacctcgatcctcagcaacatctccgcacaggtatcgcggtacatccagaagttcaacgccgagttcggcccctaccctgcgcgcctcaacctgccgcagttgacgatcatcttcgatcgacccgaacgtcctgtcccgatgggccgcaccggcggcggcgaaaaccatctggcctaccacctgtccgccctgctctcgctgcatctgttcgcggcgcagaacaaccgcccgatcccgcgcttcctgctgatcgaccagccgactcaggtctacttcccgtccgagcaggtctacaaagatgccgacggctcggtgcagaaaactgaagacgacgccgacctcgacgcagtgcgtcggctgtttgagctgctgttgaagttcacccaagaggacgtgccgggcttccagctaatcgtcaccgaacatgcgaacctgcgcgagcagtggttccaggacgcgctggtcgaacaaccgtggaccaagccgccggcgctggtaccggaggactggccgccggagagagcgaactga

SEQ ID NO: 502839 - DNA, 1179 bp, Stenotrophomonas maltophilia
atgttgacggacaccaagctgcgcagcctcaaacctcagggcaaggtctatcgcctcgccgacgccaatgggctgtgcgtcgaggtgaggccttctggagccaggatctggcgctatcggtaccggttcgccggcaaggcgaacatgctgaccatcggtgactacccggcggtttcccttgcagaagctcgcgccgagcgggacaaggcccgggcccagctcaagaagggcatggacccggccctggtggtgaagatcgagcgggcggcgcaggaggaagaggccggcaataccttcggcgcgcttgctgaggaactagtggcgcaacgggccaagaagctgacccccggctcagtcgttcgggagcgccggatgctggagcgcgacctggggagcatcgctgatctgcccgttcggagcgtgactgcgccggtcctgctgaaggccctccggaagatcgaggcccgtggagcagttgagacggcacatcgggctcgcgccgccgcgggcatggtctttcgctatgccatcgccaccggccgtgcagagaacaaccccgccctgagtcttaccggtgcgctgacccctacgaaaaccaagcacttctccagcctgacggagccgggggaggtggcgaagcttctcaaggctatctacggctaccaggggtcgccgatcgtgtccgctgcgctcaagctctcggcgctcctgttcgtcaggccgggcgagctccgtgcggcgcgctgggaggatatcgatctggatgctgctgagtggcgttacatcaccagcaagacccagacccagcacatcgttcctctggctggccaggtcgtcgagctcctggaggatgtccggccctattcaaggaaaagccagtacgtctttcccagcgtgcgcagcatccagaagccaatcagtgagaacacgatcaacgctgctctacggaacctcgggttcgacggcgagatgatgactgctcatggctttcgggccatggcgcgaaccttgctggacgaggtgcttgggttcaggccggacttcatcgagcatcagcttgcccatgcggtgcgggatccgctggggcgggcgtacaaccggactacccacctgggagagcgcaagaagatgatgcaggcttgggccaactacctggacgagctaaggcgtggcacgtag

SEQ ID NO: 502840 - DNA, 534 bp, Stenotrophomonas maltophilia
atgaagattctcgccatatccggcagcgcgcgccggcagtcgaccaacaccgctctgctggtggccctgaaaaccatcgcgccgcccggcatggagatcgaggtctacgccggggtcggcgaacttccggtgttctcccccgatctggaaggcaccgatgaaccctgcagcgtgacgcgcttcaaggcggccatcgcccgcagcgacggtgtgctggtgtgcagccctgaatacgtgcgtggcattcccggcggattgaagaatgcgatcgactggctcgtatccggcgaccagatcgtcggtcggcccattgcgttagtgcatgcgtcccatcgtggcgaggacatgctgcaggcacttcgcgcggtgctgtccacggtcagtgccgcgttcagtacaacgctgttcctgcgtgtaccggtgctgggcctggaaccggaggagatcttcgaggtgcttcagtcggaagtgcatcgcgccgaagcggatgcgttcctggcagggtttgctgtttactgcaggtccattgcgtag

SEQ ID NO: 502841 - DNA, 345 bp, Stenotrophomonas maltophilia
atgtctgtcttgagagccccattcctggcggcattgttcatgggcatcgccggctgctcgacagcacctggtctgcttgaacaaacgcccgagtcatttggttcttcgaaatcggtacagcaggtcaccgtctgcctgtcccagacgtggacacaacgcaataaggtcgtgcgcgtgctgcccactgaatccgggcagcgcattgtcatcgacaaccctgtgaaccatggggtgattgccattgtcgagcttgcctctgtcccggctggtacgtctgcacgctactggaagggtgcaggtctcaccggctggacacgtgatgatctgaaggcctgcctggactga

SEQ ID NO: 502842 - DNA, 2064 bp, Stenotrophomonas maltophilia
  misc_feature (45)..(67): n is a, c, g, or t
gtgccgaccgtgccgttcagagcaccgccaactgcaccaccgacnnnnnnnnnnnnnnnnnnnnnnnccgttcagagcaccgccaactgcaccaccgactgcgccgaccgtgttgttgagcgtaccgcccactgcgctgccgacctggccaacggtgccgttcagagctccgcccacagcaccaccgaccgcaccgaccgtgttgttgagcgtaccgcccactgcgctgccgacctggccaacggtgccgttcagagctccgcccacagcaccaccgaccgcaccgaccgtgttgttgagcgtaccgcccactgcgctgccgacctggccaacggtgccgttcagagctccgcccacagcaccaccgaccgcaccgaccgtgttgttgagcgcgccgctcacggcgccgccaactgtgccgaccgtgccgttcagagcaccgccaactgcaccaccgactgcgccgaccgtgttgttgagcgtaccgcccactgcgctgccgacctggccaacggtgccgttcagagctccgcccacagcaccaccgaccgcaccgaccgtgttgttgagcgcgccgctcacggcgccgccaactgtgccgaccgtgccgttcagagcaccgccaactgcaccaccgactgcgccgaccgtgttgttgagcgtaccgcccactgcgctgccgacctggccaacggtgccgttcagagctccgcccacagcaccaccgaccgcaccgaccgtgttgttgagcgcgccgctcacggcgccgccaactgtgccgaccgtgccgttcagagcaccgccaactgcaccaccgaccacgccgactgtgttgttgagcgtgccgcccactgcaccgccgaccgcgccgactgtgccgttgagtgcaccgcccactgcgccaccgactgttccgacagtaccgttcagagcgccgcccactgcgccaccaaccgtgccaacggtgccgttcagcgcaccacccaccgtgctaccgaccgcacccgcggcaccgtgaagcgtcccgccgaccgcatccactgctccgcccaccagaccgccgacgcccagcgcgctgtgctgcgcggctacggttgcctgcccggccagcttcaggttgcgatcggcgactacttcctggccgtccggcgcctgcacgcgcaccttgcccgcggcgccggcatcgaacgcggcactgatggcgcgatcatgcgtgtcacccggcagttcctccttggccggcagcgtgaccgccgccgtcgcccgggcctggccctgcccctcgatgtgatggccagccaccgccagatgcgcgtcggtgtcgccgtcgacagaggccttcagggacgaaccgctgaggcccgctgccgcctgggcacccgaatcgatcgaagcgacctgatggccagcgatgccgaccttggccctggcgcgcgcatcggcagccacgcccagcggcgcctgcgcgcccggcgcaacgtgcgctgccagcgatgcatccacctgtgccgccttgatcgcagtgttgcccaggccgacagtggcgcgtacatcggccgccagcgccggcacggccacctgcttcggcgtggtgttcgctgccagcttcacctgcacggcggccggcaatacgtcacgcaccaccggcagcgatgtggtgttcaactgcaggcccaggcgagcgtccgcactgatcgcggggctgctctgcgcctgtcgcgcggcggcagccaaggccacttccgcgtcgaccttgaccggcatcggctgcgcatacttcgccgcaagcgcttgcaggtcgcgcagcgactgattggtttccgatgcccctgcgtggccgctggccagcgcgcacagcagtgccagggccagcgcggtgggcatcagcaggaaggcgcgcggatcgcttgcggcgccgccgccgctgtcgccggtggccagttccgaggccacaaccagagcattgagctggcggttccatacacgccggtagatgcggttcatgagcatttcccccgtaggcgaacaactggaatgtcagtggacttgccgttaggcaggtga

SEQ ID NO: 502843 - DNA, 528 bp, Stenotrophomonas maltophilia
atggcacttatcgccctggatgacccgcgctgggccgaactgcagcatgcctacggggctgcggatgacattccggagttgctggcgaatctgagtattccgaagggtgaaagagcggacgacgatccgattgaagatacctgggaggaactttggagcagcttgtgccatcaaggggatgtctacagcgcttcgtttgcggctgtgccgcacattgttgatgcgcttctgcagcagccagagctcttcatgtttaacttcatcgaactgccgatcacaatcgagatagagcgacgagaggccgaaatctcgattcctgaactcgtggagcctgagtactcggaagcgtttcaaagcctcgcacgcttcgccgcaagcgtaattcttgataaacatgacaagagtatgagttcagcgttgctgacagcgcttgccctggtccatgagaacacaggtgtcgcgcggatgcttgggcagataaccgcttacgaggctgacgaagcggttgatctgttcctgaatcgctag

SEQ ID NO: 502844 - DNA, 4740 bp, Stenotrophomonas maltophilia
atgaaccacatctatcgtcgtatctggagtgccgccaagcagtgctgggtggttggcagtgagttgagcagtccgcgcggcaagtccgctggaggcagggcactattgctggtggcggcactggtgggcctccctgccgcagcgcacgagcactcggaggaagtggctgagggcgagcgtgaagggaccgactccactcaactcctgttgccctctccgtggcgcttttcgtcattctcgaaccaggtaaatgcgggttacacccagctggctctggtaaatgacagccaatatcggaatgccacgatcagcggtgatatgcagatgatcctgggttcacggtcgagcatcagtggctggggatcggtggtctacggcaccgaatcatcgttgtcggggttgggaagtgtgcttgtggggaattcatcgattgcacgcggcgacaggaacgtcgtcgttggatacgggtctgaggccaagagcggatactcgacagtcgtaggcgccagctcgatcgcatcaggaattggtgcaaccgcactggggcatgacgccagggcatacgcgagcaactccattgcggtgggcagcggtgccaggacggtggagagttccgcaggtgtttcccgtattgctattggcgggaacgccttcgctggaacggcgggatattcaggtgccatcgcgttgggagggaacgcacgtgccgagtacagtggagttgcgctggggcatcatgccaaggcgagcgcccatggctcgatagccatcggagcatattccgaggcaacggaaagcaattcggtgtccgttggcagctcatcgacgaagcggcgagtgaccaatgtggacgatgcgcgattgagcaccagcagcacggatgccgttaccggaaagcagctccacgccaccaacagcaatgtagcggccgcgcgttcggtcgcggactctgccaagaccaatgctgacagtgcgctggcaaaggccgatgggctctcaggccttttgaaagagaagtctccttcgggaaatatcctcataggtgcaagcaatagcggctctgtactggacgtccgcaacagtgccagcgccaatcgcaagatcacgggcgtggcggatgccacgctgagtacgtccagcaccgatgctgtgtcagggaagcagttgaatgccaccaacaccaagctggcagatgcacagcgcgtcgcagacgcggcagccgcgcgcctgaacgcatccgccccggctatcgggctggcggcagaggcggaagggagcggaagcaccgccagcgtagcgatggggcgctcggcgaaggcctacaacaccaacagcatcgcagttggtgcagatgctcgggccggtgtcgacgccaacggcgacaagagcgctgccaccggtgcagttgctctcggtgctgcaacgcgtagtggcaacggcgcggtggcggctggcctgcgtgcttcggcagtgggtgatcgcgccgtggccgtaggcaatgatgcaacggccgcggcggcccatgccgccgcgctgggctacaaggcagatgcgagcggcaatcaggccgtcgccattggccgggaggccgccgcatcgggtttgtattcgacggcgcttggcaatcttgcaaaggcgggtgccgaaagtgccattgcgttgggcgaccgcgccctggcatcgcacacgggaagtgtcgctctgggcaacgcctcgcagaccaccggcatcaatcaggtctcggtcggcagctccagtatcaagcgcaagatcgtcaacctggcggatggcgctgtcagcagcagcagtaccgaggccgttacgggcaagcagttgaatgaaaccaacggccgggtaacgactgcacagaatgccgcgaatggcgcgcaggccactgccaacgccgcacaggttgatgccaccaaggccttggctgaggccaccgaattgggtggtctggtcgggcaggtttcggccacggggattgtccgcctgggtgaaaagaacagcggcgccgtagtggatgtgcgcaatagcgcaaatgcgaaccgtaagctggccggcgtggccgatggcgtggtcagcgccagcagctacgaagccgtgaatggcaggcagctcaatgccaccaatgagaaggtggtagctgtggaaggcatggccacctctgcggctgcggacgcgaccctggcaaaggtggatgcggccaaggcgttggccgaaacagcggttctgggcgggctggtggcgcaggtttctgcagcgggagccgtgcggttgggtgaggagaacagcggtacgacgttggacgtacgcaacagcgccaatgccaaccggaagatcagcggtgtggcggatggggctgtcggtgccagcagcagtgaagctgtgtcgggtcggcagctacacgctaccaatggccggatttcagatctggaaggtctagctcagtatgtgggtattggtgtggattcgtttagtcagcgtgctgaggctggtctgatgggagttgcaatcggagattccgcgagggcactagaagagggagcaaccgctatcggtgcgctatcttctgccgttggcgttaattcggttgcagttggacgaggcgccactgtgtcagcggccgctttgaatggattcgcgttgggagctggcgctagtgtggcttcgagtgatggagttgcggttggtgcaagttcaagggtccatgccggcgcggagggggcactggcactgggcgcgggatcggaagctactgaggcgggaactgcatcctttggcagtgttggcacagagcgcaggatagtgaacatttcccgaggtctcggtgaacacgatgccactaccgtctcccagcttaaggactccctcgccaccctcggcggcggcgcaggcatggatgcgaacggcaacatcattgcccctacttatgcagtgcagagtggaacgcagagcagcgtcgaggacgcgctgatggcgctcgatggcgctgtcatcaccgcagaccgtcgcgcggacaaggtggaaggccagctcagctcgatcttccaggactcacctccgacccgcgccgacggcatgaaccagatcgcgctgaatggcgtgaatggcatggtgctgaccaacctggctgacggccgagtggcgccaggaagccgcgatgccgtaaccggcagtcagttgtacgccgcagagcagaagatctcgcaaaatcggaacgatttggagacgatgcgcaaggagcgggagatgggcgagcaggccatgcgtggattggatgcgagcggtccgatcgatttcggcggtgcgcgtttgactggcgtggcggaggcgaagttgtcggctgatagctcggacgttgtgcgcggaagtcagctctatgagaccaatggtcgactcgatgcactggaagatgctggtcagtttctcagtgtgggtacaggtcccacgactggccgcgcggaggccggccgagccggggtcgcgcttggcatccttgcaaaggcgggcaccgaaggaggaactgcgattgggtcacgctctcttgcgttgggggtgaactcggtggcacttgggcggggatcgaccgtcttcaatggttccgatttcagcattgccattgggacgggcgcggaagtcggaacgtatgatggtggaaccgcagttggtgggatcgctctcggcatcggtgcgagggttcggaatggtgccgacggttcgatggcgcttgggttcggctcgtatgcgaccgaggtaggagttgcatcgttcggtaatggtgagatgaagcgccgccttgtaaacatcgccaacggcaccgccaaccacaacgccgccaccgtcggccagctgcgcggtgcactctccgccctcggcggcgaagtcgataccaatggcaacatcgtcggccccagcttcaacgtgcagggccagtcccaatccacgctcaatggtgcattggaagcgctcgacggcgccgtcgtcagcaccacctcgcgcgtgaaccaggtcgaatcccagctccgctccgtgttccaggaaaccccctcggcccgtgcagacggcacccaccagctcaccctggccggtgccaacggtatggtcatctccaacgtggccaacggcctgatcgcggccggcagccgcgatgcggtcaatggtggccagctgcattcgatgcagcagcagatcaacggccgcatggatgggctggagcagcgtatcgacgatcatccgcaggcccgcgccatgtcgacggcggccacgccttcgccgtccaccgaagagaccgcgccggcgccggaaaccagcggctcgccgcagatcgcctcaaccggtgaaggtggcaagccggccccgcagccgaagccgaagcaggacgacacgcccaagccgcaggtcgacaccgccgacctggagaagatgctggcccgtgccaacgagtacaccgatggtgcgatcagcaccttcgaacgccgcctggacaagatggacaagcgcttcaaccgcatggcggcgatgagcagcgcacagagtgcgatggcgatgaataccgccggcctggccacctacaaccgcctgggtgcgggcgtgggttacagcgagggtgagtcggcgatggcggtgggctaccagcgcgtgctgaacgagaagggttcggccaccttcagcctcaatggtgcgttcaccaacagcggtgagcgcagcatgggtgtcggcgtgggcatcggctggtaa

SEQ ID NO: 502845 - DNA, 1017 bp, Stenotrophomonas maltophilia
atgaagatcaagaaaattctggttggtgtcgctgttctgttgggactgttgctgggcacggtgagtgtttcggcgcaggagatcgtccagtatgtgcataccgacgcgctgggttccccggttgccatctctgatgccaacggcgcgatcgtcgagcgcaccgtttatgagccctatggtgcgaccgtaggtgatgcgaagggggatcgcccgggattcaccgggcatgtgtcggactcggcgacgggtctgacgtacatgcagcagcggtactacgatccgttggtcgggatattcctatcgacagatccggtcgacgtgggcttggacaacggagccctatttaatcgatacatgtattcggcactgaacccctatactttcgttgatccagatggccgctgcactggctctagaatcacgaatagtgacggtacttgtaagagtaccggtgggaacacgacggccactgggccgacatcatctgactccgcgattccgagggcgccatcctctggctcatctccgagcgtggcatctggcggagaatcaaactccaactggcaagagataaagtcgcgtcttggcttgtcgggagatttgacaaagaatggaaacatctttgacgtcggtgccctttttcatgatatcgcgatacccgcaatgtactcgcggggcggcggagggctggcttctgttcctgctgcaattccaatgcttgctcgattcaattttgcggtacgagcagagcatgtatttagaagcgccgcagggcatgtgaatcccactacggttgcttcacaaatgagatttgttggtcttttccagcgtgtcagctcaaacccggcgaacctaagggtggatgcggttgccgcgcggctaatgacgcaagatgcagcctctgccggtgtcagtacgtacactcagacgatgaggggaggggcgcaggtttgggttcatgtgcggaatggtgagatagtcaacgcaggcgttaatgccgccggaaaggtaagatga

SEQ ID NO: 502846 - DNA, 507 bp, Stenotrophomonas maltophilia
atgatgattgattctgatgaattgactgatgtggcgaaaactcttgcctggtacaagagtaatttcttcgagggctgtgaagagagctttgttgcggattttatggttttttgttggcaggcggttgatcccggtcgcgttgcttcgctggatttagatgatgaaactgtagatgcatgcgccgacatgctctctgagttgaagctctttgttgatgagagatgcggggaatggggggcgcctgctttctggaggcgctatatcgattgggcggactacgccgcagattttccgcttgatgagtgcaagctgtttatgcgagagactgttggttatcttgagccttcatttttcgtatttacgaccaccggcggcactgagatgaggtccgaagcaatgacgatttttgccgaatactcgcagtcccgcaaggcgcgggctgcctatgttcgatcggtaattgaaagtcggctgacgactgactccttctatcagcgatcccgttga

SEQ ID NO: 502847 - DNA, 702 bp, Stenotrophomonas maltophilia
atgagcaccagagcatcaacaccccagcagcccgatatcccatgtgatgcgatattcccgtacccaacggatagcacatcgtcgaccgccatcattgtggcgacgacccgttccagcatcgaccgtgccattgacctatcaaacagaggaatggtcaccgggatcattggtgctgactcggcatactcgatagcgccatccgaggctcttcacaagctggagcgcaaaccgggacgccacatcatcgttgtgttcagcgaccaacttacatccagcgttgacgcgcctgtcctgacatcacgccgaggtgagcagcgtttcctatccttggtcgaggcgattctgaacaaccttcacggatttcgcctcattgcatgcacgcatgaaggcgcaatatcgttgcctcccggctcccctcttgtttccgtgctgcgcgtcctttcggaccatctggatgccaatcgccgaataggcagcaactggctcgcagaagcagcacagatccagcggcggccgggcacacgactctccgaaagcagaatccgccagcgcgttttccactcggccatgatgcacatgtactggaagcatccagacttcaatcccatgaaatttgaccagatccacggagaactgaagagtttttaccgtgcatcggaaccacgaaaggaacccggcgatgcgcaacagccaggcctgtga

SEQ ID NO: 502848 - DNA, 1461 bp, Stenotrophomonas maltophilia
atgacatctcagcacagcgaagaccaaaaccagaactacaagccccgcttcgactttaatgggaggagcaattcgactgaacctcagacggcaacaatcaacgagttattgaacgaattgaactatgaggggacccggacgttccgcgggtcaatggcggcaaacagtcagtcgaacgggaagctcatcaccatgcaggggctcgaatccacgctgagcttcatacgagaagcagtcggagtagagctcaatggaacgacccgccaccttcccatcagcacgatcaagaccatcaaacttctgtacgcgaagaacgatgacagcggctcgcatctcttccgccggttagcacgaccagaagatgacagcgcaacaatggagcactggacaaccagaaggaccaccaggaatgagtacaccatcaagctcgcggatgaaatcctggaaacccttggcttggaactaagcccggaacggctcaggcgaatagaaacatcacttctcacgacatcgaagctcctagagtgcatagagcatgagaacttcgagattcttgagccgatctaccgccgattctctggcaaagatgaagcattagccacggcgttcaagttcatggaacaggccgcatccaattacattccagacgcgcctttacttcagtacacaactccaccactgcatgagcggatctacatctatctgcgcactctacctttctaccatttcatcggagagtacaagcgcatcgtgaaggccgaggaagacgtcgtccagaatgcgcgcccagtccttgagcagatgggtgaattctgcaagaacctttccgaggaatgcaagacagtcatccatgcagacacgccgatcacatccatcatggagtttccagacttcctgaatcgctactcccttcctttgggaaagctagtccagcaagcaacggatatcagaagtaaccgccgcgatctaattggcatcacgggtgagactcagaagctattgcatgcgtatgtttttcatcagtggcacaagacatccgcagagataaccaacctttccgtcgccgactgcgtcgcggcactgtgcgcgattcgataccagcagaaggtcaagacaccctatacgcctttttggatcgggcaggaatccgcggagaagaccatctcccgtctattgacccaccttggccgcaaccgcggcattgacgaactatatgaggatgactacatcccgcagggagcaatgcagatcttgtatcaccgatcctgtctgttccacgcaaggatgtcgaatcgttacgcaaggcaacaggcttggatagacttccagttggaacgcctgaacaagtacgcagagtgcttcacacacagtgacattgaccatatcgatcgatcagttggcggtttctacctgttctgcagcgagaaggctacccaagcatccacactgatcaaagtgtga

SEQ ID NO: 502849 - DNA, 750 bp, Stenotrophomonas maltophilia
atggcaagcttccattacagcatcaagagtggcaagaagggcagtgcccgcagacacgccaagtacatcgagcgagaaggttctcatagcagccgcgaagatctggttcactccggtcacggaaacatgcccgactgggctcaaggcgatcccgccctgttctggagcatggccgatcgtcatgagcgcgccaacggagcggcctacagggagcatgagatagcgctaccgaatgaactgactgtggcacaactaatcgaccttgcagagcggctggttcgcaatctggtcggagacaagccgtaccagtacgcgattcacgcaccggaaggatcactgggcggtattcagaacccccacgttcacctgatgtgctcggacagggttccagatggaatcgaccgctcaccggaccggttgtttgcacgatacaacgcaaagcgaccacgcgcgggcgggtgccgcaaggacagcggaggcaagagcccgatggagctgcggcagcaggtgactgccaaccgcaagctggttgccgacacgcagaacgaagttcttgccgagtatgggcacgaagcccgggtcgaccaccggagcctgcgtgaccaaggcttgctccgacttgctgaacgccacctgggatcgtactttatcgagggcatggctgacactgagaaggcgcaatatgctgagtaccggaacggtgccgcagcagcgaacatggcgagctcagccgcccgctcccggtcgtag

SEQ ID NO: 502850 - DNA, 1461 bp, Stenotrophomonas maltophilia
atgactggaatgttcacgaggttgccacctcgatatccgatggatgcgtttccggtggttgtacgtgatgctgggcacgagcttgtccgtaacgtacaggcacccgatgcgctgatcggcatggggcttatcaatgcgatttcgatggcctgccaagggctgatcgatgtgaaactgccgaccgggcaggtgcggcccgtttcgcagaacctgctgcttgtcgccgaatcgggcgaacgcaagtcgacggtgacgtcgcttctgctggctccatttcgtcaagcagacacgcaggcgctggccagccagaagttgaagatggagcggtaccaagccgagctgggatcgtgggaagcaaaggccaaggggatgcgcagcgccatcagcagggcggccagcaagggcaaatctactgcggaactggacaaccaactcttggatcacaatcggctgaagcccgtcgaaccacgcctccgctacttcctgcgcgaggacatcaccgccacggccgtcatggaggccttgcagggcgacggcgaatcgattgcgatcacaactgacgaaggccacatgctgttcaagagcgaagccatgggccaccttggactgctgaatcgcgtatgggactcaccagaagtgttgcctcgggatcgggcggagcacgaacacctcctggcgatgaatcctcgcgtctcggtgagcatcatgacgcagcaggcgccgctgaaagcctttctggagaagcgcgggtcgatggccaagggaagcggtcactgggcgcgctacctgatcggctggccgcagtcgacgatgggataccgtcaagttgacacgaatgagccggtatgggagcacctgccgaccttccacgcacgcatcggcgagctgttggcgaagtatagatcgatgatcgaatcgggcaggattgagcgcgaactgatcggactcacggccgatgcgaaggcacgctgggttgagttggcgcggcaaactgaatgcatgttgcgtgagggggagtacctcaacgacatcaatgacttcgcatcgaaggtgatggagatcatcgcgcggcttgcagccgccatgcactacttcagtggcgaaagcgggggtatcacacttgacacattggaacgtgcattcgcaatcgtccgctggcacgtcgacgagtacaagtacctcttctcgccgcagttcgtggcaccgcaggagctggtcgatgcgcaggcagtcgcggcctacctcagctcgcgcatttggcagggccctgcatcggatacctatgtcccgaagaaccacgtcctgcgcaatggtccggtacgcaacggcccccgattgaatgctgctctgggcctgctccaggcgaaaggggcggtgtggattaccacaggctatcgggataagaagacctatttgcgcctgagcaacgccttcttcggccagatccccatggcattgtag

SEQ ID NO: 502851 - DNA, 345 bp, Stenotrophomonas maltophilia
atgagcgacatcgttgagacctgggcaggcgctagcaatccactggaggaacttgaactggccttgcagcaggagctgactggcggcaggagcaaggtcgagatcgacttcaaggaggcctatccgctgttcgaacggcaccttgcacaaaagatgcgcaagcgggcggtgatggaccggttcaatgccgcataccagcacgagctgaacctggcccagttccgcaagctgctgaacgcggagcgcgatcgtcgcaaggcgtcaggcgacgtggtggcatgtgcggcctgcgggcagctgctgatcgccgcagacgatacgaacaccgtggaggacgcgtcatga

SEQ ID NO: 502852 - DNA, 309 bp, Stenotrophomonas maltophilia
atgaaacaccacacgaaccgtccgtcgtcgatcgcggactgcaacgagcctacccatgaagccacgtgcgcggatgggatcgccaccggctggtcggatggcccgaccctgcgcctcaaggacctgctcaagatgctctccgtcagtaagagcaaggcgtacgagctgatgaagaccgatccggaattcccgaagggcgtcccgctctacgacagcgaccggtctcccaagttctattggtcccatgaggcgatcgcgtggatcgaaggccgcgcctccaagttccgcactcagcaagagggcaactga

SEQ ID NO: 502853 - DNA, 474 bp, Stenotrophomonas maltophilia
atggcgatggcaatggagcttgacggtgacgttcgcaggttcatcagcgttctgattcaacagtccaagcacgtattcgagttcgctcgcgagtacgagctaagggtctgggcagcggaggtggaagaggaatttgacggcgaaagtgtccaatccgacattgcctttggattggttcaatggcgcgaagagctcgagcggggtgagccaatccttaccgatgagattggttatcctagggcctaccagctactcatcagcgagttcagtgcgctgttccaacgctccatgcggatggctgagcgagaggggtatggccctattgatcactccctggatctgggcgaagtcgcgctggccagcctcaaggacgctgttgggagcaacacggctgcgcgtgccttcgtgtcgttgctgcttgagctggtgaagatggcgaaggccatcagcaagcgattgagaggcgggtggtaa

SEQ ID NO: 502854 - DNA, 990 bp, Stenotrophomonas maltophilia
atgatcgagtcgactgcgtcgggaacccatgcctatgtccttcgtgttgccccaggccaagaagacatgctggcagactgcctggccgacgatcgtatcgtcatcggctggccgagcatggacggcctgctcgatgagtcgctggagtgggtgcctttccggtcggtggtggccgaagcctactacccggacgcgcccacgctgcgcaaagccggggcggccagcggccacctgtggcgtttcatccgtgacatgtccatgggtgactacgtggtggtgcccgcgcctgcccggcaattctacgtggctcggattatcggcgccgcccaggagggcgccaacaaaggcgtgggctactggcgggcggtggagtggctcaacggcaaacagccaatggaccgtcagctggccagcgccgcgctccagtcgcgcatgaagattcaaggctctacggccggtgcgtccgatctggtggctgacatcgagtcggtgctggaggacgggcgctcgatcgccgccggtgagcccgcgcccacgttcgagcgtgacttgcgcagtgcgctgctggcgacgaccttggagcagctgcgctttgggcggctggaccccttcaagtttgaaaaaatcgtccaggtggtgctcgacagcctgggcgcggtcgacagttccatcaccgcccgttcgcttgaccagggcgacgacatcgtggccaacgtcttgccgctcgggttgttcgagttgaagctcgtggcccaggtcaagcactacaaccaggtggatagaccgcttggccctcacgtggtggatgagttggtgcgtggaatggaaaaacacgacgcggacctgggcgtgatcatcaccgttggggagatcggcgaggaggccgaggtccgggtccaggagctcaacgacaccggcagccgcattgcgttggtgaatggcgagcaactggcgcagctttatctggatcactgccttggagagcgctga

SEQ ID NO: 502855 - DNA, 840 bp, Stenotrophomonas maltophilia
atgccggaaaagtgctttcgcgctgacctgatgaaggtcggacaggagcgcgacttctaccgtatccgcgacatgacggatacagatattgccttgatccacgcagtgctcgtggcgcccatgggaagtgaaatccaaagaaaggcggcggagatgtggctggtcgagtttgaccggttgaggttggtgcgacgacaacttgaagaggtcgacatcgatccagcaccggttctagagcccctgtatatcgaagcggaagagaagcttcatggcgacattgagcgcagggcgctgccgctgttggagcggttgattgcttcggataccttctgcttggtcgatgacgactacattgtattcgcgcacttcctcatgacccagtatttccgcacaagccgaatgctagggaatctgaggcggggcatgggtacgcgattcgaaggtacgcttgagcgatccatgggagtgctgcggcacattatggctacggctgcagggttcacgctctgtgccgagcgcaccacgatgaagccacataccttgatcaacgacaccgatgtcccactcataaccggagaccagcctgtcatcaacatgctggcggtggacctgccagctgacgtaatggttgaggactgcgaattctactacccgctatcgccacacaaggccttggtgatcgtcaaagatgaccggttctccagtggcaggatcagtgaaaccacggtggcgcgcgagttcaatcgccttatcgctctgtctgccgagcggcaggtttacgcagcgcaagagtcagacttagatgacgtcctgggcctagtgggccggcatgccgggtga

SEQ ID NO: 502856 - DNA, 504 bp, Stenotrophomonas maltophilia
atggagccacaacccatggcattgcccccgctgtacgttcgaagcgggacgcgatcctacaaggccgccagcgccgatgaggtcctggaggcggctcggaccgtgatcggacagaggatgcagcgcggggtcgccttctcggacccccagaccgccaaggccttcttccgcgacaagctgggcggattgggtcaggaagtctttgccgctgcattcctggacacccgtcaccgcttggtcgattacgtggaactgttccacggaaccatcgacggagctgaagtccatccgcgggaggtggtccgccatgcactccgctgcaacgccgcggcggtgatcgtggcgcacaaccatccgtcgggttcggaacagccatcagctgcggatcgtgctgtaacgacacggctcaagcagtcgctcgccttggtcgatgtgcgcctgattgaccacgtagtggtcggtgggctgcagacggtgaccttggcagagcgtggttggctttag

SEQ ID NO: 502857 - DNA, 159 bp, Stenotrophomonas maltophilia
atgctgaaagcgattggtggggctgtggtctacggcttcgcgctttacggcctcaacaccttcatggagaaggtcaaggtcatgcagcgcgtcaagcgaccgctggatttggaggatcccggtcaggttgccgggcaggaggatgtctccgtcgcgtag

SEQ ID NO: 502858 - DNA, 1779 bp, Stenotrophomonas maltophilia
atgtccaaatcgcttaagctcgaagccaagaagaaggatgttctgtcaaagttcggaatccgagtggagggtactgtctggacgatgccaatgcatatggacggcgagtacatgacaatcgacatgtcgacgattcccgatagctggtctcgccatgtgtcggactatcttctggcgacgcttgagggaactacaaagcggagcacccagaacattgcagtcataagagagcgattctacatgctgcgcaggttctttgttctctgtcaggacgaaggtgccaactgcccagaggagatagatgcggcgctgttgatgcagtggtacaggacctgcgcgaagtctaggttcgggaagcatcagtccgcgtgtgcgcgcagtgctcatgtggccacggtatctgagttcatctccgatcatctccgggtttcgaacgaggtgcgtgcgctttgcgcagcgattcgtgtgagatccttgagatctaaacgactgcagctgcgcaggaggggttcgcgggagggtgtgtcggaggcggcgatgcttcgatatcttcgtgatgctcttgccgtcatcaacagcgacgctgagagcgtcatacagttctgtggtgaatcagcgcgtgtcagggcgctccagccgtcaagagatacaagcactaaacagtacgtcagggcaatgcggcggcaacgaatcaagtcgccagtatcagctgctctgcgaaacctggactccgctagttcgcgtagcgaacctaagctgcgtcgtatcgtttgtggtgctgcaatctttgtaatctccctactcagcgtcatgcgaacttccgagcttcgtcgtctccgggtcaattgtgtggaggaagtgaatgagggcagggagcgcatctttgtggttcgtggccatctcagcaagagtggacggccccacacttgggttgtcggtagtgacgtgaagaacgccatagaagtgctcgagaaacttggagttcaaatgcgttctgagaacgcaagcgagtacctcatgctgggaaggcttgtttccggcagtgcaagttatgttgccggaactcatgtcagcgatgccgttgcaacgggacatcagctacttcttactctccggtgcttcgtaagtgcaagtgaccctactgatgaagcgacggcgaggaagatcaccttccgtgctacccggcgtttccttgcaagattcatcgctcgtagggacaggacgagcttgggcgctcttgcagatcagtatggccacttgcatgcacaggtgaccgatacctactacgttggatcagatcctgatctagcccgaatactggaagaggaagtggcgcaggaagtggcgactgcgatggatgatctcgtccattgtgagtccgtctattcaaacctccctaatgctgaacttgatgcaatccgggagcgtatgaaaggcgtcctggcgcgtgcaacgacacaagtcgacgctttgcgaatgatgggtggtggagccgtgcttggggcctgtgactggggctactgtttctatcgtgagaagaggagtaagtgtgatggagggcccgggggtcccaacgacgcaaatcgcaccccatcgatctgtgttagctgcctgaacttcagtgcgacggaggaacatctggactggtggtccaggagagtctccgatctcgaagcattcctgcgacttaggtctattccactccagtcgcgcctacttgccaagtcacggttggcagacgccctgcgggtcattaaagcaatcgggggtgagaagtga

SEQ ID NO: 502859 - DNA, 1608 bp, Stenotrophomonas maltophilia
atgaatgggctcatcatgtcgttcacttccgacttcgtaggaagggaactcgaccattacgacttctctagcctcgggttaccagagagcgcggcaggaaccttggcgtccgcgttcactgctgtcaccgcggcctatcgatctgcgagccgaaagcaggcatgggcaacgatgaagaagttctctcgatttttgaaaaagagcagagatccgtggaagcgcatgcaacagaggagcgtgctgaggcagttcctggatgaaatgaatgtagatcttggtgctgctaccgctagtagccactacaacttcatggggatgatctacaggtggctcgggcaaagcggtggaagccttaccattgtctggctaaatgtggacacctcgcggtgtggcctgatcaggactgattctccgcataggcgtaacgcgctgacaaaggatgaacttgaaagaatccatagatcggcaaaacaggatatagatgcgataagagctcgagctgagatggtgaagaagatcattgagggcgggcatgaggtggacatcccagtccgcgatcaagtgaacattcgacgcatcaagaatggcattgagaacggagtccttggaaagaaatatcaggttcgcggcgggttcatcacatggaagacgccctacaggaggctgcgtggctatctgcttccgacagcccgggagtacatcgcatatgtgatttgcatactctttgagacgctggccaacccaatggccgccttcgagctgtcatgggactgcctctcagaccatcctattgatccgctcaagaaagtgctgatctgggataaatttcgcgccagtgagcagcaggcattggacgtcacaaccgaaggcttgtactcagttccacgattgattgacgaggtactcagtctcacggaactcattcgaccaatcgcaggtgactataatcaccgtttgttcctgatcccttcggcgggtagggtcacatccccttgcgatcaaggatggcatgacgcgctagccgaattcatctcgcagtatcgcctgcccgacttcaatttcgtggatttgcgaggctctggcgcacgcttgcttgccgaggctggattcgacatcgtttcgattcagaacaaactgcaacattcggaggcgaggaccaccttgggctacctgtcgcaatcacgggaagccccagatgcgaagcgacgggttgccaagtttctggggatggttgtagaagaggctaaccttcccaatcagccgtatgaaagcgctgtcggccttagttgctcagattcaacagccggaattgcaagcgggtccaggcgtggcgagccatgcctggagtacttccagtgtgcgacctgcccaaacagcatcgtcattatcgatagtgttaagcacgtcgcgaggatgctggctgcattgcgatccctggatgagtttaaggagcacgcacaaaggtcgctcaacaagcgccttaggtacgaggcggcattcaaagagacccacgacatcctgagtgcactgattaagcgtgttggaaaggatgttcttcgtgcggccactaaactcgctgtgacgattcgttgtgtcaccttggagtga

SEQ ID NO: 502860 - DNA, 1134 bp, Stenotrophomonas maltophilia
atgctcctccttcgcacacgtgatgtagatagagagcgtctggcctcgcttggacggattgcgtccgtcttggacttggctcgagcaaacatgctgccgtcaggctttccgcttctgctggacggacttggacagctacattggggagcgtttgccttccttctagattgctatcgcgtggactcatcacagccgcgcttaaaaacgctgcagacctactcggaaggactgaaggggtggcttgagtatctcgacagcaggggtgccgattggaaactaccggctgcatcacttctggcggattaccggaaggagctctccggcaggcgagtcggtcggaggaagacatcaaacgcaaccttgaatctcaggactgccactgtaagggagttctacaagttcctagtcagtgcggactggggaggactcgcaaatagtgggctggacttggagctcgagccgatcaagcgattcctcgcggggaccagagtcttgcggcgagcgaagaagtacaagaaaaagccgcgagcactaacatcggagcaaatcgcagctatggtcgcggaactcaagcctccgtacgacctcattttcaaatggaccttgtctaccggcttacgtcgtacgactgctgcagaattggagcttgcacagctgccgcgagacacagatcgatcagttgctctcacctacatgcgagtggtcgtcaaggggggcaaggagcatgaagtgcccgtaacgaacgccttgctgacgctgacatggagctacgtggcctcgcacagggagatggcattggctaaaaatggcaagacctctgatgcgctcttcgtcaacgcacagggggatgcgatcacatccgatgcgtactatcaagcgtttcgaagggctgctcgaaagctcggttttgcggcaaatccgcatatgactaggcatacattctcggaacgcatggagaggattctcagcaaacttgagggtcagggtgcgaaagttaacccaatcaaggtcatccagcacattctgggccactcgcattcccagaccaccgagatctatcttgagtccgtcaagcgttgtgatgcgggcttactgtcagccctactgacgaaccaaagtgagcttatcaaatga

SEQ ID NO: 502861 - DNA, 690 bp, Stenotrophomonas maltophilia
atgaacgccgtggttgcagaagcaagtgactctcgcctcctcaaagcggtcgagagcatcgcgatcagtcccgcagacgcgaaggccctcgtcacccagtacaggcgccagattctctcccgggatccaacacgcggccagcacgaggttgcagggttggtggccgacaagatcatcagccgttattgccggatgtcagccaccacggggggagcgactgctctgaccggggtcatcccgggaattggtacggccctggcaatggttggcggtggtctcgccgatgcaagcatcagcatgaaactgcaggtcgacatgaccatgtgcttggctgaggcctatggatgggacgtgaatggcgaagacgccaggcacctggcttttctcatcgccgcaggaggttctctggagaagctcggcgtcgaagcgtcgactcggatcgcctcaaatgctggcgtaaagatggtccgtcagtacttgaagggcgccgtgttgcaagctctcaaggaactcttcaagaagatcggcatcacctttacccgcaaggcgctggaaaaagccattccgttcggcatcggagtcgtcatcggctcaggggccaactatgcgttgaccaagtatgttggcaatactgcgcgaagctggttcgaagcggatgccgcactgggcaacaagcccaatgaaatctga

SEQ ID NO: 502862 - DNA, 2910 bp, Stenotrophomonas maltophilia
atggtcttcgcccgttgctgcaccgtattgctgctggccgttgcggcctggcccgttggcgcacagtcgccgacgatctcccggccgcaggccgccacgccgctgctgatcgcgccggcggctgagcagtcggttcaattacgacacgcccgcatcgaaggcgaagtccaggccggcatcgcccagacccggatcacactggaattccacaacccgaaccggcgcgtgctggagggcgagctgcagttcccgctggccgacggtcagcaggtcagcggcttcgcgctggatatcaacggcgagatgcgtgacgcggtgccggtgcccaaggatcgcggccgccaggtgttcgaggagatcgcccgtcgcggggtcgacccgggcctgctggaacagaccgctggcaaccagttccggttgcgcatctacccgctgccggccggcggtagccggcgcgtggagctggtgattcgcgagccgttggccttcgccggccaaggctggcagtggacgctgccgctgcagttcgccgccggcgcggcctcggttgaactgaaactgcagacacccggcgcgaccactgcaggtacggcacccttccgcatcagcgcgggccaactgctgtggcagggcaagggcgcgcagttgccgcagcagctgcagtggaacctgccggcagcacgtcaggcgcaggtgcaggtggcgccctggcaggacggccattacctgttggcgcagctgccggtggtggccagcagcacgccgcgcacgttgcccagcgagatcgggctgctgtgggacggttccggctcggcgggccagcgcgatcgcacacgtgagttcgccctgctggatcgctatttcgctgcgctgggtgacggcagcgtggcgttgaccgtactgcgggatcgcgccgagccggtgcgtcgattccgcatccgcgccggcaactggagcgagctgcgcgcagccctgcaggccgtgcgcccggacggtgccagcgcgctggcgcagtggcagccgcaatcgagcgtgaaggaatacctgctgttcagcgatggcctgctgacctatgggccggaacagctgccggcgatggcgccggatcaacgcctgtttgcggtcagcagcgccggcgcgcgcaccgatgccgtgcgactgcgtggctggagcgaagcgcatggtggtcgcttcgtagcgctggggaaggatgtcgaattggccgcccgtgagctgctgtcgtcgccgctggatgtgcaggtcgatgcagggcgcggcgtgcaggacgtggtgatcgatcgtcgcagtgaagcccagggctggttgtggctgcatgcacgactggcggccgacggcgtgccgatgcgggtgcgcgtgggtggcggcgaatggcaggcactgccggccacgcagaaaagcgatgacggcgaactgctggccggcctgtgggcgcaggcgcgcctgcagcagctggccgccgaccgccgcggcaaccgcgaggccatgcagcgcctgtcgcagcagtttggcctggtcgggccggatacctcgctgatcgtgctggagacactggaggactacctgcgctatgcgatccgcccttcgggcacgctgcgcgccgagtacgacgccaggttcgcagtgcaggtaagagatcgcgccgctgctgatcgccagcgcctggatgaggtggcggcacgctggaaggagcgccagcagtggtggaaccgcagctggccgaagggaatgccgccgcaggcaaagggcggggcactggaagtggcctccgcggactacgcgatggaatcagcgccggtggcgatgctcgccgcgccggccccggcggcaccacccgccccggcaccgatggccgccgccgagcagcgcatggaagccagcagcgcgcgtgcgcgtcgctcagcgcctgcatcgaacaaggccctggattcaatcacggtcactggtggccgtgtcgctgcgcccgctgctgccaacgacggccaactcggcatccagctggcggcctggcagccggactcggccatcgcccggcgcctgcgcgagggcccgccgtcgcaactctacgaccgctatctggccgagcgcgatgcccacgccgacagcagcgcgttcttcctcgatgtggccgacctgctgctggagcagggccagcgcgaactggcactgcgggtactgtcgaacctggccgagatggatctggacaaccggcatctgctgcgcgtgctcggctaccggctgatgcaggctgatgccccggcactggcggtgccggtgttcgagcaggtgctggcgatgggccaggaagaaccgcagagcttccgcgacctgggcctggcgctggcagcggccggcaagccgcagcaggcgctggcgccgctgtaccaggtggtggtgcggccgtgggacagccgcttcgatggcatcgccctgatcgcattggatgagctgaccaacctggtggcgcgcagcacgccacggctggatacctcggccatcgacccgcgcctgctgcaggcaatgccgctggacctgcgcgtggtgctgtcgtgggatgccgacaacagcgacatggacctgtgggtgaccgacccgaacggcgagcgtgcctactacggcaaccgccagacctaccagggcgggcggatgtcgcaggacttcaccggcggctatggccccgagcagttctcgctgcgcaacgccaagccgggcaagtacaaggtcgaggcgaactatttcggcagtcgccagcagctggtgaccggtgcgacgacgctgatgctgcgcctgaccacccattggggcacggccaagcagaaggaccagatggtgacaatgcggctgaaggatcgcgccgaaaccgtgctggtgggcgagttcgaggtgcgttga

SEQ ID NO: 502863 - DNA, 300 bp, Stenotrophomonas maltophilia
atggacaacgtgatgggaattgccctcggcgggatgcgtgcgtcccagcagggcgtgcaggtggctgcgcacaacgtggccaacctggcgaccccggatgcccagcgcctgcagctgcagcgcagtgctgccgggcagggtggggtgcaggccgcggtgattcccgtcggcgccgatgccggcgcgccgctgggtgacctgctggccgcgaaagccgaggtggtggccttcgccgccaatgccgcggtgatccgccgccaggaccagatgctgggttcgctgctggatcgcgacgcctga

SEQ ID NO: 502864 - DNA, 2457 bp, Stenotrophomonas maltophilia
atgcaccgcctgcgggcggtaatccagatccagcggacgctgcagctggcggccgttgccgtaggtccagccggtcgccgggccgaaggccgcataggtcacgttgttcaccacgatctggcgcgcctggccggggcgggtcaggccgatctggctgatgcggccctgggtatcgcgcacgtagtcagccacgctgccgtcggggtaggtcaacgcggtcaggcggcccgacttgctataggcgtagcgcagcgtgctggcaacgccgttgacggtctgtaccttgcgggtgaccttgccgaagcggtcatggcagtactgggtgctgccattggcatgcagcacctgcccaagccgtcccttggcgaagcgctcgtcggcggcacaggcggcaggcgccacgtcatagctgtagcccacgtccagattggggtccggataggcgatgccgatcaggcggttgagcccatcgtagtgataggtggcggtgacgccgcgtgcatcggtggccgtcttgcgattgccggcggcatccacggtgaagctgctggcaccgctgtccgggctgacttgcccggtcagatcaccgaaaccgttataggcataagtggtgtgcagacccttcgggtcggtgacctgggtgacctgatccagcgcgttgtactggctgcggatctccgccgccacgccgcccacgtcctgcagggtctgcgccaagcggttcaacgggtcgtactgctggctggtcacgcgctgcagtgcgtcggtcaccgtctgcgggttgccgttggcatcgtaggcaaagccggtggcgtgattgctcgcgtccttcagtgcggtcagctggccgagcgtgttgaacgtccgtgccagggtgcggcgcagggtaccgcctgcatcgagcgtgtcttccttgaggcgattgccggcattgtccagcgtgtagtgaatcgtgttgcccgcgttgtcctcgatatcggtcaagcgcagcgccgcatcgtagacataggaaacgctgctgccgtcgggctcggtgatctgttgcacctggccggtcggccagtagctgatctgggtgacccgattctcggcagtggtcgcgccacgcacggtgaccgaggttggccagccgcgggcatggtaggtgtagtcggtgaccacgccgttggcatccttgaccgacaacggccgcccgaacgcgtcgtaggccagagtctcgaccgtctggcccagcgcattggtcacactgcgcaggtcgcccttgcgataggtgcaggcacctccggtcgcgcaccctgcatcatccgccgagtaataggcataggtaacggcatcggccacatccgtgcgcgggccatccacactcttcagcagcccctccaccgggcagctgcctgccgctgccacatcagcggcttcgcagtaggtgtagctggtgatgcgcgtctgaccggacgcggtgtcggtcaccgtgttggttgtcggctgacgccgggtattgaaggacgttcgggtttcacgattgccgatgcgggtggtcagtaccgcattgatttcgacgtcgcgcgccgtggtcaccacccgctgctcgggcaggccgaacgcttcggtcacggtatggatgctgacggcacgaccactcaccggatcggtgccctgcgcataggtgtgcttggtctggatgccgcggcgatcggtgtaggtatccagacgccggcggaagtcgacactctggtcgtagtaggttcggctgacggttccctgcgaatccgtcaggccggtcaccttgcgcgacggagcgctatcgccgccgggtgtaagggtgtagtcggtctgccgccccagcgcgtcggtcaccaccgcaccgccattggggctgtaggccagtgtcacgccatcggcaccgccggcatgctgactggagatcacacgaccgatgaaatcgtaggtaaaggtgctgtagcggcgaccgtcctcggcggtgatacccgtcaggtgctggggaaaagcctggttctcgtagtgatacgtgcgcacaccgccacccgcataggtcaccgtggcgacctggttctgcggtgtgtaggtgtaggtggcgagcgaaatgccttcgaccagcaccgaactgatcagcgcctcatagtcgttggactggtagacgaactccagtgtgcggccactgctgtgggtaacggccgcaaggcggtcgctgtcgtcgtagatataggtcagcgacgtgccatccgcgaagcgcttggcggccagacgcccgtccgcgtcgaaggtcgagatggagcccttcgagtacagtgtccagttgccgttctggaccagacgatcgccactgtcgtcgtccgcctcataggcttggccgaccttcttgaatgcacgctggaaaccagtactttcaatgatgcccacactgtcaacgccatccagtgccaagtgggcgcctag

SEQ ID NO: 502865 - DNA, 531 bp, Stenotrophomonas maltophilia
ttgtccgaaccgccgccgcgctccgggtctccgggcgcggcggtttcgcaattgcaggacgtacaggcgtgccagaacgcgttctcgctgccgaagggctggcaggtgcaggccgctggcgaacagcgttggctgctgaagggcaccggcgagcgcccgctgcaggtcacgctgcagtgcattaccgagctgtgggctggcccggaagatccggtgaccgattcggtgctggggccgttggagccgaagcggatgagcgccgcgatggccgattggggtactgcgaaagcatctggctacccgatgcgcgcctttcaacggcgcatcgtacccggcaccgaagtgcaggaaatcgccgagctgccgcgcgctgaccgcgccaaccccaacgcaccgcatggcctgctgatgctgcgctgggacgaggaagacccctcacatattcaacaacgcgaggcgttcatcgccacgctgacgcagagccttgaagcgccgggcgctgcgaaaaacaccactggaacggcaccatga

SEQ ID NO: 502866 - DNA, 2538 bp, Stenotrophomonas maltophilia
atggctctcaagaaatcagaactctattcctcgctttggcaaagctgcgacgcgctgcgcggcggcatggatgccagccagtacaaggattatgtactggtgctgctgttcatcaaatacgtcagcgacaagtacgctggcaagccctatcagccactcaccattccgcgcggcgccagcttcgccgacatggtggcgctgaaggggaagagcgacatcggcgaccagatcaacaagaagatcatcgcgccactagtcgacaagaaccctcagctttcgctctccgacttccccgacttcaatgacgcggccaagcttggtaccggcaaggagatggtggagcggcttaccgacctggtggcgatcttcgagaacaaggcgctcgatttctcgaagaaccgtgccgagggcgatgacatcctgggcgacgcctacgaatacctaatgcagcacttcgccaccgaaagtggcaaaagcaagggccagttctatacgccagccgaagtgagccgcgtaattgccgcgacgctgggtatcgccaccgcgccgaccacgcatcagaccacggtatacgatccaacctgcggctcgggctcgctgttgctgaaggtggctgacgcggcgccgaccaaggtggcgttgtacggtcaggaaaaggacgccgccaccagcggcttggcgcggatgaatatgatactgcatgaccagcccacggctgagatcacgcagggcaacacgctggctgatccgaagtttcgggatggcaagaagggtaatgaaagcctcaaggtcttcgactacgttgtggccaatccgcctttctccgacaaacgctggagtactggcatcgacccgctgcacgatccgtgggagcgcttcaaaggcttcggcgtgccgccggccaaacagggcgattacgcctacctgctgcacatcgtgcgctcgctcaagagcaccggacgcgcggcctgcatcctgccgcacggcgtgctgttccgcggcaatgccgaagccgatatacgccgcgcgctgatccgcaagggctacatcgaggccattatcggcctgccggccaacctgttctacggcacgggcattccagcctgcatcatcgtcatcgacaaatcgcgcgcggccgagcgtgtggccgacggcaccggcatcttcatgatcgatgccagtcaggccttcatgaaggacggccccaagaatcgcctgcgcgagcgcgacattcatcacatcgtcgacaccttccggcgtcggcaggacgtgcggcgctatgcccggcaggcgagcctgcatgacatcgagaagaacgagtacaacctcaacctgccgcgctacatcgacagccagctgcccgaagatcggcaggacatcgaaggccacctgcggggcagcatccccgaagctgacgtcaaggcggccgacagcctggtcagtcgctactgggccgtgtgcccggagctcgagcgtgcgctgttccgatccaaccgcaccggttacgtcgatctggctgtcgacaaggcgacgatcaagtccaccatccacgaccatcccgagtttgtcggcttcattgcacgcatgaacgcgcatttcgccgcgtggcgcgacgcgcaggcccaggcgctgaaggcgctgcgccccaacacgcctgaagccaagccccagcgcgtgatcgccgaactctccgaagtcctgctcgcccactacctcggccagccactgatcgacgcctacgccgtttaccagcatctgatggattactggacgcagaccatgcaggacgattgctacgcaatagccgccgacggctggaaggcacagacctaccgcgtgatcgagaccgataagaaaggcaagcggaaggacaagggctgggcctgcgacctggtgcctaagccgctggtcgtcgcgcgctacttcgccaaggagcaggcctcgctacaggcgctgcagggcgagctggaaggcgtgagcgcaaggctcgccgagttggaggaggagcacagcggcgacgacgcagccttcgtcggtttcgacaagatcaacgtcgcggcggtgaaggaccgacttcgcgagatcgaaggcgaggtaaaggccgagatcaaggcggccaagaggggcaagtcagacaggtcacgcaaggcgctggcggctaccggtagcgatgcggaagagcctgtcgccgaagaactgcgtgttctgctggattggttgaagctcgcggccgaagaatcggcgctgaagaagagcgtgaaggaggccgacgcggcgttggatgcagcggcctatgcgaagtacacggaactcactgaggccgaagtgcaggtgctggtggtggacgacaaatggctggccgcgctggaagtggcggtacatggcgagatggatcggctgagccagcaactgacggcgcgggtgaaggagctggcggagcgctacgaggcaccgctaccgcagttgagcaagcgcgtggcagaacttgagacgcgggtgagccggcatttggagagaatggggttctcatggcgatga

SEQ ID NO: 502867 - DNA, 1911 bp, Stenotrophomonas maltophilia
atgaaggaagccactgcccgatatcgccttttgagtaacggcgagaaatggcagcacactgaaatcggcccgttgcctatcgactggcaagtgcgacgccttaacgagctggcgagcattagaaccggtattgcgaagaacggcggcgcggcaatcgacaaccctgttctcgtacactacctgcgcgtcgcgaacgtacaggatggctacctggacctgtcggagatgagccagctcaaggtccgcgccgaagacgtcaagcgatatgccgttctgcctggcgatatgctgatgaacgaaggtggggacctcgacaaactcgggcgtgggactttgtggaacggggcgttcgaaccgtgcgttcatcagaatcacgtcttcgtcgttcgttgcggatcccggcttcttcctgagttgttgagcgcatggaccggctcggtgcaggcgcgtcgcttctttatgctggcgggacggcaaacaacaaaccttgcttcgatcaataagacgtcgctaggacaatttcctattccgttgccgcctacaaagggtgaacagcaagccatcgccgaagcgctctccgatgcggatgccctaatcaaatcgctgtcgctgttgctggccaagaagcgccagatcaaacaaggcgccatgcaggaactgctcaccggcaagaagcggctgccggggttcgacgcggagtgggtcacacggcgccttgatcagcttgccgacatcaggagtggaggcaccccgagcactgcacaggatcaattttggaacggcgatgtcttgtggtgtacgccgacggacattacggcactggatgggcacaagtacctcagcgacaccgcccgcaagttgacactgtttggtatgcgcgcaagcgcggcagagttcattcccgccaattcgatcgtcatgacatcgcgcgcgacgatcggtgagtgcgctatcaatgtggagcctgtgacgacaaatcagggcgtcaagagtttcgttcccttcgagggtgtcgacatagactttctgtactacctcctgttggtacaacgctctgctttcatcaatctgtgcagtggcagcacgtttctcgagataggaaagacacagctttcgtcgtacgaagtggtggtccctgcagaaaagggcgagcaaacagccatcgcacaggtactttcagaaatggacgaagaaatcgtcgcattgcaacgcaggctgacgaaggtgagagatctcaagcaaggcatgctgcaggcgctactcacgggcagtattcgcttggtgcagcctgcgtccaatgtcatccctctacccaccgaattcgcggcggctaaattgcccgccactcagcccaaccacaactggcaaatcaacgaagccgtcgtcatcggcgtgctcgctcagcgattcggcagcgagaagatgccgttgggccgcatgcgtcgcgtgaagctcacgtacctgctgcaccgccatgccgaaggccgggccgagggctgcctgaacaaggccgccggcccatacaatccggacaccaagtacaagggtccggagcaggtcgcgctgaagaacggctacgtgcgggcgctgcgcaatgagaaatacgaaggtctcgtcgccggcaaggagatcgagcaggcgcagcgctacttcgagcagtggtacggcgaggccgcgctggcgtggctggagcgcttccactatcgcaagactgaggaactggaactgctggcgaccgtggacatggcgatggtggatctggccgccagtggagagctggccgacgtggtcagcgtcaaacgcatcatcgccgcgcatgcggaatgcttgcccaagctgtcgcgcgagttgttttcggacgagcgcatcgccgccaccatcgccgagtgccagacactgttcggcgtctga

SEQ ID NO: 502868 - DNA, 3138 bp, Stenotrophomonas maltophilia
atgtccccgatcggacaaccagaacgcgccacgcaagatcgcgtagtcgcactcttccgcgacgaattgggctggcgctacgcgggtgactggtcggaccgcgagggtaacgccaacattgaagagagcgagctcacggcttggctatcaaagcgaggctctacgcctgcgcagatcagcgccgcattactgcgcctgcgcagcgaggcaggtaaccaccatcgcgcgctctatgggaacaacaaggccgtgtacggcatgctgcgctatggtgtgcaggtattgaccgccgcaggggccaagacgcaaaccgtcgagctgatcgactggcggcatccggaggccaacgacttcgccattgcggaggaggtgacgctcaagggcgaccgcacgcggcggcctgatctggtgctgtacgtcaacggcatcgccatcggcgtgatcgagctgaagaatagccgggtatcggtgggtgatggcatccgtcagtgcctgtcaaaccagcttccgatgttccacgaggcgttcttcagcacggtacagtttgtcttcgcgggcaacgattccgagggattgcgctacggaacggttggaacgcccgagaagatgtttctgaagtggaaggaagatgaagccgacgacagccgcttcaagctcgacaagtacttgctgaaaatctgcgacaaggctcggcttatcgagctgatgcgcgacttcgtgctattcgacggaggagtgaagaagttgccccgcgtgcaccagtattttggcatacaggcggcgcaggcgcatgtacagcagcgcaaggggggcgtcctgtggcatacgcagggtagcggcaagagcatcgtgatggtattgctggctcgttggatcctcgagagccggccgcaggcgcgagtggtgatcgtgactgaccgcgacgagctggacaagcagatccagcgcgtgttcatcgatgctggcgagaagctgcaccgcagccgcagcgggcgcgatctgatgacacaactggcgcaaccagcgcctaggctgctgtgctctttggtgcacaagtttggtgtggaggcgcgtggccgcgacaacaaggagtttgaggccttcctggaggagctccagacgcagtcgccaacggcggtgggtgagctgttcgtcttcgttgacgaatgccaccgcacgcaaagcggtcggctgcattggttgatgaaggcattgctgccccaggcggtgttcatcggcttcaccggcacgccactgctaaaggctgacaagcagtccagcctggaggtgttcgggggctacatccacacctacaagtttggagaggcggtggaagatgaggtggtactggaccttgtgtacgaggctcgtgatatcgaccagcggttgggctcgtcggcgaagatcgatgcctggtttgaggccaagacgcgcggcctaaatgcttggcagaagcaggagctgaaagccaagtggggcaccatgcagcaagtgctgagctctcgttcgcgcatggagcgcgtagttgctgacatcgtgttcgatttcagcgtgaagccgcggctatcgaccgagcggggtaacgcaatcctggtcgcctctagcatctttgatgcctgcaagtacttcgcgctgctgcagaagacgccgttcaagggacggtgcgccgtcgttacctcgtacagcccgcaggccaaagatgtgacgaccgaggaggtcggcgccaatacagagagcgacaagcagttcattttcaatacctacaccgagctgctcaatagcgtgcaagccaagccggggatgagccctaccgagacctacgaggagtgggccaaggctctgtttgctaccgagcctgcgaacatgaaactgttggtggtggtggacaagctcctgaccggtttcgacgcgccgccgtgcacctacttgtatatcgacaagtcgatgcaagaccatggccttttccaggcgatatgccgcactaaccgcttggacggcgatgacaaggacttcggttacattgtcgactacaaggatttgttcaagaaggtggagaaggcaattgccgtctacacctcggagctggaccacagcgcgggcgacactgacccagaagtgctgatgcagaaccgcttggagatcggccgcaagcgcctggatgatgcggtggaagcgttggcgttgctgtgcgagccagtagcggagccgcgtggtgaactggagcacatccgctacttctgcggaaataccgagatcgccagcgatctgactgcccatgaaccgcagcgtgtgatgctctacaagggcgttgtcgcactgttgcgcgcgtgggcaaacgtggccgacgaattgggtgccgctggctattccgcggcagacgatgtgcgcctgcgagggctgctcgaccgctatgtgaaactgcgcgagatcgtgcgtaaggcaagcggcgagatgctggacttgaagccttacgaggcggatatgcggcacctgatagacacctacatcgaggccgaggagccgcgtgaaatctcaccgtttgagggtgtcggcctgcttgagctgatagtgaagactggcatcgccgatgctatctctgcgaagctcggcgagttcaaaggcaaccgcgatgcgatcgccgagacgatcgagaacaacgtgcgcagtagaatcgtcaaggagcacctgaacgatcctgccttctacgagcgcatgtcggcattactggacggcattatcaagctacgcaaggagaaggcggaagagtacgagcagtacttgctacacattgcgcagttggtgaggcaggtcgatgcaggtcgtgcggaaggtgcgccgatcgaattaaccacgccgggacgtcgcgcgctctaccataacctgcagccttggcttgcggagcgaccgggaggccacgttactgagtcgatgctgctctatggtgacggagatgttcggaatgcggcacttgaattggcgctgcgcatcgatcaaacggtaaaggagataaggccggacagctggcgaggcaatccggcaaaagagaacaccatcaaggcagcgctgtttgcattgctgcagagtgcagagcaggtagagcgtgtctttttgattctcaaggcccaaggcgagtactga

SEQ ID NO: 502869 - DNA, 717 bp, Stenotrophomonas maltophilia
atgccgactcgcatcgcgcttggtggcatcgaggcggaagtggttttcaaagacatccgcaacgtccacctgactgtgcttccgccaaatgggcgcgtgcgcatttccgctccggcgcatatggctctcgacacggttcgtgtgttcgctttgtccaaactagcttggatcaaaagccagcgcgaaagtatgggtgagcaggagcgtgagccgtcacgtgaatacttggagcgtgagagtcattacgtttgggggcggcgctatctgctgaaacttgtggagaccgacggcgcgcaaatggtgtcgctccgacatcgcactctggtgttagcaataaagagcggtgccgaccaggcggctaggagggcggtgctttcgcgttggtatcgagatcagttgcgcgagcgtgccagttcattggttgcggactggagtcgtaggctcggtttggatgctccgcggctttacgtccagcacatgaagaccaaatggggaagctgctcgccgattcggcgctcgatccgtctcaacactgagttggccaagaagcctccgggttgcttggagtacatagtcgtgcatgagctggttcatctaattgagcccacgcacaacgagcgcttcaaaatactgatgcggacaatcctgcctgattgggaggatcgtcggcgtgcattgaacgcgttgccggtcaggcacgagaactgggactattga

SEQ ID NO: 502870 - DNA, 921 bp, Stenotrophomonas maltophilia
atgacgctttcaatggcatggattaggagcgcgggagcgcagcaggaattagttttttgttctgatagccgtctgagatgggctggtgcttgggacgcctgccagaagatatttccactttcccgcggcgactgcgccatttcatttgcaggtgatacaaaatttgcatacccgtttattcatgcggcaataaatgcaattgaactgcatcgcggctcttcacgtcggcagattgatctttttgaggcaaagtctgtacttctcaatgccatcaacgcgatgttgtcagagctgcgagaattttgtgctggccaggataggtttgaggagcctgatctgcgcttgatttttggtggttactcgtggaagaagaagcgattcgcgctatggaaatttcacttcaacaatggtgagagggaatttaggagcgcggaaatatctggctgggatggcctgggtaagaataggacaattgtcgtgctcggggacccgaacgcatcgccatccactatgaggcgcgcggcacggacaaatgaaagtgctgtggaaccccatgaggacattgaagcgattgcaaagcgttcgctagtcgatattctggattcccgaggcttaagagatgcatctggattgaatttggagccgcttgaagttctaagaaacctcatacgctctaattcttcgccgtacatcggtggagcgccacaggttgttaaagtttatcagcacatgaatgttcagccattcgggattaagtggccagatgcgtccgggcgtgtcgctgtgcttggcaggatattgccagtcggtgagaaactccatgttcctgtgctggatccggaaacacttaagacgcagcgccaggatggagtgttgttcgcagagccgcaatctgaggaatgcaatattgcagaaggttga

SEQ ID NO: 502871 - DNA, 684 bp, Stenotrophomonas maltophilia
atgttccagggatcaaggaaaatcctgcagcgacatggaccgctcatgctgaaagttctcccgacccttgctcacgttgcgttgatcgcctcgatcacactggccgttccgggctgcaacaaggaacgctcatacccggtccatcgcgagaatccggcgccaaaggatgcgctgccgattgtgattcgggtccacgatgcacccgtggatgtccccgttccttcggtctttgtcacgtatgagatagacccactctgtctccctccggtcaacaattgggagggggtgcagtacgagccgaaccagcacaaggttgagcttcaggcacagcgcctcagtgccactgaattcagcagtgttgtattcaacgatggcatggaagttgccgactattacggtcgcggcccgtgcacttggacacccgtgctcgtggaagcttcattcgccttcatcatcgatgatcgccctatccaagcaaccgcatggacttcattcacaaagcttgaaaccgagaaactcgctactacctacgtacatcgcgccttacgccccatgacttcagggggatcgccagagtggacgcctaccgagccttcgacttggtacgagaagatgcctcaagataagcgaaaggattacttcccaatcgaaatctccgcacggactgaaggaacagcccaatga

SEQ ID NO: 502872 - DNA, 495 bp, Stenotrophomonas maltophilia
atggcaaccaagaaagctgcgaagaagaagcccgccgccaagaaagcggtgaagaaggtcgcgaagaaggccgctgccaagaaggcagtgaagaaggtcgcgaagaaggcaaccgccaagaaggcagtgaagaaggctgcgaagaaggtcgccaagaagaccactgcgaagaaggcagtgaagaaggcggcgaagaaggtagccaagaagtccgctgccaagaaggccaccaagaaggtagccaagaaggccaccaagaagactgccaagaaggccgcggcgcgcaagccggccaagaaggtcgcgaagaaggccactgccaagaaggccgtcaagaagaccgccaagaaggcagtgaagaagaccgcgaagaaggccaccaagaaggctgccccgaagaaggcagcgaagaaggttgccaagcgcaagccggccgcccgcaagaagaaggccgctccggtcgctctgccggcaaccccggcgccgctgatctaa

SEQ ID NO: 502873 - DNA, 279 bp, Stenotrophomonas maltophilia
atgagcatcctcaacgttctcctcactcgtgaccacctcgtcgtcgcagcggataccctggcagaggatgctctcacaggggcgtattccgcgggggcaaagctgctgctgatccctcagcacaacgtagtgcttgctgcgcgcgggtctacgcaattcttcctccgcatctacgagcttgcactgcaggccagcttccgcgcagatttcacaatagaacagctatctgccgagctagggctggtggtggaccaactctggccgaactttgagtgctaa

SEQ ID NO: 502874 - DNA, 177 bp, Stenotrophomonas maltophilia
atggatggcgccatcgagccccagggacgggtttacggcgtgtcctgccaccccacgccgacccaccctccctcagtaaacccgctgttgctgttgctgttgctgttgctgttgctttcgctttggccgttgccgttgctccggccttggcgggtgccgggcgccgcccggccgtaa

SEQ ID NO: 502875 - DNA, 294 bp, Stenotrophomonas maltophilia
atgagccatccccgtctttccgccgccgacgccagcaccctgctggaccacctgatcggcagcgaagcgttccgcagccacttcaccgcttcgccggccaaggccctggcctcgatcgggctggacggtgccgttggcgaaaacgactgcatgaagatcggcaccctggcctcggtcgaggagctgagccgcacccgtgattcgctgcatgcgtacctgagtacctcgaccgcctcgatgaccgtggtgttctgcttcgaagccgaccgcatcgacgagcgcgtcaacgcctga

SEQ ID NO: 502876 - DNA, 894 bp, Stenotrophomonas maltophilia
atgtcggaacaactgatcgggcaggcgcatctgaacatcggcggcaaggtccttgccgccatcgatccgtccgtctacagcgagagtgtggcccactatgcggcttgggcagcgcaccggcttgccgctcccttggagtatctccatgtactggatcgtcatccggaacacgcagaaagcaaggatctgagtggcagcctcactctcggcgcacaggatgctttgatgaaggaactggcatcgctggatgaatccaaaagcaagctcgctcaggagcggggccgactgttactcaagcatgcgcaggcaatcgcaaaggcgttccacggtatccatgccgagacaaagctgcgtcacggcgctttggttgatgcattgaccgagcaagaagcagacatccgcctgtttgtcctgggtaatcgcggggagcatgcggactttgccaaaggacatctaggggggcaggtcgagcgcgctgtccgcgcggttcatcgcccgctccttgtggtttccagagcgtacacggaggtctccaagatccttgttgcgttcgatggtagcccaaccactcggaagggcatcgagatggttgcgggcagccccctgttccgtggtatgcacgtagatgttcttaccgtcggcaaggaaagtgatgcagcgagccaggaccttgagtgggcactgtcgacccttacacgtgccggcctggacggccgcggactcgtggtgaccggtgatcccgaagaggtcatctcaagacgagtgaaggaagaggccgtcgaccttttagtgatgggtgcgtatggccactcgcgcatccggcaactgatcgttggcagtactacgacgagcgttctgcgaacctgtcggataccggtccttctattacgctga

SEQ ID NO: 502877 - DNA, 1512 bp, Stenotrophomonas maltophilia
atgccgaagcgtattggacgatctcccttgaataagctctctaccctgcgccaggactggctcgggaacgtgcgtggcgatctgctggccggccttgtggtcgctctggcgctcattcccgaagccatcgcgttctcgatcatcgccggggtcgaccccaaagtcggtctctatgcatctttttgcatcgcagtcgtcatttccttcaccggtggtcggccaggaatgatctctggagctaccggtgccatggcgctgctcatgattgggctcgtcaaggaacatggtcttcagtatctattggcagccacgttgctcaccggcgttcttcagatcattgccggcgtactcaagctcgggtcagtcatgcggttcatatcgcgatccgtggtcacgggcttcgtcaatgcgctcgcaatcctgatctttatggcgcagttgcctgagctgaccaatgttccttggaccgtttacgcgatgaccgctgctggcttggccatcatctatctgttcccgcgtctgacgaaggtggttccttctcctcttgtcgccatcgtggttcttaccgtcgtcgctatccttctcaagctcgacatccgcacggtcggcgacatgggcgagttgcccgacagcctgcccgtcttcctgctgccggatgttccactgaacctggaaacgttgaagattatccttcccgtctcggcaacgctcgctgtcgtaggactgctggaatcgctgcttaccgcgaaaatcgtcgatgacctgactgacaccccgagcgacaagaatcgagaagccatgggtcagggtgtcgccaacatcgcgtcaggttttatcggcggcatggccggttgcgcgatgatcggtcaatcggtcatcaatgtgaaatccggcggccgcggccgcctctcggcccttactgcgggcgtagtgttgctgatgctggtggtcttcgccggcccctgggtgaaacagatccccatggcggcgctggttgctgtgatgatcatggtgtccatcggtacattcagctggggctcgctcgcggcacttaaaaccaaccctaggacatcaagcgtagtgatggttgccacggtcgtcgtaacggtgttcacccacgacctggccaagggtgttctgaccggcgtactactgtccgggctgtttttcgcacgcaaggtcgggcaagtgcttcatatcggctcaacttcccatgaggatggtcgcgtgcggcactacaacgtaacgggccaggtgttctttgcatcggcagaccagttcattgccggcttcgattttcgtgaggcgcttgagcgtgtacggatcgacgtcggtcgcgcccacttctgggatctgagtgcggttggcgctctggatacggtcgtagtgaaattcaggcgcgagggcacggaagtagagatcctgggcatgaacgaagccagtgcaacgctggtggatcgcctgggtgttcacgacaagcccgatgccgtcgaacggctcatgggtcactga

SEQ ID NO: 502878 - DNA, 456 bp, Stenotrophomonas maltophilia
gtggcgatcgacaccgccatcaaggaggcggagtggtcgccggatcaccaagaccagttggcgatatgcgatgagcaggcgtttcgcaggcgcttcggtttcaccgtaaatcggctgcagcgcgagcagatcattacgctcaagcacgaggccgacctgacggacaaggaaatcaagattctccggagtagcggcagcttggttttccagaacggcaagctcagcgtcatggcgcccacgcttattgcgatctggggctacatccagatggtgatgctttttctgatgatggtgctcagtgtattggccgcggtatccgctcagaaatccagttggccagggatagcgggcatcgtggcactgaacatgatgctcatgtttggaatgaacctcagcaacgacgtttttatctggccgcagcgcattcgcaagcgcgtgcagcagcagcggacctga

SEQ ID NO: 502879 - DNA, 417 bp, Stenotrophomonas maltophilia
atgatcgctcgccggctggcggcggtccgtgccgaactgggcctgagccaagccgcgctggccgaacaggtcgggctatccaagcgctcctacattcactacgaacgcggagagcgtgaattgcccacagggttggtaaaggccttgtacgacctgcacggcatcgatcctgtctggctgatgtccgggacggatgaaataccgcagaaggcacgccaggcgggcatcgattttcaattggtggacaaggtagtggcggccttggatcatgaactggccaaggtgggccgcaagatgcgtcccgagcaccgcgcccgcgtcatgaaggcgctgtatcaaatgggcgtggaacaagggcgcatcagtcccgagatcgtggccgatgtggtggctgtggcggtagcccgtggacgatag

SEQ ID NO: 502880 - DNA, 840 bp, Stenotrophomonas maltophilia
atggtgacggtgttcggcattctgaatctcaccgaggactccttcttcgatgagagccggcggctagaccccgccggcgctgtcaccgcggcgatcgaaatgctgcgagtcggagcagacgtcgtggatgtcggaccggccgccagccatccggacgcgaggcctgtatcgccggccgatgagatcagacgtattgcgccgctcttagacgccctgtccgatcagatgcaccgtgtttcaatcgacagcttccaaccggaaacccagcgctatgcgctcaagcgcggcgtgggctacctgaacgatatccaaggatttcctgaccctgcgctctatcccgatattgctgaggcggactgcaggctggtggttatgcactcagcgcagcgggatggcatcgccacccgcaccggtcaccttcgacccgaagacgcgctcgacgagattgtgcggttcttcgaggcgcgggtttccgccttgcgacggagcggggtcgctgccgaccggctcatcctcgatccggggatgggatttttcttgagccccgcaccggaaacatcgctgcacgtgctgtcgaaccttcaaaagctgaagtcggcgttggggcttccgctattggtctcggtgtcgcggaaatccttcttgggcgccaccgttggccttcctgtaaaggatctgggtccagcgagccttgcggcggaacttcacgcgatcggcaatggcgctgactacgtccgcacccacgcgcctggagatctgcgaagcgcaatcaccatctcggaaaccctcgcgaaatttcgcagtcgcgacgccagagaccgagggttagatcatgcctag

SEQ ID NO: 502881 - DNA, 1356 bp, Stenotrophomonas maltophilia
atggatcacccagagggtgcgggttcgaagcgggcagatcgggtcgagttcgaccgccgggtgcatgtggagttccgaggtgcgcagctcagttccgacggcggcctgctggtgatgcgcgagctggatgacgcgctcgggctgtccgatctggcggcaaaagcattgcgcgacacccggcgcggcaagaacacggtccaccggcttgacgggttgttccggcaatcggtgttcgggcgactggccggatacgaggatgtgaacgacgccgaccgcctggccctcgatccggtgatgcgccaggtcgtgggtggaagggctgtcgatgcgcaagcggcctcggcctcgcagatgggacggttcgagaccgagacactggcacagcccgagaaccgtgccgcgctggccgacctgaatggccaatggatcgaccggttccatgaccgtaacgggctgaagtacatcgttctggacatggacagttcggtcagccccacccatggcgatcaggagggcgcggcctggaacgggcatttcgactgcacctgctatcacccgaactttttgttcaaccagttcggcatgctggagcgctgcgccttgcgccatggcaacgtccacagcgccgatggctggcgggacgttctcgaccccgtcatcgcccgctacgcggagcgcgacctttgcggccggttcttccgggctgacgccgcctacgcgatccccgcgatctatgagcggctggaagaagcccgattcttctacgccatccggctgcctgcgaacaacgtcctgcgcgagaagatcgcgcatcggctgacgcgccctgtcgggcgaccttcgctgaccaaggtcaagcgcttctacgaagacttcgagtatcaggcggcatcctgggacaaggaacgccgggtgatcgccaagatcgaatggcatccgggcgaactgttcccgcgtgtcggcttcatcgtcaccaacctgccgatggagcccgactgggtggtgcggttctataaccagcgcggcaccgccgagcagcacatcaaggaaggtaaatatgccttccactggacgcggctgtcatgccggaagttccgcgacaatgaggtgcgactgcaactgcatgcgctggcctacaacctggccatcttcttgcgctgcatcgagttgcccgagacgatggccgactggtcgttgaccagcctgcaactgaagctgatcaagatcggggcacgtgtcgtccgccatgcccgcgccatcaccttccagctggccgaggtggccgtcaccggtccgatggtccgcgccatcctcgccgccatccgccgattgcgagcgcctccgctatgcgcatga

SEQ ID NO: 502882 - DNA, 204 bp, Stenotrophomonas maltophilia
atgcgcctgcggctggcgggctcttcattggcctgcattgcccgcgaactgggcatccagcccacgaccgtcacggcgacctcgcagggaaagcgccgctcgcgccggatcgagctggccatcgcgcgcaagctcggatgcacccctcaatccctatggccagcccgctacgacgaggcagcttcacaggagggattgccatga

SEQ ID NO: 502883 - DNA, 1683 bp, Stenotrophomonas maltophilia
atgcagagaagtaagctcttgcgctgcattctgcgtaaccgcctccccatcgtcaagcctcccggccggccactgagcccggctgaacgggtggcgtttgcccgcgtccctaggacgggatcgggcaggaccgcgagtgccttcatgcagagactgaaagacatctgtcgctggatcctgcgaacagataaatcagaccgcgccattggacgttctctgggcgtgtcctacagcaccgtcggtcgctatcgcaagatactgaccgaacagctattggactgggacggcgttgagccactggatgagctggagctggatcgtcgactcaatccaggccggcatgccgccaaaaagccatttgccgaacccgactggtcgcatgtccatgctgagtatgagcgccctggagtcacgctgacgctgctccatgaggagtacgcgctggaggtcggcgaggccggtatgtcggagacggagttccgccgacgctaccagcgctacgcccgtacacgcgggctggtcatgcgccagatccactatcccgggcaggagctgttcctggacttctcgggcatgcgtccctggatcaccgatcccaagtgcgggaccaggcggcaggtcgagcttttcgtggccgtcctgggtgcaagtcgcaagacgttcgcctacgcggtggagagccagaagatcccggactggatcgagtgcaatacccgtgcgatggcctactttggtggcgtcacgcgctatcaggtgcccgacaatctcaaagcggctgtcgtccggcgcacgcgtgaggacggtgcactgatcaatgccacctatgccgagttcgcggcgtactacgacactgacatcatgcccgccggcccacgtaagcccaaacacaaggcggcggtggagatcggggtcaagctcgcccagcgctggattctggccaggctgcgtaatcgggtgttctacagcatcgaagaactgaaccaagccatggcgccgctactggagcggctcaatgacaagccgatgcgaggcataggcaacaagagccgcaacaccctcttcgcagaactggatgcgccggcgcttaaaccgctgccggagacgccatacgagtttgccgaatggaaggtaggcatcaccgtcgggcaggactaccacgtgacgtggaacgagcactactactcggtccaccacgggatcgtaggcaagaaggtcaacctgcgagcctcggcagatcatgtgtcggtcttcctgcacggcaagcgcgttgcgatccatccacgcgatgacgcgccaggtgggctcagtacgttgcctgagcacatgcccccggcccaccgcgcgcatggtctggacagctacgacacggtgacgacctggacgcagcagcaaggtggcgcgatcgccaccttctttgagcagcacctcaagcaccacgccaacgcagctcagtccctgcaggccggtcgcggacttcgcacgctggccagggactacggcacggatcgcttacaggccgcctgcgcccgcgctctggccatgcatgcccgcagcatcagttcagtgaaatccatgctccagcgcggtatcgaggccgccccgatccagggcagagaagcggcaaacgatgaccccatcgctcacgagaacgtgcgtggcgcggactactaccataacagctaa

SEQ ID NO: 502884 - DNA, 741 bp, Stenotrophomonas maltophilia
atgacccttcaatccacccaggaacgcatgcgcgagcttcgccttcacggaatgctcgaagccctctcgcatcagcaatcgcaggcctcctacagcggtctcggttttgagcagcgcttggcgcaccttgtcgacgcagaacaaagtcatcgcgatacgcagcggctacagcgcctgctcaagagcgccaagctcaaatacagcgccagtccggaagccatcgactatcgccactcccgtggcctcgatcgcggtctggtcgcagacttgctcaactgcggctggatcgagcgccagcagaatgcgctgatcacgggtcccaccggcaccggcaagacgtggttggcctgtgcgttgggtacgcaggccgcccgtcaagggcatagcgtgctctacaagcgtactggtcgcctgctggaagagatggacgtagcgcacaaggatggctcgctggccaagctgcgagggcaattggtcaagatgaaactgttggtcttggacgactttggcttgacgggccttaacgcacgaggccgcagcgatctgcttgaaatcctggatgaccgcgttggcaccggctccaccatcatgctgggccagatgccggtcaaggactggcatgccttcatcaacgatccggcgctggccgatgccatcctcgatcgcttgatccacagtagccacaagctggaactgaaaggcgactcgatgcgcaagcgcaagtcggcctctgcgaagtag

SEQ ID NO: 502885 - DNA, 1689 bp, Stenotrophomonas maltophilia
atgcaccgcctgcgggcgatagtccaggtccagcggacgctgcagctggcggccattgccataggtccagcccgtcgccgggccgaaggccgcataggtcacgttgttcaccacgatctggcgtgcctggccgggccgggtcaggccgatctggctgatgcgcccctgggtatcgcgcacgtagtcggccacgctgccgtcggggtaggtcaacgcagtcaggcgccccgacttgctgtaggcatagcgcagcgtactggcaacgccgttgacggtctgcaccttgcgggtgatctggccgaagcggtcgtggcagtactgggtgctgccattggcgtgcagcacctgccccaggcgccccttggcgaagcgctcgtctgcggcacaggcggccggcgccacgtcatagctgtagcccacgtccagattggggtccggataggcaactccgatcaaacggttcagcgcatcatagtgataggtggcggtgacgccacgcgcatcggtagcggtcttgcgattgccggcggcatccacggtgaagctgctggcgccactgtccgggctgacctgcccggtcaggtcaccgaacccgttgtaggcgtaggtggtatgcaggcccttcgggtcggtgacctgggtgacctggtccagcgcgttgtactggctgcggatctccgctgccacgccatcgacatcctgcagggtctgcgccagtcggttgagcggatcgtactgctggctggtcacgcgctgcagggcgtcggtcaccgtctgcgggttgccattggcatcgtaggcaaagccggtggcgtgattgccagcgtccttcagcgcggtcagctggccgagcgtgttgaacgtccgtgccagggtgcggcgcagggtgccgcctgcatccagcgtgtcttccttgaggcggttgccggcgttgtccagcgcatagtgaatggtgttgcccgcactgtccgcgatgtccgtcagccgctgggcggcgtcgtagacataggtaacgctgctgccgtcaggctcggtgacctgttggacctggccggtcggccagtagctgatctgggtcacccggtcctcggctgtggtggcaccgcgcacggtgaccgaggtcggccagccgcgcgcatggtaggtgtaatcggtgaccacgccgttggcatccttgaccgacaacggccgcccgaacgcgtcgtaggccaaggtctcgaccgtctggcccagcgcattggtcacgctgcgcaggtcgcccttgcgataactgcaggcaccactggtcgcgcatcccgcgtcgtccgcggtgtagtaggcataggtggagacatccgccacatcactgcgtgggccatccacgctacgcagcagtcccaccagcgggcactccgggccctctgcctcacagtaggtctgcgtggtgacgcgggtgtcaccggtcaccctgtcgcgcacggtgatggtggtcggctggaggcgcgcattgcgcgcgatgcggatctcacggttgccaacggtctgctggaccagccgattgctgtccatggccacgcgcgtttcgctgatgcgctggtccggagtacctgccgcttcggtggtggtggtcacactgacagcacctgcggcagcgtcgctggcctccgcataggcgtagttggtaacaacgccacggcgatcggtcactga

SEQ ID NO: 502886 - DNA, 468 bp, Stenotrophomonas maltophilia
atggcgctgctgatggttggcttggtgaaggagcacggactgcagtatttgttggcagcgacgctcctaaccgggatgctgcagatcttggctggcacgtttaggctcggggcgttgatgcgtttcgtctcgcgctcggtcatcaccggttttgtcaatgcgctggcgatcctgattttcctggcgcagctccccgagctaaccaacgtcccttggaccgtttatgcgatggtcgccgcagggttggccatcatctatctgttgccacgcgtgaccaaggtcattccctcgccgctggtggccatcgtggtcctgacgatagtcgcgctcctgctcaagcttgatatccgcaccgtgggggacatgggcgaactacccgacagcttgccggtgttcttgttgcctgatgttcccttgaatctagagacactgaagatcattttcccggtttccgccacattgtgctaa

SEQ ID NO: 502887 - DNA, 1290 bp, Stenotrophomonas maltophilia
gtgcgtgttctgggccaggtgactatcctcgatcagtacattgatgccgccacccgcgagaacactgtgcgcagctacgcttcggcgttacggcactttgaggtcgagtggcaaggacaccttccggccaccccagacagtgtggcgcggtacttggccacctacgcgcagaccctggccaccagcacgctgcggcatcgcctggcggcgatcgctttttggcatcgggatcacggatttgtggatcccacccgctcgccactggtgcgcaaggtacttaaagggattcagaccctccacccgacccgggtcaagcaggctgcgccactgcagatccggcggctggtcgagctcgatgactggctggccgcagcgattgctgcggcccatgcccggggcgacggggcggcggcgcttcgccatcagcgggatcgcgcgttggtgctgctcggattctggcgtggcttccgtggcgatgaactgctgcgtctggaagtggcccatctcacgctggtgccgggacaggggatgacctgcttcctgccgcgcagcaagggcgatcgccaagcggccggcgttacccataaggtgccggcgttgtcgcggctgtgtccggtagaggcgacccaagtgtggctgcaggcggcaaacgtgcaagacgggccggtgtttcgggcaatcaaccagtggggccacgtaagtgccgaagggctccatcccaacagtttggtgcgcctgctgcgcgagttgctggccagtgccggctttgccgatgcggggctccacagcagccattcgctgcgccgcggctttgctagttgggccaacgatcaaggctgggacatgaaggcgttgatggagtacgtgggctggcgcgatgttcagtcggccatgcgttacctggacgggcgtgacccgttcgcccgggatcgcattgaagcgagcctgcccagcccaaccgcgccagctccggcgatggcgctgccggcgcccgaggtcaaatctgccctgcagctgctcctacgcatggtgctgaccccgtttgcccgcgccggccgcggcgcggccaaggcccggggcagaatcgaagagatctgcttggccccgttccaagcggtgcggctgaacaccgccagcagcgagtaccggttgactgttcccaccgatcccgaccgggatctggatgaaatcctggccacgttgctcgatgacatgcaccgcatggccgatacgcaccagtgcttcctggaagcgtcgctcagtacagacgacggccggcactgggactga

SEQ ID NO: 502888 - DNA, 2994 bp, Stenotrophomonas maltophilia
atggctacccttcacgagaccgcctacccgcgactgaagcctgatcccaccgccaaggaactggaggagatctataccccgaccgccgctgagattgcattcgccaagcagctgaccacccagccgggtccgcagctggcggtactgattcatctcaagctcttccaacgcttgggctacttcacgctgttggccgacgtacccgagcggatccggaagcacatcgccaaggccgcccgactcgggcgcgtattggacaccgaccagctcgaacgctacgacgcttccggcagccagcgccggcatatgccgcagcttcggcaattcatcggggtacgtcccctggataaatcgggcttggcttggctggacacagtggccaccgccgcagcccagaccaagcacaccatcccggacatcgtgaacgtcctgctcgaagagctggtgcaccatcgctacgagctaccaggcttccggacccttgagatggccgctatcggggcgcgcgaacgggtcaacctgggctactaccgcagtatcagccacgcactgacgcctgccacgcgcacgctgattgatgagctactgcgcgcaccggaaggatccagatttaccggctggcattcgctcaagcgcgagcctggccggccgaccaacaaagaggtccggttctatctgcagcacatccgtatgctgcagcagttggcggagcaactgcctccaatcgatgtaccggtccccaagctcaagcaattccgtgcaatggcccgggcgtatgacgccagcgagttggccgaattgggtgaggacaagcgctatgcgctggccaccatcttcatccgcgcccagcatgccaagacattagacgatgcggcagagttgttcatcaagcaggtgcgcgggctggagaacaccgcgcagcagaagctgctggcctatcagatcgaacatgccaaacgcgccgacttcctcatcggccagctcaaggagatcctgcaggcctaccagctcgacggcagcgatagccagcgcgtggacgcgatcgacaatagtctggaagcggaagtgtccaccttgctggccgaatgcgaagaacatatggcctacgcagggaaaaactacctgcctttcatgctgcaaccttacggcgcggtcaggccgctgctgttcaatgggctggagctcatgaacttgcgggcgaccagccacgatgccggcatggagcccttgatcgcagccgtgctctcgctgcgtaaccaacgccgtgagctgatcgaggtcgctttcctcggtttggacccggaaaaggacttcgactggatgtccaagctctggcgtcagcacgtgttcggcaaacgggccagcgcggcaggagctggctggatgcaccgtaagtacttcgagctggccgtgctggtgcaggtcaaggacgaactgaagtccggcgatctcttcattcccagcagcgagcgctttgacgattaccgcgagcagctggtcgatgaggccaccttggcccaggaactggaagcctatggccaggtgtcaggcctgcccaccgacgccgagtctttcgtggcggggttgcgcgcacaattgacggctttggccgatgaggtcgacgcgcgtttcccggagaacgttcatgcggacatcctggatgggcgcctggtgctgcggaaggggcaacgggccgaagtctccagcgcgattaccaccgtggatcgcctcatcgccgaacgactcccagagtccagcatcgtagatgtcctgatcgatgccagccaatggctggacctgcaccgttttttccgcccgatcgccgggaccgagagccaagtcgaagatctgccccgacgcgtgatcaccacgctattttgctatggctgcaacctggggccgacgcagacggcgcggtcgatcaagggcttcagccggcgccaggtcgcttggctcaacctgaaatacgtgaccgaggatgtgcttgagaaggccatcgtagaggtcatcaatacctacaacaaatttgacctgcctggctattggggcagcggtaagagcgcgtcagcagatggcaccaagtggagcgtctacgaagacaacctgctgtcggagtaccacatccggtacggcggctatggcggcatcggctactaccatgtgtccgacaaatacgtggcgctgttcagccacttcattccctgtggcgtgcacgagggcatctacatcctggacggcctgttggccaacacttccgacatccagcctgagatcgtccatggcgacacgcaggcccaaagctatccggtcttcggcttggcccacatgctgggcatccagctgatgcccagaatccgaaacatcaaggacctgacattcttccggcccgaaccgggcagggcctataaaaacatccaggcactgttcggggacagcatcgactggcaactgatcgccacccatcttcacgacatgctgcgggtggtgatctcaatccgattgggcaagatcaccgcgtcctcgatcctgcgccggctgggcacctacagccggaagaacaagctgtacttcgcattccgggaacttggcaaggccgtccgaacgctgttcttgcttcgctacattgatgacaacgagatccgcaaaacgatcaatgccgcgaccaacaagagcgaggaatacaacggcttcgtgaagtgggtcttctttggcagccaagggatcatcgctgagaacgtccaacacgagcagcgcaagatcatcaagtacagccagctggtggccaacatgatcatcctccacaacgtggagggtatgagccggacgttggctgagatgcggaaggaggggatcgaactgacgcccgagatcctggccggtctgtcgccttatcgaaccagccacatcaatcgctttggcgattaccacctggatcttgaaagggaagtggcgccgctgagctacacagccaaggtcctcgaacaggccccatag

SEQ ID NO: 502889 - DNA, 357 bp, Stenotrophomonas maltophilia
atgagcttcttcttggtggattcagactcagagttcacgctggagctctccctcaccaaagagtcggagctcgacctgcgtcgtcagctcgagaagctccagcagggaggccattcaggtgcgatctcgaggcgactggctgccgagttctcgcgcctggtgccggagctattggactgggacataaagcggccaaccaaagcccagatcgcctatgcaagatcaatctgctatcgattgagaatcgagctgccagtggaggccatggagtcaaggcaggccatgcacctattcatttcctctcggggggcgtgttcccatcaatctctcgagccctttgctcgggatggcacttag

SEQ ID NO: 502890 - DNA, 2679 bp, Stenotrophomonas maltophilia
atggaagcactgatcgcactggtcgtattggtcctgttggccatccccctgctgctggtggtggcgctggtgatgatctccggcctgcgccgccgcgtcgcggcgctggaaagcgcgatggccgccgcgcctgccaccgccaggccggccgccagcgcgcccacgcccgaacgggctgcggccacgcccacggccagtgccgatccaccgttcctgcggccggtcgccgctgctgcgccgcaccccgcgcagccaacggtgcgcgaagcagcgccgaccgaggcgcctgttccccgacctgctgcgccaccgccggtgccaccggtgccggtgcagccgccgctgccttccgagccggcactgcccaacgtcatcgagcgcggcatcagtgcggtcaagcgctggttcaccgaaggcaacgtgccggtcaagatcggcatgctggtgctgctggccggtgtcgcggcgctgctgaagtacgtcagcgaccagggctggctggtgttgccgatcgagctgcgcctggccggcatcaccgtgggggcgctgggcctgctggcctttggttggcaccagcgcgagcgccggcgcctgtttgcgctggcattgcagggcggtgccatcggcgtactgctgctgaccatcttcgcggccttcaagcgcttcgacctgattccgccgggcttcgccttcgccagctccattgccctggtggccgggctgtgcgtgctggcggtggtgcagaactcgcgcacgctggccgtgctggggatcctggccggcttcatggcaccgctgtggctgtccaccggcagcggcaatcacgtggggctgttcagctattacgcggtgctcaacgcgggcattttcgccatcgcctggttccgcccttggcgcgcgctgaacctgctgggcttcgccttcactttcggcatcggcaccttctggggcgtgctgcagtacgtaccggacaagttcagcagcactgagccgttcctgctgttgttcttcgtgttctacctgctgatcccgctgctgtacgcgcgccgccagccggccggccggcgcgatctgatcgatggcagcctggtgttcggcgcgccgctggtcgcattctcgttgcaggcaggcatgctgcacgaacaaccgatgacgctggcactatgcgcgctgggcctggccgcgatctacgcggtactggcacgggcgctgatcgcacgtgcgtcgtacaccatgctggcgcagtcgcatgccgtgcttgcggtgggcttcgccacgctggcggtgccgctggccttgtcggcgcgtgccaccggtgccgtgtttgcgctggaaggtgcaggcctggcctggttggggctgcgccagaagcgctggctgccgcaggtatccggcgcgttgctgcagatcggcgccgcattcgccttcgttgccggtggcgaccactggcacgaagacctgcgcttcctgatcaacccgaccgccatcggcgcgctgttgctggccctggccggcttcgcgtcggcgtggagctaccagcgcaggccacgtcatgaggtcgcactggtgtactacctgtggggcctgctgtggtggctgggcggcctgatccatgagatcacgcgcttcttcccgtaccgcaccgaagtggacgcgttgctggtgctggccgcggtcactgcctggctggtggccgaagtgcagcgtcgccagccggcgcgtgcactgggcgtgaccgcactggccatgctcgcgctgggcttcccgctggccctggtgcagagcgatgcacaccaccagccgttcgccggttatggcgcgctggcctgggcggtgttcgcggtgctgggcgtgcggaccctgctgtgcctgcgccagggcggcgataccgtggcccgcatcgcgcagttcctgtggtggctgctgtggccgtcgctgctttcgctgctggccctgtggggcggtggcgaagccgatctggcgcagggctggacgaccctgctggtgaccttgccatggctgctgatggcggcactgtcgctgtggcgctggaatgcgctgcgctggccattgggacaggccttcgacagcgtgcgcgtcccgctgcagtgcgtgctgttcggcctgctgtcgatcagctggctgttgggccagctgctgccgggcgacgccgcaccgctgttgtggctgccggtgctgaatccggccgagatcggccaatggttgagcctgttgctgctggcgcgctggctgtacagcaatcagggatcgcaggccccgcaggcattgctgaacatccgcatgccgctgctggcactggcggccttcgtcgcgctgaccagcctggtgctgcatggcgtgcaccagtggggtgggctggcgtggaacgcgtcgatgatgcgcttcagcctggcccagaccagcctgaccgtgttgtggagcgtgctgggcgtgattgcctgggtgtggggttcgcgtcgtggccagcgtgtgctgtggatggtcggtgccgtgctgatgggcgtggtactggccaagctggttattgtcgatcgccagcacctgggcaacctgctgggcatcgcatcgttcatcgcctacggcctgctgtgcacggtcgtgggttatctggcaccggctccgccgagcgtggcgccgaccgtggaggaaaagcaatga

SEQ ID NO: 502891 - DNA, 735 bp, Stenotrophomonas maltophilia
atgggtagctacgggttggccgggtcggagtgggcaggcaggacacgccgtgaacccatccatgggggctcgatggcgccatccatggcgccaacggtcctgcctgcccactccgacccggcccgccagggctccacttcggcggacggcaagagcattgggtttccaggtggaaagaggggtcagatccgttttcctgcggaaaacggatctgaccccggaagtgacctggcttttgtcttttgctcttctttcttcaatccggggtggacgcgcacgggaagtgtccgtggccgggaggatgggttgcgcaggggcgtgagccgcatggggtcgaggcatgcctcgggcgggttgggcaggatgcccaaccccggtcttgccgtgtgcgcaggacagtgcacacgtgcaagcggcgaccgagcttacagagacgtacttgcagcgtcccctgcgcaacccatcctcccggccaaacgaaggaagtccgccgctctcagcgaccaccccgaggggcttcgccgttggctggataatcggataccccctaaacaagaacgccccagcacagggccagggcgttctcgtaactcaggtcaggcaggcatcagaactcctgccagtccccgtcggccagttcggtggccatcgggcgaccacccgccgtgcggcgggccggcggggcagccggggccggggcggccggtgcagcggcgcgcggtgccggggcggtga

SEQ ID NO: 502892 - DNA, 195 bp, Stenotrophomonas maltophilia
atggaggcagcggtttcttccaggttggcggcctgctgctcggtgcggcgcgacaggtcgctgttgccggaggcgatctcgccggcggccagggtgatgctggaggcgctggcctggatctggccgacgatctgggtcagctgtgcaacggtggtgttggcatcgtcgcgcatgcgtgcgaacacgccctggtag

SEQ ID NO: 502893 - DNA, 267 bp, Stenotrophomonas maltophilia
atgctggtggcaacgctcacaatcaacgccgcgcgcgccatgttggtcaccagcaccatcatggagtcgcggctgcggccggtgacgatccggaagccctggatcagcacccacagggtcatcagtatcagggcgatgctatcgacccacgccatcatgttgccgagcaattcgatgccgaactcgtcaatcctcttgcgcggatacgacaggatcgaccggaagaacacgaagtccccgatcgatcagacccacatggcgttttga

SEQ ID NO: 502894 - DNA, 1236 bp, Stenotrophomonas maltophilia
gtgctggccaagtacgcctatgacgcgctgggtcgcctgacccagacccaggacggcacgaccggcacgccgatcgaaacctatgcctatgacgccaccggcaatcgcaccgcgctgaccacgtcggcaggcaccgccagctacacctatcccgcaaccagccactggctgaccgcagtggatggcgaggcgcgcacccatgacgcggtgggcaataccaccagcatcggcagcaagacgttcacctacaacgacgccaaccgcatgaacgcggtgaagcaaggtaatgcggtgctggaaagctacggttacaaccatcgcggcgagcgcgtgttgcgcaccccggccggtggtgcagcgcagatcaccttgtacgacgaggcggggcagtggctgggcaactactcggccacggggcaggcgcagcagcaggccatctggctggacaactacccggtggcactgatcaacacgccggctaccggcgtgccggagctggcctacgtgcagccggatcatctgggcacgccgcgcgtggtgatcgatccggtacggaatgtctcgatctgggagtggagcaacaagagcgaggtgttcggcaaccagattccgagtgcagacccggacggggatggtgtggcgttcgaactggcactgcgcttcccaggccagcaggcgacggatgcgagtgggctgttctacaaccatcatcgcgagtacgacccggcggtggggcggtattcgcagagtgatccgattgggttacgaggcggaatcagcacctacggatacgttggcggaaattcacttagcttaatagacccgttgggattaaggaacgtgcacaagacagccgtcgcaattgggaatgcgatcaacgcagggcgcttgcttgcttcgggtacgctgaggatcgctggaggacttggcatggagggggcagtagtgactgccgcaccgggctccgcaagtattgggctgggcgtctggaacatcactagtggccagaaggcgtgggctcgcgccgagcagcagtgggcggaggcagcctgtgaagacagtagcaactattcgaggggcgacgtcctgaagacatactcgggtttgttgccttggggaactgagtcagatgaccccggtgagcctttttggattgatattatggagaagcacgttaaggaggctgtccataagccaagggaattcttgcaggaagtaggaaccataggactatga

SEQ ID NO: 502895 - DNA, 153 bp, Stenotrophomonas maltophilia
atgcccacggaccgggcggtgcagacgccggtcgagcagtcactgcaggccctgcaggcagtgggtgcggaacgtgaacaggcacacgcgcagcgccagcagcaggaggtcgatgcgcgggcgcgcgacaccccggccatgcggatggcctga

SEQ ID NO: 502896 - DNA, 615 bp, Stenotrophomonas maltophilia; identical to SEQ ID NO: 502656

SEQ ID NO: 502897 - DNA, 843 bp, Stenotrophomonas maltophilia
atggcgatgttcggcagcaacctgcagaaattcctcaacgaggacgtcaaaggcctgatcacccacgtggtgaccggcaaggaccagcagccggaagaccagatcgacaagagcctggcgtggatgcaggtggcgctgtcgagcattgatggcatcaagatcctgaatgatccggggttgcaggcggacaagacccgggcgctgtggttcatcggcatgggcacgggcggtccggccgtcaccgctggtgcgatgttgctgctctacgaggtcgcgctggcgctgttcatcggcctgggtcccttgttcattctgtgtctgctgttcgaccagaccaagcagctgttccagcgatggctgttctacggcatcggcacgatgttctcgatggcggtactggcagcgatggtatcgatcgcgctggacatggtgatccgtgtctcgaccgcgttctggtccaccgccctggtcaacaagttcctgctcgaaggcgcctccagcgacggcatgaccagccaggcgatgcagcagggcggcatgggcctgattctcacgaccctgatcctgaccgctcccccaatggcagcgatgttcttccagggcacgctgggtagcttcatggcatattcgcagataggcggcagcccggttgctgctgcgccgggcccgaatgggcagccgccgggtagctactacacgccggccgctccggagaaggggcgcgcaggggcggacgatggtgtccacgataagcactcggctgcgcgcatgactttgccacaatcagatgcaacaagagtggttgataccggcttgcgagcggctcatcctggtaagcagtaa

SEQ ID NO: 502898 - DNA, 843 bp, Stenotrophomonas maltophilia
atgccagtaatcacattgtacccgcatggcgggaagggcggtgttgcgcccatgaaaaacagccacgcccgcgctcttcgaggcgatgttcagggttggtcccatggggccacccgtcgcaataccgagttcctcatgtcggttcgtgaagatcggcttaccggcgctggggttgctcttaccctgaccctgcgtgactgcccccctacgtctgacgactggcacaagcttcggcgggcatgggagctacgtatgcgccgctcaggcatggtccgcctgcactgggtcacggaatggcagcggcggggtgtgcctcacctgcattgcgccctctggtttgaagacaggtacgacattgcctgtgcggtagaccactgggtggcagtggcgggcgcctacggcgcgggccaccgtggtcagcatggccggatcatcgatggtgctgtgggctggttccagtacctcagcaagcatgctgctcgcggcgtatctcactatcagcggtctatcgataacgtccccgaggcgtggcagaccaagacaggccgcgtatggggtaaatgcggtgattggcctgtccaggagaagttgaagattcacctgcaggatcagtttggtgacgggggctggtttgcttaccggcgccttgtccgttcttggcgcagggctgacgcccggtcatcaggggatgcgtaccgcatccggtcagcgcggaaaatgctgcaagtcgccgatccagtccgcgcccgcctgatcggtttcatggagtggataccgtacgagatccaaggcgcccttctggcgaatctcgccatgcgtggctatcagatccacagcatctga

SEQ ID NO: 502899 - DNA, 603 bp, Stenotrophomonas maltophilia
atggccgaggagcgaatccagggcaaggccaaaggccgattccgacccaagtcctctggcggctcatctcagctcgcccccaacctgctggatcggcaatttgcccccggaaccggaccgacggcgtgggtcggggatatcacgtatgtccctacccgccagggatggctgcatctggccgtggtcatcagcgtccagacccggcaggtgctgggctacagcgtttccacgcgtctgactgaagagctggtggtgaaagcatttgccaatgcttgggctctgcatccacaacgacccggcctgatcttccattcagatcgtggtgggcagtactggggaaacgagtttcgccagctgctgcagtcccatggcgtggtccaaagcatgagccggcctggcaattgctgggacaacgcggtggccgagagcttctttgcgacgctcaagacagaagaggctgccgagccttacgccagtagagaacaagccagccagtccatcgctgcttacatccacggcttctacaatccagcccggctacactcggcgctgggctaccactcgcctaacaactacgcccggcagctccggactgccgcctga

SEQ ID NO: 502900 - DNA, 294 bp, Stenotrophomonas maltophilia
atgtcccgtatcacccgtcgtagctataccgatgagttcaagcaccaagccgtggagctggccgagtcgctcgggccggccgcagcggcccgtcagttggagatgtcggtcaagacgctggcaaattggcttgacgcggtccgtgctggccggtcgttgacctctgaggctcgcaggccagccaccgacctggaaagcgagatcagccgccttcgggccgagaacgccaatctgaagatggagcgggaaatcctaaaaaaagcggcggcgttctttgccagagagtccaagtga

SEQ ID NO: 502901 - DNA, 288 bp, Stenotrophomonas maltophilia
atgtcgaagcgaaggaagttcagcgccgagttcaagcgcggtgctattgagcaggccagccagccgggtgtgagctgtgcccaagtggcccgggagttggggatccgcgacaccctgttgacccgctggaagcgggaagcccagagccagggggtggtggctttcggcggcagcgggacgccccgggacgaagagctggcccgcctcaagcgcgagctggcccgggtgaggaaggaacgggattttttgcgagaagcggcgacgttctttgccaagggatcatcctga

SEQ ID NO: 502902 - DNA, 861 bp, Stenotrophomonas maltophilia
gtgatcgaacgttgccgcgacgcgtttccggttcgactgatgtgccgctgcctgaaggtgtcggccagcggttactacgactggagccagcgactgcccagcgcccgacagcgcgacaaccagcgcctggctgcgcgaatccgcgagatgcacgaggacagccgtggcactctcggcgccggtcgcatgcacgaagacctggtcgatcagggcgagtcggccagcttgaaccgcgtggcgcgactgatggcggccgagggtttgcagggctggccgcgcccgaagcggcgcggtcagcgcggacggccggcgctcacgcctccgggcgtgcgcaacctgctggagcgggacttcaccgcactggagccggagaccaaatgggtcaccgacatcactgagatcaaaacaggacaaggcaagctgtatctatgcatcgtgctggatttgttcgaccagcgcgtggtgggttggacgatgcaccacaggcaggaccggcacatggtgatccgggcggtgcagatggcggtatggcagcggcaaggcgcggagccggtgatcctgcattccgatcgcggcagtcaattccgaagcggcgactaccagcggtatctgtcgagaaacggcctggtctgttcgatgagcgcggtgggacactgcggcgacaacgcggcctgcgaagggtttttcggcgtgctcaagcgcgagcggatctaccgcacgaagtacctgacactcgatgcagcgaagactgatgtgttcgaatacgtcgagcggttccataacccgaggatgcggcgaagagtcgccaggcgcgatcgggagttccaagctctttcacaaccgtccgtgatttcggagtag

SEQ ID NO: 502903 - DNA, 228 bp, Stenotrophomonas maltophilia
atggccgccattgggggcgcagtcagaatcaaggtcgtcaggatcaatcccatgccgccctgctgcatcgcctggctggtcatgccgtcgctggaggcgccttcgagcaggaacttgttgaccagggcggtggaccagaacgcggtcgagacacggatcaccatgtccagcgcgatcgataccatcgctgccagtaccgccatcgagaacatcgtgccgatgccgtag

SEQ ID NO: 502904 - DNA, 1032 bp, Stenotrophomonas maltophilia
atggttgcgatacttccagaagcagcggtcataacgcggtgccagtaccagcagcgctggcgcatcggcgaaccacgcctgcccggacagcatccgccgcgccatcgcaggcaacgcctgcggcggtggcgagggcagcggcagcacggcgtgctgcaccggatgatagtggtacaagcccggtgccaatccttccacgttctgcaccagcaggaagccctcggtgggatgcaggccgccaccggaaggcacgttcttcttcaggaactcggtatcgcgctcgaccttctgcaccgcgtgcgccatcaacgtccgctgcagcacctgggccagcagtggcagcggcaacgcgcgctgcgggtcgaaattgcggcaggtggtgcgacgcgccagcagtgcatcgaacgcggcctcttcgctgcgcggcagcggctggtagtcgccctgcatcggctgcaccaccggcggtggcggccccaggcgctggcgcaggccggccgcggtgtccaacccctgccggcgcatgtcctccacgctgtccacggcctgccagcgcgcatggcgatgggccagcgcagccaatggccaccactggctgcgccgcagcgcctcgtcgcgcatctggtacccaacctcgctcggtgggtcggtcaacagcaggccctgttcgaccaggcgggccagcatggccgggcaggcatcggcgggcggttcgctccagcggtgcgcgctgagcccgcccagcagctggcgctcctcggcgtccaccggcagtggctggtccaggtgggcggccagcgccacccagctgatctggctgtccatctcggcgtggccggccagcatcgcacgcaggtccagggtgaccgcctcgcgaggctcgaacatcaggctggcgcagcggcgcaggcgcatcggtttccttccttgtgccgcacagccggcatagcagcaacgaccgcagcgcggccaactttagcgacgtgcacagcgcggccctcaatggcaggctgtcgcggccgatacgagtag

SEQ ID NO: 502905 - DNA, 639 bp, Stenotrophomonas maltophilia
atgcgtagcttggcactggtaggagtattgattgcggggaatgctgtggcgcagcaggctccagaaaccgttttcggcttggagttgaacgcgcctatttcgatcccggaatgtcagttcgaccggagttcccggacctacttccccgaggcgggttcttgttacaaacgtgaccaagtacggaacaaccggggcaagttggtagatgccgaaggtcccttgggtgacgagcgggtcgaaatctactttgcccataggaacaggccggcgattgtctcgggcttcaagatttggggtgtgcttaggggcgggcgattggtatcggtaggtacgcgaacgggtggcattagcacccaagctcaggacctagcccagttgaaggagaagtacggggagccgacacgttttgagcccctgtcccttcagaatggggcgggcgcgaaatttgagggacttctcgcagaatgggagctgccgacgggaacgttcgtgaagctggaaagcccggacatgacgatggcgaagctgccgacattgggtggtcccaacgtggggaccatgagtgtcgtgaccgccgagatcaaggcggagcgggacgcgaagcgagaggcgaccgaaagccagcggaccaagctctga

SEQ ID NO: 502906 - DNA, 600 bp, Stenotrophomonas maltophilia
gtgaacaaggacctgttactcaaagacatttccgagagcggctacaacatcggctacgcggcgaagaaacatctagcgacctacgacattgtcgagaaagcgccgggctggatcagcatcatcagcttcgccttcggcgttctcgcgcttgtcgttccgcagctcaataacaacattctggcggcgttcttgctgatcgttgcctacgccgtcttctacttcaattcctaccaagatagccgactggaatactccaaggtcggaagtcggctgacgaccatctttaccacccttcggtccttgctttacgaggcaaagagtcgagacgaatctgccaatttcgatgatatcgaagcgcgctatcgcgatttgctcgatgagtcgcaaagcatcgggattagcaagcagattttcctgagcgactggtacgcacactacaagttcttctggcaggcggagcggagttggctggaggaatatcgtcccttcaccttctggcgggacaagattccgctatcggccacgattaccggaatcggtttggtgatcgccgcagcctgctgcgttgtctactggattaacaaggggttctgcgcgtga

SEQ ID NO: 502907 - DNA, 1299 bp, Stenotrophomonas maltophilia
gtgagcaacgcttcgcttttcagtcaatttcgagacaacatcgcagtaagcaatgcagcagacatttcgacgaaatacgcgaacatcacgacccggctgaacaaggacttctgggactccgactcagacaccgcgcacactttacagattggctcctatggccgccggaccgccattgatggcgtaagcgacttggacatggccttttccattccgaaggctaagttcgatcactacaagagcctcggaagtgatggccccaagacgatgctcgatgatgtcaaagcatcgctccggaagcgttacgacaacggcacgaagatcaaagttgatggtcaagtcgtcggcgtgtttttctcgaactaccacgttgaggttttgcctgcctatgaagattccgatggcaacttcacgcacggcgacacaaacacgggcacgtggaagctaacgaagcctcgcccagagattgaggctgtaaataagctcaattccgagaccaactggaatcttaagaatgcgtgcaagatgttgcgcgcgtggcggaatcacgttggcctgaagatgggcggactccttatcgacacgcttgtttacaacttctttgacgagcgcaacgagtacgacgatgccaccttcaaggactatccgcaaatgttcgttgaccttttcacctatctaggtgacttggctgaacaggattactggtgggctccgggaagcaatcagcgagtcaaatgcaagaccaagttccagcccaaagcgaagaaggctgcgaagcgttgccaagaggcaattgacgcgaccgaagaatcaaagaaggtaaagcattggaagaaggtgtttggccggaagtttcccgccgcacccgcaacgactaccgcctctgatcgttcggcactcgttctttccttcgaccgtgagcagttcatcgaagacagtatcccggttgatattcgctaccacatcgaggtggagggagaggtccgtgtcggtaacgccgtgcaggataggattcgacaggcattgcgtcgaagggagcgtgttcctctcggacgacatttgaggttctacgtctctgaatgcgacgttcctgaaccctacgccatttggtggaaggttcggaatcaaggtccagtcgccattgagcgaaagatgctgcgaggagagatcacaccggatgcagacgggctcaagcagaagtacgaaacaactgacttcagtggcgaccattacgtcgaggtgtacgccataaaagatggtgtatgtgtcgcgcgtggaaagttgaaggtggccctctag

SEQ ID NO: 502908 - DNA, 306 bp, Stenotrophomonas maltophilia
atggcccgactatgggcggaccccgactaccgcgcgcgcatatccgcgcagatgaaggccaggtgggcggaccccacctaccgggagcgcgcccgtggcttccaccgcgacgaacgcacctaccgctggcagcacatcgagtccgggcggatcgtgtcccggaccaaggcagaaatgcgcgaggaacatggcttgcggcccgattcgctggatggcctcgtggctggacgcatccagacctcccggggctggcggctcgcgccgcggagcctgctgggcgaggggccgcgatggatcttcccctga

SEQ ID NO: 502909 - DNA, 123 bp, Stenotrophomonas maltophilia
atgaaaggcgctgttcccaacgtccggaaggcgaaggccatccacgaaaagaagcaggccgagcgcaacgctacggccaacaagatgaagaagcgcgcggcgaccactcgccgcggtcgctga

SEQ ID NO: 502910 - DNA, 759 bp, Stenotrophomonas maltophilia
atgccgaacgtcaacttcaagaccatccccaccgatgttccgctgaccgtggagaacatcgaccggctcgcgaaccgcgccgctgaactcgccaccgccttcggtgcgcgcatcgccaacattcagcagcaggtcgccgacgcccgcgaccgtttcagccgcgacggtgacgaccttgtccgtgagacagacgctgccaatcgcgccgttgccaagcagttcgccaagcggcagctcgcctcgcgcatcgctaagttccgcctgaccatcgtggaatcgagccgcggccagcgcgaggaacttctgcgcccgctggcgaaggtcgccgccgatgccgcgttcctcctgaccctgtgccagtcgcccgcgcagatgctcgggcgcgttgccttgggcgatgcccggcgcacgcagtaccagacgcagctcgaaggcgcaggcccggtcgagctggaaaccgccgcgatcaccgcgattgccaccggggacatgcctctggcagccgcggtcgcgaccgtggtagaccgccgcccttcggatcgccgcccgttctcggtggcggcgtttgccgagagggtgtggggcgcgcagcacgccgaggtcacggccaagctcaagggcgtcctgctggccgagcgcaccgcgcgcgcggccaatgacgagttcgtgcgcggcaaggccgaccccatcgccaacctgagcaaccagctcgccgcccgggccatcgccgaggcgtcgggcgaggaggacgaagcatga

SEQ ID NO: 502911 - DNA, 303 bp, Stenotrophomonas maltophilia
atgcgacgttcctacaggtacctgatgctggccctcgtgattggcaacgcgcaggctgcgcagcgcgagttattcaacgcccgcgagacgttggagcgggcgaaggtcggcacctattcgccgcgcgcgcagccgccggttcgcgtgcaggtggaaggttccgcgcggtttcgcgcgaacgaccaccgaaaccgccagattcaacaacaattcgagcggatggactgccgatggcaggacgccacgaattccatgcgctgcgtgccgtttccagccgaagaagtaaagaagcccaagaaataa

SEQ ID NO: 502912 - DNA, 1389 bp, Stenotrophomonas maltophilia
atgagcgttgagattcgcccgacgccgttccagacgcaggtcctgtccgtcccggaagatcacttcatcttcttgggcggcggtcgcggcggcggcaagtcgatggccctgcaattcctgatcctgcgccactgcgaccaatacaagaaccgcgctcgtgtcttggtcacgcgccgccggttgaagtcgcttctccaattcggcgaggagctgcgcgcgctgctgcgctccgcctatgggcgcgacatcgcctacaaccagaacgatgccgtgttccggctcccgaacggcgcggtgatccagctcgcgcacgtcgaatccgcgtcggcgctttccgacgtagcgcagggcatgaacttctcgctgatctgctgcgacgaaagcggcgaagcgccgacgatggaggtcatcgaccagctcgggctttcgttgcgcggcacgggcgttccacttcgcatggtgcttgccgcgaacccgggcggctcgaatcacggtgcgctcgccgagcggtacgtcacgggccgcgagccgtggatgccgttcgagttcgagggcaatacgtgggtgtatgcgcccagcatcctcgacgacaatccgtttctccctgccgcctaccgcaagaacttcgagattctggcccgcaccgacccggccctgtatcgcgcgatgcgcttgggcgactggtccgcgatggtcggcgatttcttccaaggaatatgggacgcgggcaagatggtgttcgatcaccacgacgtgccgccggatttcttagccacgttgaaactgtccattgactggggcagcgccgcgccgatggctgcggttctcgctgggcggctcgccgtagacgttcgcttgcccgacgaccgcgtgatgcctcgcggggcgtgggtgatctatgacgaacacgttgaacacgacccgcggaacctcgcccgtgggacgggccgcacgccgggacagatcgcgccgaagctccacgaggtggcgcgccggaacggcgtccgcgcgcggggcgtcatcgactccgcggcggaggcgcgcaccgccgggcgcatggaggcgagcgtgtcggaccttttccgggccgcaggcgttcgcgtgagcccggcgaggaaaggcccgcgcgtgccgcgcttcgagcagttgaagcagttgatggtgaacggcgagtttttcgtggcgtcgcggtgtcggttctggctcgcgacggttccgagcctgccgcgcgattcgcgcatcccggacgacgtggacacgaaggcgaacgaccacgctttggacgcgaccagctatgccatcgcaggcgagtccggcgggcgcgtccagcaatccagcttcacgccggaaccgcggatgccgcgcgatgagcgcgtggtgtgggtctga

SEQ ID NO: 502913 - DNA, 420 bp, Stenotrophomonas maltophilia
atgaccactgaaacgctccccgcgttgaccacgcagaacctcgacgcggtgcggatactcgcccgggagggcacacgcgaacacaccatccgccgcgtgcttgggctgacgccgaaggcatggaaggcgttgaaggccgacgatgacgacggcgagctgtcgccgctcgcactggcgttggaggaaggccgggccgatggtgcgggcgacgtgatcgccttcatgaagacgcgcatggccgacggcagcgagcgcgccgcggagttcctcgcggatcgcgtgttccagctcaaccgcggcgacggcaacgccgaagcgccccgcgtcgccatcatcatcaacgcggcgctgtcgcccgccgaatacgcgcaggtgatcgcggtccagcagcagccgggagtcctgacccatgagcgttga

SEQ ID NO: 502914 - DNA, 594 bp, Stenotrophomonas maltophilia
atgggccgtgtcgccctctatgcccgcgtttcgaccaacaaggaccagtccgtggagacgcagctattcgcgctgcgcgattgggccgttgcgcgcggtcacgaagtcgtcgccgagtacacggacgaaggcatcagcggcgcgaagggtcgcgacaagcgcccggcgctggacgcgatgatgaaggacgcggcgcgcgggaagttcgacatggtcgcagcgaccgcgctggatcggctgggccgtagcctgcaacacctggtcggcatggtcgcggagctggacgccctccgcgtcgggctgttcgtccagaacatggcgctggatacgtccacgccggtcgggcgcttgatgttcaacatggtcggcgcgttcgccgagttcgagcgcggcctgatccgggaacgcacgctactgggcctagaacgtgcgcggcggcgcggctcgcgtctcgggcgtccgaaggtggggccgaccactgagcggcaaatcgtcgcactcctagaggcaaagacgcccgtcaaccggatcgtgcggcagacgggcgtcggcgtctctgtcgtctatcgcatcaagaaggcaatggcagcatga

SEQ ID NO: 502915 - DNA, 381 bp, Stenotrophomonas maltophilia
atgagcaagttcgctgcggtgatcgtgatggtgttttgtcttctctcagcggggagcttgatcgcgaaagacaagagcgccaacggcgtatatcgcccaacgttgagcacgagcgcgaagaagtaccttcgtgagttccagctcggcaaggcaacgcaggacgaagtgatccagtacgttggcatgcccgacaaatcgaacacgattggcggatcggagttcctcacgtacagcatcgcgccgaagacttccagtggcgtgatcgagtacacctatgagctcaaggagggggtggtcgtcaacgtcacctacttgaactcgggcaatttcttcggcgtgacgcagcgcgaatctgctactgagctgcagcaatcgccctag

SEQ ID NO: 502916 - DNA, 2409 bp, Stenotrophomonas maltophilia
atgagcgagattgccgacttcctgacccgcttccgccccggtgggccgtggcttctgacggccatcgtccccgatggagacacattcacaaagacgttcgacaacgttgacgaagccgaaacgtgggcgctggacgagaacgctgctggccgcaatatctatttcagcgtcaatccgaccgcgcacgccctccgcaagaaggccaagaagtcgcacatcgcgcgtgtcgaatacttgcacgtggacctcgatccgtatgcgggtgaggacttcaacgccgaacgcgagcgcatccgcaagcgattgaacggctcgcttgcggccgagggtatcccgccgccgtccttcatcatcgacagcggtggcggataccaagccttctggcggctggtcgcgcccattgagctggacggcgatccggcgaaggtggaagacgccgagcggtacaacatcgaacttgcccgcaaactcggcggcgacgcgacgcacgacgtttcccggatcatgcgattacccggaacatggaacattccgaacgccacgaagcgggcaaaggggcgcgtgaaggccccggcgaagctgtatgactggacgacgggtgagccgtatccgctcgcctccttcaagcaggccccagcggcgcgcgccgacgcccctgccatcaggaagacacctagcgccacgcagaagcccggcccggttccggctggcccctacggtgtcgccgaactcgaagcatgggcgacggccaacgggaagcagctcccgggcgcagccctcaaggcgctggtacacggcgagcaattgaccgatgacaacggccagcgcatctatcggtccggatcggaggcgacgtgggcggtctgctgcgggcttgcccgtgccggggtcccggatgaactgatcgcagccgccatcctcgacaagaacaacggcggcgcggcgcatgtccaccgtcagcagaagccgacggcttacgcatggatgcaggtacgcaaggcgcgggccgaaatcgaagcggaggccgacgccgccgacaacgacacgattctggatgaaatgaaccgcctccacgccgttgtcgtacagggaaaggtccgtgtcctctcgtgggtgagggtggaaccggacgatgagcattccgacctctccgggcggctggtcgtggacctgcaatcgtttgaggacttccgcaaccgttaccggaacaagactgtcgtggtcggcctctctgacaacggcaagcccaagctgatgaagcgcggcgactggtggctggatcacgaacaccgccgcgaaatccgcggcttggtcttccgccccggcggggacgccgagatcaacgggttccagaatctatggcgcggctgggcgattgaaccgaagccgggcgactggtcgaaaatgcgcgaacacgtccgcggcgtcctcgccaacggcaacgacgaacacgccgactacatcctgcgctggacggcgtgggcggtgcagaatccggcacgtcaggcagaggtcgcgctggtcttccgcggcggtcggggcgtcggcaagggcatcttcgcgcgcgccgtcaaagacctattcgggcaacacggcctccacatccgcagctcgaaacacctcaccggcgacttcaaccttcacctgcgcgactgctgcttgatgttcgcggatgaagcgattgcgcctggcgacaaggccgcggagtcgcggctaaagggcctcgtcacggaaccgcaactactcatcgaaggcaaaggcgaaaacgcggtcatgtcgccgaactaccttcatatcgtcatggcgtccaacgaaaaatgggttgtccctgccggtgacgatgaacgccgcttcgctgtcttcgacgtatccggtgcgcgccaaggcgaccaggtctactggaacgcgcttgtcgctgaactcgatggcggcggacttgccgcgatgctgttcgacctgctcgcgatggatctgggcgactggcacccacgccggagtgtcccgcagaccgatgcgctgatgcgccagaaggtcgccagcctgaccggactcgacgcctacctgtacgacctgctttgcgtgggcgacttccccgaggtcgaaagcctgcggcagaagggccggtttgtttccacggacagcctccgcatgtcggcgtcggtctggctccgctcgcgccacggtgaacagcacgtttccggcaacgacgtgagcgaactgatggcgatgctaggcgcgacgaagtaccggcgcggcggtggcggtggacgcgggttcctgcttccctcgcttgcagcgatgcgggcgaagtgggacgcagtgaagtttcctgcggattggccggtggatgctgacgccgatgatgcgccggagcagattcagcttgccgatgggaagcccccgttctag

SEQ ID NO: 502917 - DNA, 381 bp, Stenotrophomonas maltophilia
atgaacaagacgccgaaggtgctaaaagctgcgccccgcgaaccctgccgccatgacgccgtattcgtcgcgtccatgctgcgctactcgccgtttgacgtgttcccctatgggccggaaacgacccccgaaggtgacgatcaccttgtctttgatgttacctcgaaggtcgatgcgctggccgcgcgcctgaacgatgaggatgacggtaccgaggcgttcgccgcctatcgctgccgcctgttgatgtgcgcggacgtgatggccggaaagctggccgcgccgccgcagtcgatgtgggcgcagatggcccagcaatacgggcgtggccgctacctgagctacaaagcccacctccgtagggaggcggcgcgcggatga

SEQ ID NO: 502918 - DNA, 249 bp, Stenotrophomonas maltophilia
atgaagcatcaagcgatcaccttgcctgccttgaagcaggctgtctccgatgaacttgcccgccgcaaagagcggcgttatgcccgtccgacgggaaccgcgcagtatttgggcatcagcttggccacactctggcgctggagcgcagagcgggacgatttcccgaagccttacaagattgggccgcgggcgactgcctgggatttgtcttcaatcgatgcttggcttgatgcccagcaggcgaagtga

SEQ ID NO: 502919 - DNA, 1299 bp, Stenotrophomonas maltophilia
atgatcgatgggcgcgccatgcctcgcaaggcaaaagaactgacagacatagcggtgcggaacctgaagaagcccggatactacgctgtgggtgggtctgtctcgggcctcctgctgcaagttaccgcgaccggagcccggagctgggtgcttcgctacaccgcaggtgtgaaacccggaacaggcaagccgtggcggcgcgatcttgggctgggcggctatccggacgtgtcgctgtccgaagcacggcgcaaagcagccgaggcgcgcgagctgctgtcaaagaacatcgacccgatcaccgccaagcgtgaggctcggagcgcgatgctcgcggcacggcttgctgagatcacctttgagaaggcggcgcaccagttcatcgagtccaagtccgcggaatggaagtcgggcggcaagagcgccgaccagtggaccagctcgctcgaagcctatgccttcccggtgctgggctcgctccgggtcgccgatattgaactcgcacatatcagggcggtgttggacccgatctggaaggacaagaacgagacggcgaaccgggtgcgccagcgcatggagtcggtgctggactgggccagtgctagcggtttccgtaagggcgaaaatccggcgcgctggaaaggttatctagacaagcttttgcctgcgcccgggaaggtgcgggaggtgcagcatcacccggcgctgccctatgcccagatgcagccgttcatggtggaccttcgctcacggaacggcatgggcgcgcgggcgcttgagttcgcgatcctgaccgcggcccggtcgggcgaagcgcgtggcgcgcgctgggacgaaatcgacctggaggcgaaggtctggacggtccctcccgagcggatgaagtccagcaagaaagaacaccgggtgccactctcggatgcggcaatcaagatgctcaaggcgttgccgcgggtcgaagggacggacctcgtgttcacgccgcagcgtggcaagaatccgctgtccgacaacacattgacgaagctgctgggagatatgcacgatgccagcgttaagcgtggcggtgcgggctacatcgacccgaagcagggcaaggtcattacggcccatggctttaggtcctgcttccgcgactgggcatcagaagagacgcacgccgcacgtgacgtggtggaaatggcgctggcgcacaccatcggcaacaaggtcgaagccgcctaccgccgcggcgatcttttcgagaagcggcggacacttatgaccgaatgggccaggttctgcacccccaaaaagtaa

SEQ ID NO: 502920 - DNA, 1212 bp, Stenotrophomonas maltophilia
atgacgacgttcgccgcatcgatcgaccagaccctggaacgcgaactgcccgccgccgccagcggttgccagcacgcctacggccgtatcgtgctggcctgccagaacacggtcaccgccatcgccctggccatcacccgcgaccgccaggccagcgaggacatcgcccaggaggccttcgtgaagggctggcagcagctgcaccagctgcgcagcgcgaccagcttcctgccgtggctgcggcagatcacccgcaacctggcccgcgactggctgcgtgcgcaacgcggccggccgctgaccggcgaggccgcggaggtggcgatgggcatggccgccgacccggccccaggtgcggccgatcgcctgcagcgggtggaagaggagatcgccgccgaggacatcatctccgccctgcccgccgacagccgcgaagtcctgttgctgtactaccgcgaaggacagcgctcgcaacaggtcgccgacctgctcgggctcagcgatgcggccgtgcgcaagcgcctgtcgcgtgcacgtgccctggtgcgcgaaggcctgctgcagcgcttcggcgaattcgcgcgcagtagtgcaccaagcgccgcattcgccaccgccgtggtgtcgatggtgctggtggccgcacccggcaccgccagtgccgcgatcctgatcggcaccggcgtcggtggcagcaagctcggtctcggcggcgccagcgttgccggaggcaccgcgatgggatcgttgaccgccaccctgggccagctgcatgtgctgccggccgaaagctggggggcggtgatcgggggcgtggtgggtggcgcgatcggcagctacctcggcgggcgcttcctgatgtcgtacaccgaaactgcggcagagcgggccgatgtgcgccgcttcctctacctcaacatcaccaccggcatgttctggtgcctggcgatcctgctggctgtggtgctgcaggcaccggtctggacgcagctgacggtgctggcggtcgggttgggcgtggtcaactaccagtgcctggtgacgctgcagcgggtgatggcgccgatgatcgcgcgcgattcggcgcggcgcgggcgaaccggcatcaactggaagttcgaatcgatgtacggccgcaccgccatcatcgccatgaacctgatggtcattgcgcttgtggcgtactcgctgatgcgcagcggccgcctgtaa

SEQ ID NO: 502921 - DNA, 453 bp, Stenotrophomonas maltophilia
atgaccaccgacaacaagaccctggcggacgtgcagcccggtgggatggtgaggctgggggatcaggccgaacgggcgtggtttgaggcgtgggccgaaccccgcaaacacacgttgactcgctggggcgacagcccgggggatgtgaagccgctctttgtgagcgaggtgccggggaactacatctcccctgccgcccaggccgcatgggaagcatggcagtacctctccgcccagccctccccgggtggtcagggggatgctcgcaggcaatggctggaaatccgtgggctggccgcagccatcgtgaagaacctccaagcgttcgctgattcgccacacaaggcggcgtggtgcggagcgcttgacgactcgctgttgttcgcagatcagatcgaaaaggctgccgctgccgcctatgaagccgacctcgaacggaggcgcatggcatga

SEQ ID NO: 502922 - DNA, 369 bp, Stenotrophomonas maltophilia; identical to SEQ ID NO: 493084

SEQ ID NO: 502923 - DNA, 219 bp, Stenotrophomonas maltophilia; identical to SEQ ID NO: 493085

SEQ ID NO: 502924 - DNA, 297 bp, Stenotrophomonas maltophilia
gtgccccggcctacactgcgcgcggttcaggcgactgctgcgccggagccgaacgggctccgcatggatgcggtgcttcgtgagtcccactttcggatgatccgccacttccgtcgccggtgggggcagcccatgcagctcatcattgaccaggcttgtttcggggtgatggggatagagcaacttcctgatgatgacctgatccggctgcacaaggatctggagcgcgccgaggattgcatgcgtgatggcgtgacctttgaagatgctggcttgcttcgctctcgctacgggtga

SEQ ID NO: 502925 - DNA, 525 bp, Stenotrophomonas maltophilia
atgatttccacaaatccgtcaatcattcgttacatgagcattggcgccagacttgaagagctgcggaagtcccggcagctgacccaacaacagatggccgacatagtcggcacgtcgaagcagtacgttggccgactcgaaaagggcttgaaccagacgccaaatggcatcttcctcaccgagtgggcaagacacttcggcgtgaacgctcgctggctctcttcaggcgaaggcccccggacagcttcggcctccctgccgtctcaatctgagcgaccggacttcagcaagctatcggcatcggtcctcttgcttcggcactacctggacttcaccggcgatccacctgagtggatcagtgatgaagtccttctggagacggcgtttgaggttgtcgaggagtttggcgaacaggttcagccggacaatgtgttcgatctgaccaagattctggcaaagcggattaggggggcacaggatgcagaaggacaaattcgaggaactcgcacagcggctggcggctag

SEQ ID NO: 502926 - DNA, 195 bp, Stenotrophomonas maltophilia
atgaagcgcgtgaactggcccattgtggcgcttggcgtcctgtggtggtggatggagaccagctacttcggtcacaacgttgggccgggaagcgtggccgagctgttcgccgacggaatggcgctggccttctacgccgccgccttcgcgttcccgccgcgcaggaccgacgtgaccatcgaggtgcggaaatga

SEQ ID NO: 502927 - DNA, 1047 bp, Stenotrophomonas maltophilia
atggcctggaccactgcccagctcgcgcagggcgccaactacaccttggagagctactccaccaaggatcccgtcgaccagatcaacgttgcgcaccgcacgctggacctgttcgtcaccaacaagcaggtttcgttcttcggcaacggcatcttcaacgagaagctgttcatctcgaacgacagcaactaccagaactacgaaggcgccgaccaggtcacctacaacgagcgtgacccgaaccgcttcgccaagttccagtactactcgaaccacgagggtttctggttcgatgaagaccgcctgatccgcaacggcatcctgatcgatgattccggcgtcgcggtgccgagctcgcaggagaaggagcagcttgtcaacctgctgcagtcgagctggaccgcgatgaagaacggtctgcaggaaggtctggcgctggaaaccctgcagaacggttcccagtcggccaaggccgttccgggcctggaccacatcgtctcgaccaccccgggcaccggcgacatcgtcggcggcatcaatgccagcaccagcacctactggcgcaacaacgcaagcatggccatcgcctctggcggtgtcgttgcggcgctggatgcgatgtatgacgcctgtgtgcgatacggcggcgcgatcccgaccgacatccgctgcggccaggcgttcctcaacgcctacaaggccgaggcgaagatcgagatcaaccggcagatcatcgtcggcgccaacggcggcaccggcctggacgcatcggtcactgcggtgttctaccgcggcattgagctggtctgggatccgaccttcgaactgctggacgccaagctcggcgcgatcacctacccgtggaccaagcgctgctacctgctcaaccgcaacttcatcaccttccgcccggtgaagggcaactggatgaagaagcgcaagccggaaaagctgccggaccgctacgtcacgtactacgcgcagaccaacaagtacggcctgaccaccggcaagcgcaacgtgcacgccgtgctgtccatcgcctga

SEQ ID NO: 502928 - DNA, 540 bp, Stenotrophomonas maltophilia
atgagcaagtccaccgtcatcgttcccgtcgtgctgttgaccatcctgcgcagtaccgaggtcaccatcaccgagtccgtgttcaagcacgaggtgccgatcctcgaacttattcatggcgaggacaacgtgaatgtcatcaacgatgactaccacgcgatcgagctgccggacaacgccacgcaggagtatcagcggctgctgaccaagtacggcgacaagtaccgcccggtggtcgaccaggtattccgcaacggcccgcgcgacatcgccaaggaagtcggcatggggctgggcaaggacagcttcaagaagcagtccgaggccgtgatcatcagccgtttgccggaacgtcccggtcagaaggccgaagccggcgccggtactggcggcgatgccgatatgaccgcagccgagctgaaggccgagctgaccaagcgcaaggtcgagttcaagggcaacgcctcgaaggcagacctgcaggcgctactggacgaggcgaagaaggccgaagccggcgccggcacactgggcggctga

SEQ ID NO: 502929 - DNA, 2763 bp, Stenotrophomonas maltophilia
atggccgctcccttctggcagcccggcaccctgtatctgcccggggatctggtccagccgatcacccagccggcgccgaacaacccgcaggtcatcaacggctacttcgagcaagggacgacaggctggacgttctccggcgacgcttcgctctcgacgtcgcacggttacggcagcccgaattgcgtccagctgcctggcaacaagccagacggtgtcgccctgaacaacgcgcagctcgtcgtgccagtcggcgggcagctgactgcaaactcgatgatccagcagggggcgtcggtcgccggcgccacggcaggctggaccgagattcgctggtatgactcgctaaacacgttgctgcagacggacaagggcaacgtggtcgacagtggttctggcggcgcatggcaccagtccacggtcaccgcgacggcaccggcctcggcggcctatgcccgtgccgcaatccacctgacctcggtggccgaccacaaccacgagatcttcggcgacaacctcgttgtgagcggcgcaaccgcaggcctgcccgaagggctggtctacaaagcagtccagaccgagtcgggcacatcgggcagcagcgagccggcctggccgggcatcctcggccagcaggtcatcgacaacgaggtgatctgggaggcggtgaccaccagccgtgtggtgtggacggcctcaccgcgttacgtgagcggtgccaccgagccagtgtggccagtcgatattggcgcgatggtccgtgacggaacaatcaactggcgagcaatctcacgaagggttgaagacgaaaaatgcccccaatcgaaggtggtggcgatcgtcgccagcaaggtgttcgcggcggacaaggacatcgtgcgctacagcgctacggccaatccgctggactggtccacggctgatgacgctggctacctgccgaccggcctgcagcaggccaacgcgaacaacatggcggtgctgcagcagtaccgcgccaacctggttgcgctcaacgccagcagcttccagaactggcaggtggacccggatccggcctccatggcaatcctggaccagatggacggcgtcggctctgtgtggccgaaagctgccgttcctgtggcgaatgacctgttctaccttgcaacgcttggcgtgcggacggttggtatcgcgaacgcggccgagaacctgtcggctggagacgtcggcgcgccgattgacgtgctggtccaagaggcgatgcaggagagtgacgccaacaatgggaagatgctcgggacgtactacccgagcgccgggcaatactggctgtcggcctcggaagtcccggctccggagcagacaggcgtgatcccggccgtgatcggggccgacgtcagccacacgatcaccatccccgacgcgtatcagtcggcgtacatcttcccactcgcggatggaggcataggtgccgcctccgcgccagatggactcgacagcggtggaatttttggccatcggaagtacaacagcgttctttcgcccaaggaagactttcaacagtcgatctggggaggaacgtcgacgggcgactctcgtttgttccttcgcggcatgcgtgaagatctcgcggcgatcagcgccgatgacaattttggatattgcaagcagctggccggtggaacctacaagggctacttccagccaaccgggcttgttccgacatggtggtacaacgagcagggctatgcgccggaattcggcggattggtttggttctccgatgattcggtatacatcggcgttcggcgcacctcccaggcattcaacgctatctaccgtttcccgatcggggcgggtggggctggcatagcgaatagcgcttcctatacgccagtgggttctgccaccacgccttacttctggatgacgcgcgctcgctctggcgagatccacgtcgtcacgcaagacagtcgctttaagacgttcaacgaagcgttggagctgctggatgatcggccttttggcctgtctctggatgggttcaggggcttcggcgtcgacaggggaatcatctgcgccgtatacggtgggtcctccacaagctcggcaggatgccagttcgcacgggtagaagattggtcgctgcagggctccaagatcctaaatgcagccatgagcggcaatgagtcgacgcgcgtgctgttcgatgaccagtcctgctacatccagtgccgaaactgggtaggccgggtgcagtactcgcccgagatcaaggtgtataggcacaccagtacggtcttcgtttacacgatgaggggaaccggaaagcagggagcctggagccgctatttgttcccgttcgccgttgatgccttcagccagctcggcaacgatctctacattcgacacggggatgaaatcagcgcggtcagcgactttgccttgggcgacgacgttggcggccagacgatcccgttcggtggcacggtctggtggccgtggctggacttcgggacgccgagcgtcaccaagatgatggagggtttcgacatcgtgagccagggcacgcccagcatcagcatcggctacgaccagcggaaccttgccgcgttcaccgacccgtacacggtcgaccccgacacgctgccgggcggggtgatcccgttcccgatgtcggcgccgaccttcagcctgcgcgtcgacttcgcgccgggcaagaagtgggcgctgacgcaggcgtcgctgagcttcttcgacctgggcaacgggccatga

SEQ ID NO: 502930 - DNA, 1254 bp, Stenotrophomonas maltophilia
atggccaatccataccaggccgggcaggctctcggcgccgcgctgttcggcaacacgcgcgatacctacacggatcagctgggccggaactatcaggtcgaacgggcgctgcaggaggcccgtcaggcgcgttcgaaggccgtgctggccaaccagatcaacgaacagcgggcgatgatcacgcccgaactgctggggtcgtaccgtagtggtgacaacgcagcaaccaaccagctgatcgctgcaggtctgctggccaacgacaaggtggatttctcgacgcttggtgacatcgagggcgcgacctatcgtcgaaacgccgtggaccgcgccacgctgggcgattgggacggggcgaatgcgtcgatgctcggcgtcgcgaacggcccgcaggagcttgctgccgtccaggggcagaacctgatcaacaaccgattcctgaccgggggcggtggcatctccaccaccgagcagggccgggccggtatcgctgccgacgccgcgcgcgcggccgcttcctatgccagcgccaacagctccaacgccagcgcggcacgcacccggcaggcggccggcatcgacgcggcgaagttcggcctggagcgcagcggccagtggaaccctggcggcaagtcttccggcacgcttggagacagcggcaagccgctgccggtgggtgcgttgaaggacctgttggccgtggaagacgccttgggcggcacggccgtcctcaatgacatcatccagaagaacgctgcgcgcttggccgacggcacgctgaagatcagcccgcagaacgccgctctcgcatgggggcgcactggcttgggtatggctaccgaaggcgacgtggcgctgaacgaatggaggtcggacctgaccaagatcgtcaacgagtcgctgcgcctcaacaagggtgtccagaccgagggtgacgcacagcgtgccgcgaatgagttgatgtctgccaatgatcccaggactgcggctgccgcgctcgcaaggcttgccaagttcaaccgtcaggcggttgagctgcagacccgcaagcaggacatcatcaacgcaaactacgggcgctccagcacgcctggtgttgagccgaggagcttcggtgggacgctcggcgatccgcccgctgctcgcggccctggcctgccggcccaaggtggcccggcgccagggactgtgcgcaacggctaccgtttccgtggcggcaaccccgccgatcgcaatgcgtgggagaaaatctga

SEQ ID NO: 502931 - DNA, 2319 bp, Stenotrophomonas maltophilia
atgaacaccccacccacgacgcgcctcgccctggccatcatcgcggccaccactgcacctgcctacgccgcagacacgcacgacgccgcgctcgacacgcccaccacgctcaacgccctgcaggtcatcgccacgccgcgcggcgcggccgtggcaccgacccaggtggtcggtcccaaccgctacatcatcaacgccgaggacctcgacgcgatggtcaccggcaacaatggcctggccatgctgaagcaggtgccgggcgcgagctataccgccaccgatgggctgggcctggatatctccgccaccagcctgttcgtgcgcggcttccgcatgaacgaaatgggcatcaccttcgaaggcgtgccgctgaacgacaacggcttcctctcgctcaccggcaccagcgtggtgaacgtgggcgtgcccgatggcatcggcgcgatcacggtcagccccggcggcgcaccggtcagcgtgttctccagcagcgtcaacggcggcagcctggaataccgcctgcgcgacctgcaggacacgcccagcctgcgcgtgaagcagggtgtgggcagcaacagcacgctggtcaccaccgtatccgggcagagcggccagctcggcgagcatggcccgaaagtgctggtcgacctgcagcgtgtgtccgccgacaagtaccagggcgagggcacgcagaacttcctgcgcggcgacctgaagctgcagcaggacgtcgcctggggcgatgtcaccgtgttcctgtccgacagcaaggccaaggtctggggttacaacaacatttccttcgacatgatcagcaagctgggctggaaggccgacatcttctacccggactacgcctgggcgtactacgtggcctcgccggagaacgcagacaaatcctgcggcgcctatacctgtggtgaactgtccgggctgattccctacgacaccggccagagcacgcgtgaccgcgtgtcctcgatcaaccaccgcttccagatcagtccggcgctgagcggcaacgtgcagctgtacaacgccaacagccacacccaggccacgctgaccgacccgaacgtgccgtcgcccaacggcgcgccgttctccgaacaggtgcagaccccgcgcctcaaccggctgggcggcatggtcaacctgcagttcgagaccggcgcgcacaccgtcaccgccggcttctggcaggagaagagcaaggccgccgccaagaccgagtggtaccagcagccgctgctgggcgagggtccgccgctgaaggccaccggcccgttcgatgtgtacggccccgcgttcaagaccgacaacgcatcgagctgggtgacccgctcgcgtcagttctacctgcaggacgacatcgtgctgaacgacacactgaagctgggtgtcggcttcaaggccgtggacttccgcaccagcggcggcggcctcggtgatgccaaggaccggccggtgaacggcacgctgcgcgcgaagagcaacttcctgccacatgtctcgctgttctggagcccgaccgaatccaccgatgccttcatcgacctggccaataccatgaacggctaccgcgtggcccagcgcggcaacatcggctacaccgcctcggcgtggaccatcaccgaccaggaggagttcgaccgcgtggccggcacgctgcgcccggagaagaactggaacctcaccgtgggcgcatcgcatcgtttcgaccggctgacgatcaccggcgacgtgttctacaacgacatccacaaccgcttgctgtcggccgccatcggtacccagttcgcgcagatcaacaccgtgcggctgatgccgaagatgcacgtgatcggcgctgaccttggcatcaccgccgacctgagcgaccacctgcagttctaccagggcgtggccgtggcccgttcgtactacgacagcgatttcgtggtgggtgacacggtgtacccgatcaagggcaacgcccagccgggctacccgcagatctcgctggtcagcgacctgtccgcccacttcggtgactggcgcttcggtgccaccagcacctcttacctgcgccaacctttcacctacgagaacgacatccgcgtgccgacgttctggcaggtcaatacctatgccgcctaccgcttcggtacggacagcgcggtgcccggcctggagctgcggctggacgtgagcaacctgttcaaccgccacaacatcggcaccgccaccattgccggctcgtcgttctcgggggattaccagaccctgcagcgcagcgcgccacggcagctgatgttcagtacctcgatggcgttctga

SEQ ID NO: 502932 - DNA, 555 bp, Stenotrophomonas maltophilia
  misc_feature (518)..(527): n is a, c, g, or t
atgtccgattcgcgttccccgcacagtttccatgccgcccacgccctgctggccgagggttgggtccgcgatgtccgcctgcaggtgcaggacggtcgcatcgcggccatcagcacggggcagggcgcgcagtcgggcgacacccgcgtcggcatcctggtgccgggcctgcccaacctgcacagccatgctttccagcgcggcatggccgggctgaccgagatcggcggcggcgacggtgacagcttctggagctggcgcgagctgatgtaccgtttcctggcccacctgcgcccagacgcggtgcaggccattgccgcccaggcctatatggaaatgctggaaagtggcttcacccgcgtcggtgaattccattacctgcaccacgacgccgagggccacgcctatgccaaccgcgccgagatgagtgcgcggattgccgccgccgccgaccagaccggcatcggcctgaccctgctgccggtgttctatgcgcatgccgatttcggcggggcggnnnnnnnnnngcgccgaatccagcgcagcggcgcctga

SEQ ID NO: 502933 - DNA, 354 bp, Stenotrophomonas maltophilia
atgggccttgatatgtatggggggaagatccgcaaggaggagacgtcgtgcgagggacaggtgttctttcagtggcgatgccatcccaacctccacggctggatgttcgggctgcacagtgcccggacggggtgctctgacccgtttgagttcaacatggttcgcgtgtttctcggagcggcagacctcgacgcattggagcaggctgtcctcgatgagcggctgccccacacggtgggcttcttcttcggtgaatcggatcccgatcgagctaaagaagatctggacttcattgcgcaggcccgcgcattgatcaacggcggttgggacgtgttctacaactcttggtggtaa

SEQ ID NO: 502934 - DNA, 1683 bp, Stenotrophomonas maltophilia
atgaacgatacaacaccaacttcgggtgtcaatgggcgccccaacaatgtcctttccttccgtgggaatgcggcccccaaagcagctttcggagcgccagcgcccaaggcaaccttgagcgatcaagcattcgaggccgattttgccgatcacctgaaggcaaccgaggagtatgcgatcggcggaaagcttccggatggggatgacgattgcagcttcttccgttggcttcctgagcaaggctattgggatcggtgctccgagaaggacatggccgccaaggcgctttcctggctgcgattggagcgcaaggagaaggcgaacgcaggtcatgcaaccagctgcatcaacacggcggtgcttgagctgatgggagatcggaaatgctggttgcccaagaagtccgatcgcagggccatcgttcccctcaagggtggctaccttgagatcgtcaagcctgacgaaccgcgttgtgctcccgcggcggcggatggagaagaagtcattgaccaggacgttttctctccgacgtatggacagagtttgggcctgcggcaagggctcctgtttcaaaccgacgaggcgccgtctaggacgcgaattcgggtgctggcggccaccaaggagcatggaatcacttaccaggtccctgccaagctgcggctggaacaggttgacggcgatggctattacactcccaagccgctggacaccaactcgaagttcggtcaatacctggatctctttcagcccgacctggaggtgcgtgcactccttcaggaggcggtggccagctcgttgatgtcgatctgctttgagaaggccttcttcctggttgggtcgggcagcaatggcaaatccacgttcctccacatcctgcgcgcccttcacccccgcaatgtgtcgctgcgtctggagaagttggacggaaccttcgctatggccccgttggtgggcaagagcgcctacattgtcacggagacgccaaaggtccttgccgcatccatccaggaagtcctgaaagcgctcatttcccgtgacccgatccaagtcgaggccaagcgcaaagacgcatacaccacgctcccaatcggcaccctattcgccagcgtcaacgcctggttcacggtttccggacatgagcacgggttctggcgaaaggtcctggccatccccttcaatgttcggatgggtgagaagacccatgaggacgcgaagggtggaaatggaaagaagcgtgagcctgacttccaccttcagatcaccgaaagcgaggaggagatggcccagatgctggactgggtgctggaaggcgcgctgcgccttatggagcgtggcgggttttccgagaagctacccgacgccgtgctcgcgctggccgagcagaatcgaatggaatcggacacgaccatggcctacatggcggaccgagacgcctcctacgacagtggtgtttgcaccgacaagacggccatctacgcggactaccgccaatacgtgttggaagagctgggcaagaagcccgtcaacgcggaggacttctggaagcgcgttcgcgagaagttccccgaggccggcatctaccagatctcccatgggggcaagaagcctcgcgtggccgagattcgaattgcggggatcaaaccactgcgggacatggcagatatggaaacgcctgtttga

SEQ ID NO: 502935 - DNA, 1029 bp, Stenotrophomonas maltophilia
gtgtccgatgcaacccccaacgaaagcttccttcagcgccactcccgcgacgtcgtcgaacgcctgatccgccaaatggaggagggcaccggtcccttcctcaaaccatgggacgcccgcgtggacctcgggttgccgatgaacgccacgacgggcaagagctaccggggcggaaaccttctccacctgtgggccctgcagagcgcctgggacacccaggacaaccggtggatgacttacaagcaagccgcggccgtgggcgctcaggtgcgaaaaggtgagaaggccagcgtgattgagtattgggattggtcgccggtggaggaggccaagaagagcggggatcccgatctcatcgccaaggcccaccccaaggtcttcttcccccgggtgttcaacgcgatgcagatcgatgggttgccggcactggtcctgccacccccgcgtcgagagcccgatatccatcaggcctgcgaagcggtgctcaagggcagcggggccgagatccaccacgacgggggcaaccaggcgttctaccgtccgatgacggacagcatccacttgccccagcgcaacaccttccactcggccagcggatactacgccaccgcgttgcacgaactgggccactggaccggctttcccacccgcctcaaccgcgatcagaaggggacttttgggagcatcgactatgccaaagaggaactggtcgccgagatctccagcatgctgatgggcgaacgcctgggcattggccacgaccctacccagcacgcggcttatgtgaagtcgtggatccaaatcctccgggacgatccccgggagctcttccgagccgcggcggcggccgagcgggtggtggaattcctgaaggtgcccgagttggttcgcgagccgctcccgaaggttgagcgggagcggcagcttgtggcagccaaccagcaggagcttgaaaaacctaacggcacgaaggtccgcacgaaagcgcgtgagaaggccaggcagcggaatcacgtgatggtggcctga

SEQ ID NO: 502936 - DNA, 264 bp, Stenotrophomonas maltophilia
atgtttcgagagggacaccgccgggcggccatcgcccaagccctgggcgttccatcgcccgtggtgagcgccgatctggcccacctggggttgcgtcagaagccccggcgcccactggctgaccaacacgccctggtggtgcgcctcctggagcaggggaacaacggccctgcaatttccaagcgcctcggcgtgacccggcaggcggtccacgcttacctgcaggcccacggcctgctcccaacccagaggaggatgccatga

SEQ ID NO: 502937 - DNA, 477 bp, Stenotrophomonas maltophilia
atgaggaccagccatggccgggtgcgcccagaccccgtcgacgcccgccctcgcgacgacgggctgttccaaggcgaaggcacgggcgaagaggttcaccaagagcgtgacccgttgcttcaagcgctttacaccgaatcgctccatgcccgcggggacgtggacgccattgatcgcatgctcgatgcccaccgggaggcgtttggggagcctgagcaagtcgcctatgcccgtcaacaagacaaacgccatgatcgggcgttgcccttgccgagcggtggcttgcagttgaagccgtccatggagcgctacttggaggagcatcgatcatggaacccgccgaccgccaaagaggccgccatcgcacgttccagatgtcctacgatggtgctcgaagggaaggcatggcgtgctgcagacgacgttgccgaggttacggtggaggcacccaaggacgccccgcggcagcggatgtaa

SEQ ID NO: 502938 - DNA, 975 bp, Stenotrophomonas maltophilia
atggactaccctgaccttgccccactggaggaaatctccggtccgttcgcccttctttcgaagggtcccaagttcatcgccgcctggcttgccacgcgcactgaggagcgcttccgggagttcacccgtgccgcgcttgatggtcaggtgttccccgaaaacgcggaggccatgacctcggaagattttctggccatgctgcgggcattagagatggacatcgaggccgagaaggccaccgtctatggccgccttgcctgctcaatcgctaccggcaaaacggcaggccatctcaagcgccacttcattaaggcgctgagcgacctatcatttggccaggtcgatcttctgcgtcgcgcttggatcgccgagcgccaccaaatctttccagggagaggcgggggaaatttgaaccctaaggaattattaggactgcacgggaaacccggattcaataggcaaacctttgagcgatgggccctcattgatgaaaagggactgagcctgatgggccggaagttcgtagaagcgtgcttcgccggcggagagctcgagccctctgcggtagggtttcaagaatgggcgaagggccaaatccacatcgtctgcaatgaaatggatacaccagcctgctatgactttctgttaaagctcgacgaggtgggccacgcgagagcaattcatgtgcaccatggcgccgccgttcgtgggcgttccaaccgcctgctgacacccgggcccgtcatggtgattctgctcaccgacaaccctcagcttttcgcagacgagtggaccacggtggaagacaccatccgagggcgagctctgacggtggtggccacgaccgatccgaacgcgccggtgcccgccgccatggaggcattggaacgcatagatgcatcaccgggccgggctgcagaagccgtgacagcgatactggagtgctttgaagcaaaagggttgcggggcacctga

SEQ ID NO: 502939 - DNA, 501 bp, Stenotrophomonas maltophilia
ttggctccttttctcacccaggccaaagatgcgccggttgtgatgggtgactcgatcccccggatgaacggacattggggggagggagagctcggaaagagtgagagggcaaccgtgcttcacggcatccatttcatcagtccctcggtgggtggcccgctattcaacacggtgtggcttcccacgctggccgacttgcgggtgctgctcgctgacgccgacctctgcaaggcagccgaaacagaggtgagcgcgttcattgacacgttcgtggacccgttgccccctgagctcgacgaggtcattcaccagccatcgataaaacagatttccagcttgccggatgattgcgggatcggcgtgggcgtttttgtgaccgacgcttttgcgttcgtccttcagcgcatgattcaggaggcaatggctcagcaccgtgcgcgtgagttggatggggcatggcaacagtcagccaccgcaggtggcaaacgtcccaggctctga

SEQ ID NO: 502940 - DNA, 501 bp, Stenotrophomonas maltophilia
atgacacgcaagaccttctttcgcgccctgctgcccatcgccctggcctcgctggcggtgcccgccttcgccgccgacaccaccgcagacctgacgattcagggcaccctgaccaacacctgcaacctgtccgtttctccggtcacggacatggattggtcgggcacttctgacaactccacccgaacctctgcgttgagcatcgtgtgcaaccagggaaccacttactccatttccccaggacagggacagaacttcggagcgttggcgggttacgagacctaccgcgccgtgagcaacggttcgggtgccttcattccgtatgggttgttcaaggacattcccggcacccaggcatggggcgatgatgccgatgcgttcgcgggcacgggtaacggtgctgtgcaaacccacgaattcgcgttgaagttcttcgccctcaagcaggccgtgggtggcaactacaccgatacggtcaccgtcaccgccacttacaactga

SEQ ID NO: 502941 - DNA, 288 bp, Stenotrophomonas maltophilia
atggcccaatcgacccacaaccgcgattaccaactcctgctggccgtcctgaaggcggcccgtaagcgggtcggcgtgacgcaaatcgagctggccgagcgcttgggcaacacgcagacgttcgtgtccaagtgcgagcgcggggagcggcgcatcgacgccgttgagctggtggagttcgccgaagccatgggcgtggcacctcaggagctgctgggcgagtacctggagcagcgtggacgtgcgacgtcaccgaagacgcggaagggatctaagcagcgagggtga

SEQ ID NO: 502942 - DNA, 462 bp, Stenotrophomonas maltophilia
atgaagcggatagggattcttctggttgttctggtggccttggcctggatcgggtcgaaggtggtaccgcgcagcgagcccgcggctgccaaggcgccggcagcagtggccgagacgcggcagaagcaggcacaagaatccgaggcgccgaagtcagagcccgagcgcccaatgacggccatggagaagaaggcgcagcaggagaagtggttcggcgccgagacgatcgtggcagccgagcgcgcagtgaggggcgagctgaaggaccccgacgccgcgcagttccgggacgtgcgcgccaactacaccgaggagttcggcatggtcgcctgcggccgggtcaacgccaaaaacgatttcggcggatacacgggattccggcgcttcgtgtcgggtggaaagagcgtgatcctcgaagggcgggataacgtcgctgacgcatgggcaggtgcctgcctctga

SEQ ID NO: 502943 - DNA, 516 bp, Stenotrophomonas maltophilia
atgaagctggaagaaatgcccaccaaggaactgctggccctgttcaaccagatcgccgacaagccagcgggacccaagacgttcgcgacgcgggcgaagcttgtcgcgcgcatcgagcagatcgcgaccgacaagaacatcgacctgaccgcgtccgggtggccgaagaagcccaaggcgaccgcgcagcgcgcagagccgaaggccgaggccgccgaggcgtccgaagcgaccgagaagaagccgcgcggtcgcggcgtcggtgcactcgcacgcgcgatcctgatggacccagcgggcttcccgcacgcgctggtggccgacatggtcaacgcgcaggtcgagggtgcggctgcgacggccaagtcggtgcgctggtacgccaacgatatgcgaaagaagggcgtcgaggtgccgccgcgtcagaaacaccacccggccgagatggacgaggagcagtcagtcgaggcgttgtccacggtcagggtggtcgaacccgcgccgtccgacgggtga

SEQ ID NO: 502944 - DNA, 459 bp, Stenotrophomonas maltophilia
atgaataccattggaattcgggtcaagcccggagaggtgacattcgcggtctacgatgctgacgctggcatcatagttaatgtcgaagccataaaaattccaaaagcgttatcggcgcccgatgcgctcaagtatgttcgaaataatatcctggatgtcttgcgggaatattcgattgatagcgcagggctgcgtgtgaccgaaagcaacgctcagcagatgagtgtagaaaggattgagatcgagggagtgatccaagaggcctttgccagcagctgcctcaagagctattacgtcgggcagatcgcaagcatgtctcgccggcttggcttcccgcgggatcagttcaagcgctacgtaagtaatgagatttcatatgacgcggtcgagaattggtgggcactaaagcctgaggccagagaggctatttttgctgcgctgggggctcgtaatgcttaa

SEQ ID NO: 502945 - DNA, 789 bp, Stenotrophomonas maltophilia
atgccgtattacgccaacggctccttgaaaaagttgatggggcatggcttcttgaccgttcgccagatcgtggtcatctctacacagtttcttagtggcctgcaccacattcactccaagaagttagtgcactttgaccttaagccagacaacatacttatttccgagaggggcgaggccctgttggctgactttggcctagccaagtcgctcggcctgaatggccttgcagagcaagacatggtttacgggaagatggcgccgcccgaagcgtttcaacaggccgcttacgatcagcgatacgacatctatcaggtcggattgattttgttcaggatgtgcgtgggggacgcagagttttactcgcagttcaactcacacattgttaatggcaactttgatagacatgcattcaggcacgctgtcatcaatgggcagtttcccaataccagcaatgatgtctttcctgagcacatacctgactcattgataaaggttattaggaagtgcctgcaagaggtgggcctgcgctacaagtctgcgattgacatcgtgaacgatttggcttcaattgaaggtgagttgttggattggagctattcgcagaacggccttggtaagcgctggataaagaaggtcgacgacatgacttattcgttggacctcgacgaaactaggacgtctgtcgcaaaaaagctcagagatggagggcaggagcgtagaataaccgggtactgtacgaacgctttgaacaggcaatctacaaagcgctttcttcgggagcattga

SEQ ID NO: 502946 - DNA, 852 bp, Stenotrophomonas maltophilia
atgagcatcctgctgcgttatcaagggcccgctgtagacgacggcacgatgaatgtctatgacgctgccgcaaacatggtggcgttctctgactttgtagtagctgctgcccacaaagtttacggtgaggacgtttacgtaaaggcggagattacagcttataaacacgcatcgttcggcacagacttactttttcaagttgttggcgcttcgatggcggttctcccactccttcctgacctcgtctccgtggcgacgacagtcaaggactctatcgaactttttcgctttctaaagggtgaggagccggcaaaggtcgtccataacgatgaccattcgattaacgtcaccaacaacagcggcaacatcatcgtcgtcaacacaccagcattgagtctgactctcgatccaaaggcgggactggcagcgtcacaattcatcggtgaggcactatccaagcccggcgtcaatcagattgagatctcccgcgatggcaaacaaatcgcccaggctacaagagaagatgcgacctacttccatcctatagtcagcgacgacaccgtaaccgagacagttacgcgcctgggccttgtcgttgaaagtctgagtttcaaagacggcaacaagtggaggatgtggaacggtggcgagtcacttctttacgggatggaggatgaagactttagggtgcgcgtcaacaacggtgaagcgttccgaaagggagacatcctcatctgcgaggttctagtcaaacagaccaagatcaacggcacgctcaagcttcagaggaccattctgaaagttcatgaccaccagatgggcccagaacaaccgccgctactggagaagtaa

SEQ ID NO: 502947 - DNA, 282 bp, Stenotrophomonas maltophilia
atggcgaacaatctgattgtgtcgtacgacctgtacagcccaggacaggattactcgaaggttattgaggcaattaaagccctaggctcgtgggcgaagatccataagtctgtctggtacgtcaattccagctacacagcagcccaggctcgcgataaggtctgggcaacgatggatcgcaacgactccatcttcgtggtcgatgccaccaataacgatgcagcctggcagaatctaagcaacgaggtctcgaaccatatcaaggatcagtggttcaaatag

SEQ ID NO: 502948 - DNA, 246 bp, Stenotrophomonas maltophilia
atgaatgagaacctgacggtggccgaggcgctccaccaggccgcgcagattgagggcatgctcgacgcgatcgagggcacctcgcccgatgcggtccaggcgatgggcgggcgcgacgcccttgcccggcgcagcgagatgacctgcatcggcccggtgccgcgcctagacgccgaaacctgggagcgtatgtcgcaggagtacgaggggcgacgcgagcatgtcagcatcaatcgcgggcactaa

SEQ ID NO: 502949 - DNA, 501 bp, Stenotrophomonas maltophilia
atggccaccaagaagttcacccccgaggtgcaggaggtctttctccaggttctggaggacacagcttcgccgaaacaggcggcccaggtgtgcggcatctccaggcgcctcgcgttcgagtacaagcagaacgacctggagttcaggcgccgttggcagcagtccatccagatcgcgatggacgcgctcctcgaggaggcgtaccgccgcgccgtggtcggcgtggacgagccagtcatctaccaaggccaagtctcaacagaacgcgacccacacacaggcgaacagcgcgcgctcacagtgaagaagcacagcgaccgcttgttggaggtgatgctcaagttccactacggcgacgagatggccgaacgcctgcgcgtcaaggtcgaggacacaggcctgtcagcagatgggctgctgcgtatgcctgccactgagcgtgcgcaacttgtcgccctactgggcaaatacaacgcgaacaaggagcaagacgatgaatga

SEQ ID NO: 502950 - DNA, 2229 bp, Stenotrophomonas maltophilia
atggacatgaaagaaaacgcccgcgggcaaggcgggcgcaagggtacgactgaccaggagacggagctgtccaaggctcacggggtcaatgatgtcgcgggaccagccgcgctgaagccgtcatttgcatccatgcaagcctacgccgaagcaggtcactgtctgatcctcctacatcgcggcgacaagcggccgatctcaacaggctggacgcacacccagaccaactctgccgaagtgctggcacaggcagaacgcgaagggctgaacgtgggtgttcgattgcgcccaactgacctcgtcatcgatgccgacccgcgcaactaccctgcaggccgcgacagcctggctgaactcgccagcgacatcggcctgcatttggatgcgtgcccgcatgtaatcacgggcggtggcggccaccactatcacctgtacaaacctgcagacatgcccatccttggcacggtggcaaagtacccaggtgtcgagttcaagacggcaggccagcaggtcgtcgcggcaggttccgtgcaccccaatggcaagcgttatgagcccgaattcttcctggttggcctggatgagacgccacccgcgccagattcgctcctggaactgatccgcaggcccgaactgcaacagggggcagatgcagaactgtggggcgaactcaccccagagatgcttgcctcagccctggaacatctcgaccccagcgacttccgcgaacatgaggaatggctcaacctgatgatggcatgccatcacgccactgctggtgaggggcgcgagcagttcatcgactggagtaccgacgatcccgaatacgcggatcatcgccatatcatcgggcgccgctgggattcactgcattcggcagggcgcgcaggaaagccgatcaccgtgaagtacctgcacaaggtggtgcaggccgcaggtgggacagtgccccattcagccccagaagaggacttcgacattgtgccgttcgagggcgagcagttgcccgcgatgaggcgcactgacgctggcaagatcgtcagcaacttcccgaactgcctgaagctgatgcgccatgtccgcgaccagcttggcttggcgtatgacgagttctgcgggtcaacgcacctcacggcagcagagttgccatggaatgtggacgtaggccgcaggttggatgatgacgtggtgcgccgtatccgccagtacttcgtcgaggctactgatgcaaactggacaaaggaagacgtcttggaggctgcgctcaccattggccgcgaaaataccgtgcatccagtgcgggactatttggatggattgacctgggatggagtgccccgcattgacaagctgttggtgacgtatgcaggtgcgatggacagcgcatacgttcgcgccatcggcgccaagaccttgatcgctggcgtgaggcgcgttcgccagcctggttgcaagttcgacaacgtcattgtcctggaaggaagtcagggcagcggcaagagctcgttcgtcaagctgttgtcgccgcacgttgagtggttctcggactcacccattggcaacacagagtcaaaagatgcacccctgtcattggaggggcgctggatcattgaattgggtgagatgtccgtcctgtccaagtcaggcgtcgaggcactcaaggcgttcgtgtcgagcagcatcgaccatgtccgtcgcccttatggccgcatgcatgaagaattgcggcgtcagtgcatcttcatcggtaccaccaaccaggcgacgtacctgaaggaccagacaggcaacaggcgcttctggcccgtgaaggttggcattatcgacctggatgccttggtggctgatcgcgaccagctctgggcagaagctgctgtcagggaggcagaaggcgagtcactgttcctgccacaggacctgtgggcgatggcagccatcgagcaggaagagcgtgtttccgaagacccatgggctgacatcttgcgcgtctatgttgatcgcaagatcgtctgggttggcgatgaaaattacaaagaagtcgagccgatggatcgtgtgcataccagcatgctgttgaccgatgcgctacagattcccgcaggaagccttcgtcctgagcacacacagcgcctgaaaatcgtgatggagaagtatttgggatgggaacacaagaacaacgtgcgcgttggacatgaagggaagcagggacgcggctacgtgaggccatga

SEQ ID NO: 502951 - DNA, 258 bp, Stenotrophomonas maltophilia
atgaagaaacaccacgagccccagaagctcacgccgcaggtgctagccgagctgcacgcgctgcctgacgaagccgtcgtcaccagcatcgaggctgctgcattcctacgcctgacaccccgcacgctggcctggagccgtacgcagcgccccgaaagccatccgccacacttggtggtcgggtcgcgcacagtccgataccgcatgggcgacctgcgggcccacatgaagcgccgtggcgctgatatggagggctga

SEQ ID NO: 502952 - DNA, 1191 bp, Stenotrophomonas maltophilia
atgaaagctaagatcactcaggcgctcgtcgagcgggcgccgacggtggaacgtggccgcactgtcctgtatgccgaccccgaactgcggggcttctacctgatcgtgtccaacaccaagcgctcctactacacgcaaagcctagtgcgcgggcggcaggtgcgcaccaagatcggggagcaccccgcgctggcagcaaaggatgcgagggcgcttgctgctaagacgctggtcgccatgcgcgcgggcgtcaatccgaccgaagagcgcaggaaggcacgggcgcggggcatgacactacagcaggcgctggacctgcatatcgcggcaaagaagctgtcggcgaagacggtcgagggatatcgttacaactgtggtcagtacctgtccgactggctagacacgccactggccgaactcggtgcggatcgtgctggcgtgcgtgagcgccatgcgcgcatcaccaaaaagaacggcgctactaccgccgacgcggtgttccgcatcttccgtgccgtgtacaaccgcggtctgcgtgagcatcccgacctgcccgccaacccggcgatgaatgtggacttccacggccagaaacgcaggaaggtagacgtcgagacggatcgcctgaaggcgtggggcaaggcagtgctgggcctgtcacgtgtcaggcgagacctcaacctgttcatgatgctgtcggggatgcggcgcacagctgcctgcgagtccaagatggagcacgtcagcgaggaaggtaacgccctacacgttccttcgcccaagggtggtgccgcccgtgccttcgacctgccattgtcatctgcgctgactgacctggtcgcccacagggttgccgccaatcccgagatgaaccgcaggaacccgtggctgtttccttcggacagcaagagtgggcacgtctccgaggtacagcagcccgaactggacggcttgacgggccatgcactccgccatgcctatgcctcactagcattgcaggcaggggtcccactgctggaactgaagttcctgctgaaccacagcgcgtccagtggcggcgtcaccatgggatacctacacccctcgctcgaccacctgcgcgaacaccaggaaaaggcttccacctacatcctggacgcgctggggctggtccacgaccccggctcgtggccgccacggctcaaggaatag

SEQ ID NO: 502953 - DNA, 381 bp, Stenotrophomonas maltophilia
atgctgatgttgatcctcaatgtcgtctacgtgctggtcgctgtggccatgatcgcgctgatcctgatgcagcgtggctcgggtgcggcggcgggttcgggctttggtgccggcgcctcgggcacggtgttcggtgcgcgtggcgcctcgaacttcctgtccaagtcgaccaagtggctggccgtcgtgttcttcggcatcagtctcttcatggcctggtatgccggtcacggcacccgtccggcggccgaccaggacctgggcctgatgtccgccccggcggccagcgcgccggcggctccggcggcgaatgtgccggctcaggcggaatcttcggtttctggtgaagaaaagccttcggaaggctcccagaaacactga

SEQ ID NO: 502954 - DNA, 984 bp, Stenotrophomonas maltophilia
gtgatccgtgcggctcttcttctgattgcactcgcgctgggggcacttgtcccaaatgctgcgtttgcgcagtccactgggtacggcatgtgcggaaccaatgccatatggcagacaggacaggtcccagctggttgcgatcaaggcattgccttctctgaatgcaaggccaaagaagatgaaacggctgcattacttgaacagcgatacggtatgcctagcaaggcggaaaagcttggttgtcctgctgtgggtcagaacccaacgtacttccgctgctttgtcgtgatccgtggcgttgctgacactgagtgcggcaagtactacttcggttctcagtgttcggctcgcccagaggaaaccagctggaagggcggcggaagcaatgggcttgaaagcgtgtgcaataacggttgcgcatacagcggctcgctctacgcacagtcgccaacgggacgcctctttacgcccactggtgctacgtgcacggagaacgatcaccctgcgcccactacgccggatccgggcgaaggtggaggcggtgatggcggcggtggcacaggcccgggtgatggtgacggggatggtgacggggatggcgatggcgactgcaaagacccggacggctgtgcgggacccgggccgggaccggggccgggcgaaggcggcggcagtgacggcggggcgccgggacctacgacggggcgcctctacaagaagtccggcaagacggtccaacaggtgatagcggagttcaagacggccattgaaggggccccgatcttgtcgaaggtcaaaggcttcttcggcagctgtaccggcggtggcagttgtccgaccgcaacgtgggacggtggacagtacgcgggcaagtttgacctggcctcgctgtgctccggcccactgctacagctattccagtacgccggattcgtcttccttgcaggcatgggcatcgttgcgctgaggtgggcactgctatga

SEQ ID NO: 502955 - DNA, 258 bp, Stenotrophomonas maltophilia
atggccgtgtgcgtgtctctgaccgccgaggggacgctggtacccaccggggagcctgcatcgcagtgtggcgggtatgtgcttgtgtcggcggcggaacacgctcaggcctcaatcctcatcgatctattccagtggcctgaaccggaagtggccgctggttggttctcgggggtgttctcgctagtgctcgcactgaacgtgctgggctacatcgtgggcgccgtcgtgaagtcggtcagtacagagcgggattga

SEQ ID NO: 502956 - DNA, 1107 bp, Stenotrophomonas maltophilia
atggtcggtgatcgcgcggtgctggccgggtcgggactcccctcgtctaacaggggagtcagtgaattcaggaacgagacgggcaccctgacggtcggcattgactggttctccgcttccatcgatctgcgcgcagcgcttgacgaactcgcgtttcgtgatggcgacagcttcgaagaggtccgccagtggattgagttctccccggagaatgcgcgcatcgcggccctgcaggtgttctgctggttcttcgccgggcttgggcttgaactggatgaaacagcaagcggcggtcgcttctacacgtggcgtatcaagatcatcgacgcagccaagaagttcgttggaatgatcgaactcggcggcgaagagtgccgccgtgcagatggcacgtataccgcccgcatcgagctaaccggtgatggatgcaaggcgataggcgcagcgcgctgcggccatgcgcagcggtggctggagcttcgagcgaagctcgaaagctgcgccggaaggatcacccgtgttgacgtgtgcgccgatgacctggtgggcgaatacccattgcgtctggctcagaagtggtatgcagctggcgagttcgacaatcgtggtcagcgccccaaagcgcagctggtggacgactacgacagcggtgacggcaagacgctctacatcggcggcaagaagtccgaaaagcagctgcgcgtgtatgagaagggcagggagcagggcgacaagagttcgccgtgggtgcgctacgaggcgcagttccgcaactccaaccgcaaggaactgccgctcgacattctgcgtgatcccgcctcgtacctgctcggcgcctacccggtactgtcctttctgcgttgcgttgccacgcgcatcgaaatcacgaaagccgctgttgaagcgacgtggaagagcgttcgtcgccacatccgccgccagtacggtgcggccctcaatttcatcgccaagaactgccctgacgatcaggcgttgcgggcggtaatcgaatcctgcacttcgccatcgctgccgaagtgggtaacaggtgacacagcagcgcactggcccgaaatcgcggccgtacagccaacctcaaaggggtaa

SEQ ID NO: 502957 - DNA, 228 bp, Stenotrophomonas maltophilia
atgatcgatccgctcattaccttcgtgctgctggcggccatcgtggccgtttccattggtggcgctcgcatcgtttcgtggctgctcgaccggcgtgactacaccgcctcgcagcagtcccgcgaagcccaggtcactgcactcgcacaggctgagattgccgccaccaagcgcggtgatctgctcgctgccgccgagctggccgatgcacaggagcgagtcgcatga

SEQ ID NO: 502958 - DNA, 411 bp, Stenotrophomonas maltophilia
atgaacgcggcggaagtgagcgcggtggccaaggacctgaacgtgtccgagcgcgaagtcatggaaatggagtcgcgcctgtccggccgcgatatcggtttcgacgcgccgaccgacgaggacaacgaacacgcaccgccgtcgccggctgcgttcctggttgccgatgacgaagacccgtcgatggcctacgagcgcgaggacagcgaagacaaccagatgcagctgctgcgcgaaggcctggccgaactggatgcccgctcgcgcgacatcatccgccgtcgctggctggacgccgacagcaaggtgacgctgcaggagctggccgacgagtacggcgtgtccgccgagcgtatccgccaggttgaggcgaacgcgctgaagaagatgaaggcgctgttcaccgcgtaa

SEQ ID NO: 502959 - DNA, 747 bp, Stenotrophomonas maltophilia
atggaggcggttgccggccagcgtgcgcagcccatcctcgtcgaggatctccaccacgttcaggtggggcagggcgatcagcccctgctggcgcagcttggtgaaggtgcggctgaccgtttccatggtcaggcccagatggtcggcgatatcgccgcggcccatcggcagcgacacgcgcaggccgtcgccccccagcttggcctcgcgcgcggccaggcgcagcaggaaatcggccagcttctcggccggctgcaggcgtgccagcgccagcgcagcatcctgtgcggcatccagttcctggcaggcgcgctgcagcagcttgcgctccaggtgcgggaagcggctgcgcagggccttcatctgtggcagcgcgacacggcacacgcggctgtcggcgatggcctcgatgtcgtagcggtggtggtcgctgccgctcaggcccaggtagtcgccgggcagcacgaaaccgttgatctggcgccggccgtcggccagggtgcgcaccaggcgcagtgcgccggcggtcaatgtatagacatggtcgcgctcttcgccggtgcgggccagcgtgctgcccatgctgacctgctgcgagacggtgacctgttccagcgcctgcacttcgtctggcgacagcgccgagcacaccgcaaggtgccgaaccgagcagtgcaggcagtccagcgtggtgcaggacggcgaggcgggatcgttggtggcgggcggagcgccggaaggccgtga

SEQ ID NO: 502960 - DNA, 144 bp, Stenotrophomonas maltophilia
atggcggagcatggaaaaatcgacttggtgcgatctgaattgcagcgctgcgaagccttgctggagagcaagcagcaggccatcgacagtatcaggaaggatagtgttcaacgagagctggatgcctcgaccgcgggtcactag

SEQ ID NO: 502961 - DNA, 174 bp, Stenotrophomonas maltophilia; identical to SEQ ID NO: 497780

SEQ ID NO: 502962 - DNA, 465 bp, Stenotrophomonas maltophilia
atggaaatgaccacggatcggcttgctcaacggcttctggatgccatcgaacaccgcaacccttgggcgcttgaagaagccatcgcggctgtccgcgaggcacgactgaaggcgtggaggggcttgacggctttcccgtccttggaccacccggtggggcccaacggaataacagctttccacgtcgcttgcatggcatggcacgtgaacctggatgacccccgcaagcggcattgctacgacaggatggccggaatgctggccgaagcaggggcggacgtgtttgcggagttcggcccggcaaagcaacgctggacgatcattgaagcactgcatggcgctgcgccaccgtctgtcaaagcatggatggcctctcagccgttcgatctgcattgctctgcgtcaaacaccgcccacaccattcggtgggacagccgtcgtccagtcgcctctctggaagaatag

SEQ ID NO: 502963 - DNA, 597 bp, Stenotrophomonas maltophilia
atgcgactgtgcaacttctcactcaagggtggcgtcggccgcacgacgctggccctgaatctagccgggtgctatgcccgtgaccccagcctgcgtgtgctggtcaatgaccgggacccccaaggcggggcctgcgcgtttgcctcactgtcggacgaaacaccgttcagtgtcgggcgctcgcgctccccgggcttcgacgtggagatcaccgacaccccgccgcgtctgccggacaacgaggtgattcccgaggcggacctctacctggtgccaacgttgctcgacggggccagcttcctcatcttcctgcgaaccgtggatgttcttgaaaagaagggaaagcgttacctgcccatcgccaaccgggccaacgagaagcgggcagcccatcgccgccgcctagagcaccccaagatgtcgggcgccatgctggtgcgggatcgtgcgttgtttgcggactgctacgaggagggaaagaccgtgttcgacgccaacggccgctgggcccgggtggcccaggaggagatccacgccttggcggtccgggtgcgcgacatcctggctgctggtgcaggccggagggctgcggcatga

SEQ ID NO: 502964 - DNA, 624 bp, Stenotrophomonas maltophilia
atgatggagcttcccttggtttccctcccagatccactcatggccactcgcaaagctcctgccaagaaggctgccaccaagaaggccgcggcgaagaaggcggccaagcgcacgttggacgacgtcaaggacgtgacccatgccaagccccgccgggccagcaaagcagacagcctgcctgttgcccacatcccggagcatttgttgctggggccgggcgactacccggagcgcaagtcctactttgactacgacgacagccagaaggcgggcagcgtcggaggaaagcgggttcacatggtcatgccccgatcggtcaccctccatgactaccgccgtcgggaggacgggctgcgccaccaccgggccatggtgaccatcccgccaaaactccgcgagaacatcgccaagctgtttggcttcgacgattcggaaggcgccggcagtgaagtcgcgttgacgaccgccatggtggcgttggccgactacgccgcggcgtcgctcatccaggataagacgctgttgatcgtgagctcgcccgaggacgaacacgcggaggaccgcaaggccgccagggtggcggtgcggaatctggggatgagcaagaacggaaagatctactga

SEQ ID NO: 502965 - DNA, 2835 bp, Stenotrophomonas maltophilia
atgatcaactgcacgcgaatcgacgcccgcggccacaacaagcgcaacggcaacatgttcgactacatgctggccaccgagcgcctgtccatcgacagcgccgtggcttactacgcgggcagcggtcctgatccgcggcagacgctcaattggggcggcagccttgccgccgaactcggcctggaagggcagccggttacccgcgaggtgatggaaaagctggggaagggcttttcacccaccggaaggccgttgtgcaaaaacgcgggcaaggaggcccgattggtcatcaagacggatcgctggggaaacgtgcggttggacgacgacggcaagccgatggagaagtgggagggcggccaccgggtggggttcgatctgaccatttccgcccccggggacgtgagcgtggcgttcgcgctggcggatgatcgcgagaagctggccatcctggaggcccaccgccaggcctgcgccgtggcgatgcgctacatcgagagcaaggtagagacccggcgcggaagagcggggaaagacgttatagacacccagggattggtgtgggcagccgccgaccacgtcagcaaccggaacgtgcagtgcgacctgcacacccatcacctggccttcgggatctccaagggggaggatggccagtggggcacgttcgatgccatcgagatctaccgccaccgccacgccgcggatcacctttacaaagtggagctctacgccgcgatgaaagcgctgggctatgggattcagcgggagcgcgaggtggacgtgatggggcgcgagacgggccagattctcaccacgattgccggcatcgaccgtgagctggtgcttcagacgaagacccgccgccaggaaatcctggactacgtcaaagaacaccccaacgtcagccacgacgaggcctgcaaggccacgcgcaaaaagaaggaagaaccgccgttcgagcaggtggtcaaggactggcagcaaaccttcgccaacatttcccgagaaaggccagacctggttcccaccacccagtcgctcaagcagaccaaaggccagcacctggacccgcatacgtttgacgaggtcttgcagcgcatgcacgagaacgaggcgatgttctgcgagcatgacctggtccgggagctggggatggagttcgccgggcaaaagaacgcggaggagatcctcagaatggtgaaggagttcactaaacaggatgacctggtgcgcgtgaaagccgaacaccttcacaaagacgaccgcggcacaacgttggcgcgcaagcaccgggaggatcgcttctgcgccacctggatggtcgaatgggaggccgagatcatccgtcgctcgaaggagcgggagaacgagacggacctgaagctgttccgctccaccgtagaccgggaaatcgccgcctatgagaagcgaaaggggttcaccctcacagaggagcagaaagccgccatcgatcacctcacccacggcacggccggcgtgggggtcatgtcggggttggctggcaccggcaagaccaccgtggccgaggtctacaagcagtgcttcgaagccgaaggaaagcagttgatgggcttggccgtgtcgggtaaagccgcggctaagctggaagaagagtccggcatgccctgcatgtcggttgcaaagttcttttcccagctccggcagggcaaggtggcgctgacgaagagggatgtggtggtgctcgacgaggccgggatgattgcaacgggcgacaccttgaagctgatgacctactgccagggggtgggcgccaagctgatcctgcaaggagacagtgaccagcttcagcccatcgctgcggggaatggctttgagctggcgaagatggccctgggcgacacgaagctgaccgagattcgccggcagaagaacgccggtgacctgatcaccgccaacagcttctacgagcgggaccaccaggggaaggtcaaggacatgcgccgcgggcaccgcagccgccaaggcacctttgatatgggcacagaaatcctgaacaacctcaagcaacgcaactgcatcgacgacttcggaacggaaagacaggccatcaaggcgttggtggacgattacctgaaagacaaaacgccgatggacgagaagctggtcttggcccacacgcgctctgaagtcaaagcgctcaccacgggcatccggaaggggctccaggagcaaggcgtgctggacagagaggaattcaccttccgctcgatcgtgaaagggcagtgggaggacctgacgctctcacgccgcgaccgtgtgatgttcacggcgaccaacaacgacttgggtgtcatcaacggcaccgagggcacggtggagagcattcggaaggacaagtccggtggctacgacctggtggtgcgcatcgactcctcgaacccgaaagaggacgggcgcattttggagttcaacaccagcgagcacaacgccttggcccaccggtatgcaatgaccgtccacaaggcgcaagggcaggggaaatccgaggtttaccacttggccacgaacatgggcatgctcgaccagcagtcggccttggtggcgttcacccgcctcaccaagggcagctaccgcatgtatacgacggacgacgtgatggagcgcatggccgaacggctgggaaccgaacggcacaaggaaatggcgctgagcgtgggactgtccagcaagcaggcggacccggtgcgcaacctggtccaagaagtggaagcgctgctggccgggttgaaatccgaaaccgaggtgccaatctcgaacgcggaacggcgcgagatgaggcttacccggtga

SEQ ID NO: 502966 - DNA, 285 bp, Stenotrophomonas maltophilia
gtggtcgcaaccctgctgacaactgcgacagtcctggccatagctatcgactggatttcaaacaccaagagtatttacgacaccaaatgcaaccacaacacagaaaaggaaaagaacgtgaagaaaatctatacagagaatcgcagcaccactatcaatagcaatagcaaaaacaataccaagaaaagcacctcaaaatgcttaaaggtcctcagcagggtcctgaaggcgatgtatgacgcgaccaccgagatctgcgcaagagcgatcctcacctcacactga

SEQ ID NO: 502967 - DNA, 339 bp, Stenotrophomonas maltophilia
atgaggaagcggtccaccggattgcttcccttttcggcggagagtgagggcgagcgggtcatctgccctgatcgcgcaggttcggaggggatcgagattgacgctcccaagggcggcaaaaacggctggatccgttgcaccgcaaggggtatgctcgtggcgggcacattccagggcacctcccagattggtgaaacccaagccgcccaaggggggagggcacttctcaaggaagtcccactctctccgccaagaagttcagaagagcccctggaagcaggggcgtttctgtttctacggcccttgctggccagccatccggcaaccaaggtcaggtga

SEQ ID NO: 502968 - DNA, 2139 bp, Stenotrophomonas maltophilia; identical to SEQ ID NO: 495144

SEQ ID NO: 502969 - DNA, 486 bp, Stenotrophomonas maltophilia
atgctgcgcaggacgacgtgcacccgggccacggcatggctgttgatgctgttgtgcctgttgccgatggtggtgatggccggtgctgcggtccctgcgctggatgacccggtggtggacgccgccaacgcactttcggcggatacccgcgacatactgcgcacgcaggccttcaagttgcaggcacgcaccggcgcgcagctgcaggtgctggtggtcgaccatgctggcgacgagggcatcgaggcctacgcacagcgggtgttcgaccagtggcagctgggccgcgaaggcgttgacgatggcgtgctgctgctcgtggccgtgcaggaccgccgggtacgcatccagaccggttacggtctggagggcgcgattccagatgcctatgccgcccgcatcatcgacaaggcgatcgtgccgcgtttccgcgatggcgaccttgaccagggcctgctggatggacgaaggtcgtggtcgcgctga

SEQ ID NO: 502970 - DNA, 507 bp, Stenotrophomonas maltophilia; identical to SEQ ID NO: 493408

SEQ ID NO: 502971 - DNA, 1038 bp, Stenotrophomonas maltophilia; identical to SEQ ID NO: 494990

SEQ ID NO: 502972 - DNA, 306 bp, Stenotrophomonas maltophilia
atgacctgcggtggcggcggcggagggggttccggagcgggtggcggcaccggccagggagcgttgatcatcttcgcgcaggtggcggtgaccgctgcgttgctgaccatgcctgcaccctgctggcgcgcgacggcgttgtgcatggcggtgcccagcgtctccagcatcaccatgtccagcatgctgaaggactgcgccggaccctgggccaccagcaacgtcgaggcggcgctgacgctgtcgacgatctggctgttgacggtgttctcactgctcatgacggaacggctcccttctggatga

SEQ ID NO: 502973 - DNA, 816 bp, Stenotrophomonas maltophilia; identical to SEQ ID NO: 494114

SEQ ID NO: 502974 - DNA, 1419 bp, Stenotrophomonas maltophilia; identical to SEQ ID NO: 496665

SEQ ID NO: 502975 - DNA, 912 bp, Stenotrophomonas maltophilia
atgattttcatcatgaatggaacctcgatggacctcaatgcagtgcgcatgctggtgcaggtagccgaagcccgcagtttcaccgtcgccgccgggcagctgggcctgagccagtccggcctgtcgcgcgcgatcggccggctggaggccacgctgggggtgaagctgctgcagcggaacacccgcaacgtggcgctgaccccggatggccgccagttcgtcgatcaggtggcaccgctgctgtgtggcctggaggatgccgaacgccagttggccgaccgtccctgcacgcccgcgggcaccctgaagatcagcgcgccctcgatgttcgggcgcaaggtgctggtaccgctgctggcgccgttgctgcaacagcacccgcaactgcaggtggaggccgtgctcagtgaccgtctggtcgatctggtcgaggaaggtttcgatgccgccctgcgcaccggcgtcatcgccgaccagcgcatcgtcgcgcgcccgctgcgtccgctgcgctgggtgacggtggccagccccgcgtatctggcccgctgtggcgcaccggacgatgtggccgcgctgcgggaccacgcgtgcctggcggtgcgcaacctgcgcagtggccggctggtggactggcagttcctgcaggagggccacctgcgcgacttcaccccaccgacgcggatggtgttcgacagcggcgatccgctggtggaagcggccatcgccggcatcggcatcgtgcaggtgatggatttcgcggtggccgacgcgctggctgacggccgcctgcaacgcgtgctgcagccgttcgagggccgcagccgcgcgctgtcgctgatctacccaccgtcgcgccagcactcgccgaagctgcaggtgctggccgacgcgttgctggccggggattggtaa

SEQ ID NO: 502976 - DNA, 1188 bp, Stenotrophomonas maltophilia; identical to SEQ ID NO: 496906

SEQ ID NO: 502977 - DNA, 657 bp, Stenotrophomonas maltophilia
atggtggaagagcccgtcccgttgacggtgcacggcatgtcggtgtcaggcaattgccacaaggtccgcctgctgctggagcagctcggcagccgctaccgctgggtggaagtggacagtgcccacggccagacccacacccccgagttcctcgcgctcaatcccaatgccaaggtgccgttgatcgtccgcgacgatggccgcgtgctgaccgagtccaatgcgatccttttctggctggccgaaggcacgccctacctgcccaccgatggctgggagcgcgcgcaggcactgagctggatgttcttcgagcagtacacgcacgagccgtgcgtagcggtcgcgcgcttcatccgcggctggaccccgcctgggtcgccgcgccgcgccgaactgccacgcctgcacgagcgcgccgccgctgcactggcggtgatggagcagcacctgcgtgatgcgcaatggttcaccggcagtgggtacggcatcgccgacatcgcgctgttcgcctacaccgacgtcgcaggcgagggtggaatcagcctgcagccgttcccggaagttcgcgcctggttgcagcgcgtgcgcgggcagccgcgcttcctgccgatgccggcggtgaccgccgaggtgcgcgcccgcttcgaggccgcatga

SEQ ID NO: 502978 - DNA, 234 bp, Stenotrophomonas maltophilia
atgcagctggtagtgccgggttgccgccactgttcgcgcgactggccccagatctgcatgggcttgccgttgtatggcgccggcaactcccccatgcgcagcagggtgctgccgagcttgcgtgccacggcccgcgagttgtcgttgtcctcggcgatggtatggatcacctcagcccagcccagcgtatcgaacgcccagtcgatcgccgcgaccgccgcctccggcgcatag

SEQ ID NO: 502979 - DNA, 228 bp, Stenotrophomonas maltophilia
atgccccaaccgacctcggtacccggccagtcctgcggctgccacggtcccatccgcccgatccagtcgccgctggatttctcgatcacgctgaacatcgagaagccgaacagctgccaggcgccggccaggctgcagaaaccgcgccaggccaccgagggtggctgcacgccgcccagggtacgcatcgtggcctcgtcggcgcagaacgccaggtacggctcgtag

SEQ ID NO: 502980 - DNA, 1323 bp, Stenotrophomonas maltophilia
atgcgcgtcgcgctttccgtgttgctgctggcttcggcgctgagcgcctgcaccccggccccggtgtccaccgccagctccgccgaggcgcccgcgccggcgtccgccatcgcctggcgccagggcgatgtggacgatgccttcgccgaggccgccgacagcggaaagccggtgctgctgtactggggcgcggtctggtgcccgccgtgcaaccagctcaaggccggcctgttcaaggacccggcgttcatcgcgttgaccggcaagttcgtgccggtctacctggatggcgacgaggaaggggcacaggcctggggcgaacgcttcggggtgcgcggctatccgaccctgatcgtgctggacccacaacgcaatgagctcacccgcgtggcaggcggcaacgacgcggccgaactgacccgtgcgctgaccgtcgcggccgggcgccgcagcgccatcgccgccaccctggcgacggcactggccacgccggacaggctggccgccgaagactggcaggtgctgggcgattacggctgggaagtcgacgccaaccgcttggccggcgagcgcaagagccaggatgtgctgcgccagctgtccaaggccgcacccgacgcggcgctgcaacgccgcttcgccctgctggccctggccaccgccgacacgcccgccagctcgcccaccgaggtgcgtgagctgctgcaggcagtgctggcgcaacctgccgaagtccgtcgtaaccgcgaactgctgggctacgcgggcgcgacgctggtcaagcaggccagcgccggccccgatgccgccgccaccgatgcgcatgcacgccaggccacgatcagcagcgcggtctacgcactgcgccaggtcggcgacgacgcgggcgccgaggcgctgttgctggccgagctgaaacgcagcgaacagccgtactactacatgcccgagctggccgaactggccgagcagcgcggcgacaccgccggtgcgctggagtggctgaagcgcgcctacgatggcgcgcagggcccggccacccgcgtacagtggggcgtgctgtacgtggagggcctgatgaagttggcgccggatgatgcaccacgcatcgagcaggccaccgcctcgctgatcgccgaactggaagcgcagccgtcgggctaccaccagcgtacccgccagcgtttcgagcgcctggccgggcagttgaagacgtggagcggcaagcaccagggcgccgaaacactggcgcggctgcagcagcggatgcagcaggcgtgcggggaacaggttgatggtgcgtgcaaggattggttgagttga

SEQ ID NO: 502981 - DNA, 720 bp, Stenotrophomonas maltophilia
atggacgtacttgcagcgtcccctgcacggcccacccgccacacccaacacatgacccgctccacgcgaccaacccacgaggggctgcgccgttggctggaaactacgccagcgcgcgaacaccaacgccaggatcgccggcaccgcctggatcatgaaaatacggcggctcacgctgtacgcgccgtagcaccccgccaccaccacgcaggccagcgagaacgtcaccagcaccggctgatcgatcaccagccccaccacgatgcctgccgccaggaagccgttgtacaggccctggttggccgccagcacgcgcgtggccccggccttctccggcgtgttgcggaaggtcttcaggcccagcgggcgggtccacaggaacatctccaggaccaggaaatagatgtgcagcagtgcgaccagcaaggtcagggcgagtgcgatccagtacatgtgcggttccttggacagggaaggagaatggggtcagcgccctatccgcgggaaaaggctctgaccccggcaaatcaacggtcgcgcggcagcttcttttcttcgcgcagcacgccgaatgcagccagggtcatgaagccggccaccagcacgccgccgatgaacaccacgtgcgaaccgaacagggtcagtgccttgtggatccaggtgaaccccaggtccgcgccgcggtacaccacggtgtcgatcgccgcgccggccttgtag

SEQ ID NO: 502982 - DNA, 624 bp, Stenotrophomonas maltophilia
atgcaccctgggttgctcctcccagcacctcccctggcaacgatgcccgtttctgcaggatctgcagcgccctcgcaatcgtcctgtcctcacgtacccggatcctgctctcctcctcattggatccggcccctaatgtggtcatgtgataggcctgcgcttccatcaggccaccaacttcatcacttcatcccacgcgcgctgcttgagctgagctccagcaccgaaccatgccgcatcacggcggtgatcatcgctacgggctcgtcgatggtggtcaacgtactccgtgacgctgttgagtacgccccaggccgttgcacggctggaaggcaaaaacgcgcctttaccgccgccctcatacagggcacggacactggccagcgcctgctcgttgacgacctcagcggtgctgccctggccttggtaggtaagcacccgtcgcaacagaccatcgaccgtatcggggtcaactggacggtcgcagagggctttcatgcgagccacgaagctgtcccatgtcgagacggtgatccccaactgccgcttcacggcatccgggtcgaactgactgcggtgcgggaccttgatggctccgctgctgtctcccagagcgatctgtaa

SEQ ID NO: 502983 - DNA, 489 bp, Stenotrophomonas maltophilia; identical to SEQ ID NO: 496955

SEQ ID NO: 502984 - DNA, 1506 bp, Stenotrophomonas maltophilia; identical to SEQ ID NO: 495822

SEQ ID NO: 502985 - DNA, 369 bp, Stenotrophomonas maltophilia; identical to SEQ ID NO: 496057

SEQ ID NO: 502986 - DNA, 1035 bp, Stenotrophomonas maltophilia
ttggactccaattcgccgtgctactcaaaaccggggggacgtcgggtccaggccgccgccgcctcggccaacaccacccgcagctatgccagtgccctgcgctactgggctggctggttccagggacgctacggggagtcgttggcactgccggtgccggaggcggcggtgatccagttcatcgtcgaccatctgccccgccgcactcacactggtcaggcctgggaactgccagcggagctggatgcgctgctggtgaccagtggcctcaagaaacgtccgggaccgtggtcgctggctaccgtggtgcaccgcgtcgccgtgctatccacggcgcaccggttgcgtcaggtcgtctccaacccagccgaatcccccgccgtgcgccaccttttggctcgtagccggcgcgcggcggtcaaacaaggcgtgcggcctcgcaagaagaccgcactgtcccgcgccgagctcgaggccctgctcgcgacctgcgaccagtcgctggaaggcctacgcgatcgtgccctgctctgctttggctttgcttccggcgggcgccggcgcagcgagatcgctgccgccgacttggctgatctcagggcgctgcctgagggtggttacgtctactggttgggccacagtaagacgcagcaggccggcccgaccgccggctcgagcccggacaagcctgtgctgggggcggccgcgcaggcactgtctgcctggttgcatgccgcggcctttaccgaggggccgatcttccgccgcctctggggcccgcgcgtggggccagggctcagcgacaaggccgtggcgacgatcattcagcggcgtgcacgcatggccgggctggagggagatttcggcggccatagtctgcgctcggggttcgtcaccgaaggcgctcgccaaggcattgccctgcccgctctgatggccatgactgaacaccgggccgtgtccagtgtgatcgggtactaccaagccggcgaggcaagccagaatcccgccgcccggctattagatgttctatag

SEQ ID NO: 502987 - DNA, 561 bp, Stenotrophomonas maltophilia
atggataactacggcaacaaactcgtctttgttggcggcatgggagcaggcaagaccacggccatccgtgcgatatcggacattgaaccggtcagcactgacatgccgttaagtatcgatgccacagaagagaagtctttgaccacggtggcgttggactacagcagcgtggacttggacgatggcgaactcctgcatgtctacggagttcctggtcagaagtatctgaattttatgtggccaatggtttgtacgggtgcaatcggaatcatcgttctggttaatgcatgtcaaggtgatgccgttgacagcacatcagagctgttgaaggatttcggcgtgctcgccccggaggcgagtttcgttgtgggcgtgacgaaaagtgatttggcgccaagcttccaactcactacattccgtgacgcacttaacgccggtgggttccgaatgccggtgatgaaagtcgatgcgcgcgttacgactcaggtcgagtttttgatcaagaccctactttcttaccaacatgcgggatcgcagttaagccaagggcatacagtctga

SEQ ID NO: 502988 - DNA, 975 bp, Stenotrophomonas maltophilia
atgttctcccccacatcttacgatttcaccgtcgcgatggccggtttggagttattgccagccacacgccttaagttggcgtgttcgttgctcgcggccgagcgcctcaccgtacgcctagttgagtggggtgcagagcccgccgcactgttggtagcagacgagacaagccatgctggccgccatgcgatccaatccgcaaggcaggacaacgtgccttcaattcgcttgcatggggcgccggttgcctctggcaccacgcaggctctaccgaggctggcgacagttcgagagttcgtggatgtactgaagtccagtcttaagagcagtccatccagggcgatgagtcagccatcggcatgggatgtgccacttgttcagcctatgctggagcacatgcgtcttgatcgccgtagagagaagcgcacgctactagaacttggcctttttcgactggtcagcgatacccgcaatggacaagtgcatatgctgcgacggatgccgttgaatgagctcctagggtgtgccgtaaagtccgattggcgtgtgagggaactaacagaagacgaatggaagtccgtctacctgcctgatgtcacgcgcagctacgagacagagaccttgtggtggcgcctattgccttatctttcaaacgaagacctgcctctcgtcactgatgagcttcgcttgcggacgtggccagacctggacgtcggcgccacgccggcctcatgggccttggcgctcgcttacctcgatggccaatcttggcgcgccggttctctggcttcggtggcgaacgagagcgttgacgaagtgcagaggatcatggcgctcgttcgcctaagcggcttggaagcatctctatctgatccgggagcaagtgtgcgcgccgttgcctcgcgccacgccgaaactttgttgcgaatggcaaagcgttttggtctgaaactttttgggaaagctcatggataa

SEQ ID NO: 502989 - DNA, 360 bp, Stenotrophomonas maltophilia
atgtcgaagttgaaccttgacggtctcggccagatcacaggctttgtgggcgttgcccttgttgacagcgatagcgggatggcgatggccacgctcggcggtggcaacctgaatctggaagtagcagctgctggtaacagcgatgttgtgcgcagcaagcgtcgtgttgccgagcagttggcactggacgataccatcgaagatatcctgatctcgctgagcaagcagtaccacattattcgcccgctggagagcaatccgacattgttcctctacgtggtgcttgaccgtgcgcgggcaaacctggccatggcgcgtcacgagctgaaaagcttcgagaaaaagctggatttcagctga

SEQ ID NO: 502990 - DNA, 2076 bp, Stenotrophomonas maltophilia
atgtctggaacttacaatgatattctggttctactttcgcttcttgtagcaattctcgcttcctacactgcattggacatggcaggccgggtggctgcaactaagggcgtcgcgtcgcgctggtggttgatcggcggctcccttgcgatgggcctaggcatttggtcgatgcatttcgtcgggatgttggcgttcgacttaccgataccgctcggttacgaccttgccattacactttattcgatgattgccgcgatcggcgcgtcggttttcgcgctctggctggtctccaggcccaagctcccggttagcaggctgatgcttggcgcgatccttatggggctcggcatcgcgatgatgcactacctgggcacggctgcgcttcagatgcagcccggaatagagtacgaccccacttggttcgtcttgtccattttgatcgcaatcgcagcgtcaggcaccgcgctatggattgcctttcgtcttagagcaggtgcgcgcggacaataccgttggcgctttgttgcggccgtgatcatggggcttgcgatcgtaggcatgcactacactggcatggctgctgcgcggttcttgccgggcagctggtgcggtgcagcgcgtgatggtggtgtgccagcacattggctggcagtcttggtagttgtcactacggtcgcgattatgggagttgcattgatcgtatcggtgctggatcgccaaatgcatctaagaacgcgccatctttccaggtcgttggcgcgtgcacacgatcaactcgtgcaggccgctctacatgatccgctgacaaggcttcccaatcgcgttctccttcaggatcgacttaaacagtctattgagaaggcacagcgaaaacgcgaacagtttgctgtcatgtttcttgatttggacggattcaagagcataaacgacgcctatggtcaccaagccggcgatgcccttctcctgagcgtcgctgaacggatccgcgaattgcttcgaagccaagacactttttcgcgcatgggcggcgatgagttcgtcttgatcgtgcccaccagtgattctcaggatgctgctgttgtagctcagaggataatcgacacagtagccctctctattagtatcgagtctgctgaagtgcatgtcacagctagcattggcgtggctatgtatccttccgacggagccactgagcgagagctagtggcacatgccgacgcagcgatgtaccacactaagaacaatggcaggaacggatatacgttctattcgccttccatgaacgtcagcgctcatcaacagcttgagcttttgagcgacctacgaagggccatagatcgtaaagaacttgttctacattaccagccaaaattcgccggcccagattgctcgttggttggcttggaagcacttgtccgttggtgtcatccagagcatggtctcttgcagccaagtgaatttattccagtcgcggagcgcagcgggttgattctggcactgggcgactgggtcctgaatgaggcttgtcggcaaacaagggaatggaagaacgatggataccaggttccgagtgtggcgatcaatctatcgccgcttcagttctcttcagccgcccttatcgatacggtaaggatggcattagaaagcaataatcttggccctggtttgcttacgctcgagattacagagacgacggccatgcgcgatgccgacgcaactttgagggtcttggacgaacttacggcaatgggtgtacagattgctatcgatgatttcggtaccggctattcaagcctcctgtatctgaagcgattgcctgcaacagagctaaaaatcgatcgcgccttcatcaccgatctggaatcgaactctgaagatgctgccatcgttgcctcaatagttgcgttggggcgagcgctgaatctacgtgttgttgcagagggtgtagaaacccaagggcagcgcgaacatctcaaacagctgggctgcgatgtgtatcaaggttacttattgtcgcgccccctagagccgaatcaactaacgcatctgtttgcaaacgttcgctcaaagggctga

SEQ ID NO: 502991 - DNA, 1968 bp, Stenotrophomonas maltophilia
atgcgctcattcttaaagcaggcacgggcccgaagccgttttcttgtcgggtgccaggatgagcgttctcaaattactgccgtcaatcgcgtgatggccgtcatcgagtttgatctggagggcagagtcctgcacgccaaccagaacttcttgaacatcatgggctacagtcttgatgagctcaaaggacagcatcacagcatgtttgtgccgccatcagaacgtatcgatggcgactaccggacattctgggacagtctccgagccgggaacttcgaagctcgtcgttttcgccgcgttggaaaaggcggacgagaagtgtggttaaacgcttcatataacccgcttctggacaaagctggaaagccatacaaagtcgtcaagtacgcgactgacatcaccgatcagatgcatcgaacgagtgagtacgaagggcgcattgatgctatcgacaaagttatggcttcaattgagttctcgctggaggggactatcctgagcgccaatcagaattttctaaatacgatgggttatcgattggatgagatccagggcaggcatcacagcatctttgtcgatctcaacaccaagaattctgaggggtacgctgaattctggcggaaactcagtcaaggaaggtttgatgccggtcgctacaaacgagtggcaaaagggaatcgggatgtctggatacaggcttcgtacaatcctgtactagattcttcaggcttgccgtacaaggtgattaagtacgctaccgacattacagaacaggtgacgatctctgcggatgcagaggggcgcataaaggcaatcggaaaagtcatgtcagtcatcgaattctcgatgagcggactgatactcgatgccaacgagaacttcttggctgcgatgggctatcggctagacgaggttcgcggaaagcatcacagcatttttgtggatgcagactatgggcgctcggaagaatatcgaaatttctggggaaagctagggcgtggtgaatacgatgttggtcggtacaggcgcctcggaaagctcggtcaggaaatatggatccaagcttcctacaatccgatttttgacgcttccggacatccatttaaggtagttaagtatgcaacggacgtgacagagcaagtccgctccgcccacgaaatgcgtcaactggtgattcaagccacggatatcgcacagaacgtgcgtaccgctgctcgtggcatcgctgctagcaaccatgatctggcaggacgctctatgtctcaatctgagtttgtccgccagacttcagagtcgattgaaggattagcccacaatgtgcgcgccaactcccaacatgctgacgatgcccgccaggtagccaagagctctgcggatgccgctaagcgtggagtcgcagtgatctcggaagtcgttacgacttcagaagagattagggcagccaacgagcgcatggcgcaaataatcggagtcattgacggcatctcgttccaaaccaatattcttgcgttaaatgcagccgtggaagcggctcgcgcaggagagcaagggcgaggatttgccgtggtggcgcaggaagtcagaagcctggcgcaacgctgcagcgtttctgctaaggaaatacgcgacctgattggaagcgctagagatcaagtgactgatggaacgcgcttgatcatgcaagccggcaatgtcatgcaagaagttctcggcgctgttctcaaagtaacggcaaccgtcgaacagattgcgggcgcgagtcagcagcagagtgaaggcgttcagagcgccaaccaagcattgcaagcaatcaacaagcgcgttcaacaggacacgcgtctgatcgatgggatttcttgctctgcccgggcattagaggcgcaggctgaggcgcttttcagtatggtcgcgagcagtggaggggcatcgaacagtgactcttctaacatcgcttcttctgctgcctag

SEQ ID NO: 502992 - DNA, 681 bp, Stenotrophomonas maltophilia
atgcgcggagccgacggtgccggtgaccgcatcgccgccgatgttgcgcgccttgacgtcgccggagccgagcgacagcaggttcagcgagccgccaccgtcgatgtccaggtcacccgaacccaccgctgcgtggatgctgccgcgggtgccgcgaacgatcgcgtcgcccgagccgacgtccacgctcagcgattgggcgttgtccacgctggcatcgccggagccgaccttgagctgcaggggcaggttgtcgggcacgctgccgcggatgtccagccaggcatagctgttgcccaggctgatgccgctgtggcggccgtcgcggcgcaggctgacgaccagcttgtcgccttccctgcgctgctccagtaccagctggtccagccattcctggctggaggcgcaggcgcggccatcgagctggccaccgcccttgctggcgacgaccttcaggtcatgctggttcacctccagcaccaccgccttggcgccggccacatccagcttcagcgtgcgggcggcggtgaacttgcagttcggagcatcggcggccagcgccgacagaggcaacagcaacaacgcagaacaggcgagcagggaacgcatgggtggtgcctccgggtggatggaatcagatctcgccggcgcgcttgcgcaggcggatggcgaggacgatga

SEQ ID NO: 502993 - DNA, 405 bp, Stenotrophomonas maltophilia; identical to SEQ ID NO: 496658

SEQ ID NO: 502994 - DNA, 408 bp, Stenotrophomonas maltophilia; identical to SEQ ID NO: 496024

SEQ ID NO: 502995 - DNA, 2082 bp, Stenotrophomonas maltophilia; identical to SEQ ID NO: 496025

SEQ ID NO: 502996 - DNA, 1521 bp, Stenotrophomonas maltophilia; identical to SEQ ID NO: 496026

SEQ ID NO: 502997 - DNA, 777 bp, Stenotrophomonas maltophilia; identical to SEQ ID NO: 496027

SEQ ID NO: 502998 - DNA, 1374 bp, Stenotrophomonas maltophilia; identical to SEQ ID NO: 496028

SEQ ID NO: 502999 - DNA, 429 bp, Stenotrophomonas maltophilia
atgtacaggccggtggccagcgcgaccagcagcatgcctgcacagaacatcgccagctgccagcccacgccgatggccggtggcagcagccacaacccgaactgtgcggagggaccgatcagcatcacgttgagcaccgtgccgacgcccggcttctggcgcagtggccaccacagcaacagcaccagtgcgccgatgacattggtcgccagcccgaaggacagcggcgtctgtgcggcgatgccctgcgacagcacgtcccagggcgccacgccgatggcggcacggatcatcagcgaggcaccgaagccatacaggaacaggccggtgatcagttgcagcaggcgcaggggcagggcggtaggcatggtgggctcgggggagaggatatctgtttccaccgtatccctgatttccttgaggccatag

SEQ ID NO: 503000 - DNA, 1140 bp, Stenotrophomonas maltophilia
atgctcttcgcactccacatcgaagttgctcacaaactcgttggcatggcccccgcagcgttcttcgaatacgcgacggggctgagccacatgaactatcgacgaggccgcggctatacagctctcatggccaagcgtgagcaagtcgaagcgcattcggattcactactcctgcgcatgctccagaaacgaggcatcccagacgccgaatttcgaggattcaaagaggatatcccccaaggacattcggcgatcatgctctatgggctaggtttgctcaacgagcacacgtccccagcaaccagagaactggtcgccatgttcgatgcgtcagacaaacgactttgtaagctttcagacactgacgtatacggctttctcgacgagatcgggccacggtcccaactggggccagcctactgcacccccctgacggtggcagacattagagatccctcgctggagctgaagctggaactgaccgaaccggagcgcaccgccatcaatcttgccctaaaccgccgtgccaacatggcgctgtcattcttggcagccgtagatcacgaaattgggcattggattggacggaccggggtaccagatgcctttgcaggcctcccaagatttgccgtgctgctggcaccacctgggcctactaatcggcaccgccataccccggctgaccctaccgcgcgcctcgtagatttcatcggcgccgtcggccactacttgcgagagggcagctggcctcagcgcccgctccctatcgcggacatgggcacccaggcagatctatcagggacacggcttggcgagggcaatcggttcgttcgcggcttgagaagtggcaaggcccggctaactcgaaagtcattcagaacactggtccacacccaactctggacccccaaagcgaaggcgtctgatctcgatggccaagcggacctgcttgaaacctacctggtggccgcactcttgttgagcctgctcctgccagaccacccaaccaccgcgggccacatggaccgcacgggctggcgggaggcatatctgggatggtgggagcggcatagacaccgctacccaccccaggccccgtcgacaggcccactgcccccagcttggctgatcgatccgtaa

SEQ ID NO: 503001 - DNA, 2223 bp, Stenotrophomonas maltophilia
atgatccgaacaatcacaatccatcgtcacaagagctttcatcccaccaacgcgcattcggtccagatcccgaacaaacctgcgacttacgtctacggtctcaacggagcaggaaagtcttctatcggtgaagtggtcgacgggctggcacgcaacgatcccgcctttgcgcactgcaggatcgagacaaccgacaatgcgcgctaccgatacttggtctacaaccaccactacgttgaacgcctgatcggccagcccatccagggcatcttcactgtcggcgaagtcgacactgtccgccagcaacgtatccaggacatcgagacccgaaacggcgagttggacgttctgatcgccgacgccaccacaagtgtcaaggcagccgaaagcaaccttgccatggagctggtgcgggccaaagacgagatctggaaggcccacgactggggcaagaagacggcactggcttccttgcttgagggctacggccggaacaaggaaaaattcttcaccgacctgcgcacacatgccctgcccgagaatgggcagctggacacgatcgagcgacttgaaaggcgctgggccgatgtctctggcatcgaaagtgagcgtgcattggtgtccctggataccagtgtgctgagtcggatcgagaatgaccctatttggggtgaggtcgtggaggtgtcgacctcgagtcgcctagcaccattcgttgccgaactgggcaacgcggactgggtcgcgcgtggacaggcttacacgcataaggatcgatgtccgttttgccagcaggggttgccccacgatttccgcgaagagttggcgagactcctggaaggcgagcgcaaggcgaaggtcgacaggatctcgctgctggttcagagctacgccgtccagctcgacgcgttagagcagcgtacccaggccattttgaccgaccccgacgcaagagaggcaggggtggagcttgcctggacccaagctcggggggcattccacgacacactgacggcgttgcgtcggaaagaagcgcagccgggggaggcggtgtccatctcccctgtcaatgtagacgcattggtcgaagcattggccaagctcaacgctctgatcgctgacttcaatgcgcgcatccgggatcgcaggggcgagcgtgagcggatcaaggccatgtttttccaggtcatgcatgtcgagcgtatggacgcctacgcgcaccatgatgcgttactcggaccgctgcagcaagccgaaacacaggcaaaggcaggcctgcaagcgaagaggcaggagcgagatggcctcaacaccgaattacgtgagctgcgccggcttcagaaaggcgttgatgcctcaatcgatgcgatcaacgatcgactccgcagcttggggatcacggcgtttagcatcgatcggaaggtagacgaggatcgcgtgtactgcctggcgcgcccaggggtagccagcagcgagaccaagtcattgagcgagggtgagaaaacgctgatcgcgtttctctacttcatggagtcgctcaaggggtcgcaagatgaaaacgagaatgtggatcctcgccgcactatcgccgtcatcgacgatccgatctccagcctgtcccagaattatgtgtatgacatcgccacgatgatccaccgcgagctggccaagccagacggacggccccagctcgtgaagcaggtgatcgtcctgacgcacaacctgtacttcttccatgagctgctccgtcagcacaaggtgagtctgcccaaggcgcacaaccactgcggattgctgcgcgtggtcaagaacgtgtattcggaagtcgaagcgctggatcccaccaagctattaaatgattacgacgtgtggtggcagatcctcagggatgccaaggacgggaagatcccgacccagatcgtgcccaacgccatgcgtaacattctggagcaattcttcaccttcaccaccgggtcttctgacttccccgtggcagtccagcaattggccgacgcagatacatccagtaagtacgcagcgctggatcgtttcgtcgatcgaggttcccaccgagatgcaatcaatggtccgccaattgactggaccgaatacgacgtgtcctatctattgggcaagttccgcgcgatgttcaatgccatcggccaagagccacactacatcatgaagataggtgaggatgccttggagccagtacatgcctga

SEQ ID NO: 503002 - DNA, 2397 bp, Stenotrophomonas maltophilia
atgaagctgcgcgacctgctggcacgcctgaaggcgacctacaccggctcgatcggtgcggagttcatgcacatctccgaggtcgagcagcgccagtggatctacaagaagctggaagccgccggtggcaactaccagctggacgctgacacccagcgccgcaccctggagcgcctgactgcggccgaaggcctggagcgctacctgcacaccaagtacgtcggccagaagcggttctcgctggaaggcggcgattcgctgatcccgatgatggacaccatcatccgcaacgccggcaaggatggcgtcaaggacgtggtgatcggcatggcccaccgtggccgcctgaacgtgctggtcaacaccctgggcaagaacccgcgcaagctgttcgacgagttcgaaggcaagttcgagcacgacgagcacgcttcggccggcgacgtgaagtaccacatgggcttctccgccgacgtcgccaccgatggcggcccggtgcacctggcgctggcgttcaacccgtcgcacctggaaatcgccgacccggtcgtggccggttccgtgcgttcgcgccaggagcgccgcaaggacaccgcacgcaagcaggtcatgccgatcctgatccacggcgacgcggccttctccggccagggcgtggtcatggaactgttccagatgtcgcaggcccgcggcttcgccgtcggcggcaccgtgcacatcgtggtcaacaaccaggtcggcttcaccacctccaacccgctggatacgcgttccacgcgctatgccaccgacgtggcgaagatgattgccgccccggtgctgcacgtgaacggcgatgacccggaagcagtggtgttcgccgcacagctggccttcgaattccgccagacgttcgccaaggacgtggtcatcgacctgatgtgctaccgccgctggggccacaacgaggccgacgaaccggcgatcacccagccgctgatgtaccaggtgatccgcaagcacccgaccacccgcgagatgtacgccgagcagctggaaaaggcgggcgtgatcgccgccggcgccggcaaggcgatggtcgatgcctaccgcgagaagctggacgccggtgaagtgaccaccgagctggccaaggtcgagaagaccccgccgagcagcccgctgttcgtcgattggccgaagctgctggaaggcaagctgtccgacccggtctcgaccaaggtcgagaagaacaagctggtcgagctggccaagctgatcaacaccattcccgatgaagtgcagctgcactcgcgcgtggccaaggtctacgacgaccgccgcaagatggccgccggcgagatcccgggcgactggggctttgccgagaacctggcctacgccaccctgctcgacgaaggccatgcactgcgcctggtcggccaggacgtgggccgcggtacgttcacgcatcgccacgcgatcctgcacgaccagaagaccgacaactactacatgccgctgcggcagctggtggattcgccggagaaggccaccgtcatcgattcgctgctgagcgaagaagcggtgatggcctacgagtacggcttctccaccaccgatccgaacacgctgtgcatctgggaaggccagttcggcgacttcgccaacggtgcccaggtggtgatcgaccagttcatcgccgccggtgaagccaagtggggccgcatttccggcctgaccctgctgctgccgcatggctatgaagggcaaggcccggaacacagctcggcgcgcctggagcgcttcctgcagctgtgtgcgctggagaacatgctggtggtcgtgccgtcgaccccggcccaggccttccacatgctgcgtcgccagctgcacatgaccacccgcaagccgctggtggtgatgtcgccgaagtcgctgctgcgccacaagctggccgtgtcgaccctggacgagctggccaacggcgagttccagcacctgatcggcgacgccaacgcagacgccaaaaaggtcaagcgcgtggtgctgtgctcgggcaaggtctattacgacctgctggaggaccagatcaagcgtggccaggacgacgtggcgatcatccgcgtggagcagctgtatccgttcccgcgtgcgctgctggcggccgaactgaagaagtacggcaaggccaccgacgtggtgtggacgcaggaagaaccgcagaaccagggcgcgtggtaccagatccgccaccacctgcagttctgcctggccgatggccagaacctgcactacgccggtcgcgcacgttcggcctcgccggctgccggtcacatggctgaccacgtccgcgagcagcagcagctgatcgccgacgcactggtcaacccgttcaacgacacgttcgctgaataa

SEQ ID NO: 503003 - DNA, 633 bp, Stenotrophomonas maltophilia
gtgctgctgctgacgctggccctggccagcggctgccagcccggctcgccgcctgctcccacggctgcggatggtgccgcacatgcgccgacgcagccgcaggccccttcgccgccactggtggccgcagcccgcgcgcaggtcggcgtcaccacccgttacgatcctgcttaccaggtactggcctatcccggcggcgacgtgccactggatcggggcgtgtgcacggacgtggtggtgcgcgccctgcgcgatctgggcctggacctgcaggcacacgtgcatgaggacatgcgcggcagtttcagtgcctatccggcgatctggggcctgtcacggccggaccgcaacatcgatcatcgtcgtgtaccgaacctgatgcgctggttcgagcgccagggctggcagcaaccggtcacggccctcgccgccgactacgcggccggcgacatcgttgcctggaagctcaatggcaacggcctgctgcacgtgggcatcgtttctgaccggcgcctggccaacggcacaccgctggtgctgcacaacatcgcgcgcggcacgcgcgaagagaacctgctgttccagcatgcgatcatcgggcattaccggatgccgttgcgacagtcccggtag

SEQ ID NO: 503004 - DNA, 1329 bp, Stenotrophomonas maltophilia; identical to SEQ ID NO: 497279

SEQ ID NO: 503005 - DNA, 1257 bp, Stenotrophomonas maltophilia
atgcgcgatgccagccaggcgccgcgcaacagccgcgaattggccgtgcgcaaccagttctttactccgcgctacgtggtggagtttctggtggacaacaccctcgggcgtctctggttcaacgcgaccggtggggtcaccggccttcgggagcgctgccagtacctgctggtcaagcccgacgaaacgcttcaagcagccaccaagctgcgcgacccgcgcaccctcaaactgctggacccggcctgcggctccatgcacttcggcctgtatgccttcgatctctttgccgagatctatcgcgaggcctgggcctgggaacaacagcacgggccgggctcgctggaagtctcgacccagccccaggctgcgctcaaaccactgagccagacctatgaggacgaagcggcattcctgtgcgacgtgccgcgcctgatcatcgagcacaatatctatggcgtggacatcgacccgcgcgccgcgcagatcgcctcgctggcgctgtggctgcgggcgcaacgtgcttggcacgacgcaggagtgaaggccaaagaccgcccgctgatcgggcggggccatgtggtggccgccattgcgccgccggcagagcgtgagttgcgccagcagtttgcggccaacctcgatcagcgcgacgccgagctattcgagaagacgctgcaactgctcaagggcctgccggagctgggtgtgctgctccaggtcgagcgcgaactgccgaacttgattcgccaggtctatgtcggcaaaggcaccggcctgtttgctgcgcaggagcaagagaactggcagcaagcggaggcgcgcctgcgtgaggcgctgaccgagtttgcccaggcggcgaaatccacctaccaagggcggctttttgcacaggacgcattgcaaggtctccggctcatcgatctatgccgtgaagtgttcgatgtcgtggtgatgaatccgccttttggcgcactggctgccaacacaaagaaccagctcgccaaagcctacccgcgcagcaagaacgacctgctggccatcatggtcgagcgtggcctggaactgctgcgctctggagggcgcattggcgccattacatcgcgcacttgcttcttcctctctagttttcagaagtggcgggaggatgtggtgctgggcgttgcccgccccgaagtgatggccgaccttgggcttggagtaatggacgatgcaatggtcgaggctgctgcctatgtattggagaaacaggcatga

SEQ ID NO: 503006 - DNA, 1965 bp, Stenotrophomonas maltophilia
gtgaaacaccgtcatctcctgctggcctcggcaatcgccgccgccacgctggccctggccgcctgcaagaaggaagctgccccaggcaccgataccgccagcagcagcgccccggccggcgaaaccgccgaccagttcgtggcccgcatcaatgccgagttcaaggccgcctacccggagatgacctcggcgcagtggctgtcctccacctacatcaacagtgattcggaacgcatcgcggccaaggccaacgagcgctcgctgacccagctcaacagctggatcgaacaggctgcgaagttcgacggcaagccgatgagcgaggacagcaagcgcgcgatccacctgctgaagctgatgtcgtcgatgccggcaccgcgcgacccggccaagctggccgagctgacccagatcgccacccgcatggaaggcagctatggcgccggcaagtactgcaccgatgccaacgatccgaactcctgccgccagctgggcgagctggagcaggtgctggcacgcagccgcgactatgacaagcagctcgacgcctggcagggctggcacagcaccaccaagaacatgcgcggcgactaccagaagttcgtcggcctggtgaacgaaggcgccaagggcatgggcttcaccgatgccggccagatgtggcgcagcggctatgacatgccgccggagcagatcggcccggaaaccgaccgcctgtgggaacaggtcaagccgatgtacgagcagctgcactgctacgcacgcggcaagctggacaagacctacggcaaggacaaggccgaagtgggcaacggcctgatcgccgcgcacctgctgggcaacatgtggcagcaggactggtcgaacctgtgggaccagctggaaccgtacccgggcgccggcagcctggacatcaccgcggcgctggagaagcaataccagaccaacctgagcgcggcgctggccaaggccggcaaggatgccaacgtggccgcgcagtacaaggcgcagcgcgaggccgaactgcgcaccgccaagcagatgaccgaacgcgcgcaggacttctacgtgtcgctgggcatgccgtcgctgccgcagtcgtactgggaacgcacccagttcatcaagcccgatgaccgcgatgtggtctgccacgccagcgcctgggacatgaacatggaaggcgacgtgcgcaccaagatgtgcatcaagccgaacgaagagaacttcaccaccatctaccacgagctgggccacatctattacgacctggcctacaacccgctgccgccgctgttccagggcggtgccaacgatgggttccatgaagcgatcggcgacaccatcgtgctggcgatgacccccaagtacctcagctcgatcggcctggtcgatgcgccgaccgaaagccgcgaagcggtcatcaacaaccagatgcgcatggcgctgtcgggcgtgtcgttcctgccgttcgggctgatgatcgaccgctggcgctggggtgtgttcgatggttcgatcaccgccgacaactacaacaaggcatggtgggacctgaaggccaagtaccagggcgtggcgcctgccagtacccgtggcgaggagttcttcgatccgggcgcgaagtaccacgtgccaggcaacaccccgtacacccgctacttcctggcgcgcatcctgcagttccagttctacaagggcctgtgcgacgcggccggctacaaaggcccgctgcatgagtgcaccttctacggcaacaaggaagccggccagaaatactgggcgatgctgagcaagggtgccagccagccgtggcaggccacgctgaaggagctgaccggcaccgacaagctcgatgccggcccgatgatcgagtacttcacgccggtcaacgagtggctgaagcagcagaacgaaggccagatgtgcggctggcaggccaacgcggcaccggcggcaaaatga

SEQ ID NO: 503007 - DNA, 852 bp, Stenotrophomonas maltophilia; identical to SEQ ID NO: 364322

SEQ ID NO: 503008 - DNA, 696 bp, Stenotrophomonas maltophilia; identical to SEQ ID NO: 495368

SEQ ID NO: 503009 - DNA, 687 bp, Stenotrophomonas maltophilia
gtgctcggctacgaagccaactacgccggcaccagcttcgccacgctggacaagcgcgatgcgggtttccgctggggcagcgacatcgtcaccttcttcgccgacaagacccagccgggcagcctcggtgcggtcggctacgacgacgagggcgtcaagacccagcgctgggacctggtgcgcgacggcatcctggtcgattaccaggccacccgcgatgaagcccatatcctcggccgcgatgcatcgcatggctgcagctacgccgattcctggtccagcgtgcagttccagcgcatggccaatgtctcgctggcgccgggcaagcagccgctcagcgtcgaggacatgatcaaggacgtggagaacggtatctacatccacggccgggggtcgtactcgatcgaccagcagcgctacaacgcgcagttcggtggccagctgtactaccagatcaaggacggaaagatcgccggcatgatcgaggatgcggcctaccagatccgcacgccggaattctggaatgcctgcacggccatctgcgatgaacgcgatttccgcctgggcggttcgttcttcgacggcaagggccagcccggccaggtctcggcggtctcgcacggttcgtccaccacccgcttcaacggcatcaacatcatcaacaccgcgcgcagtctcggcgcttga

SEQ ID NO: 503010 - DNA, 1062 bp, Stenotrophomonas maltophilia
gtgcgggtcagttcggcggtttccttggcgaagtcggtgtccttgatgcggctgcgggacgccgacaggttttccgacgaggtctgcaggttggccacgaccgaggtgaagcggttctggatcgcaccgaggtcggcgcgggtgctgttgatcgcacccagggccttgtcgacgatttccatcgcctgctgggcacccttcacggtgctgacgtccaggtcgctggcgtacttggcggccggcgcggccgtcgaggcggtgaaggtcggcgcggtagcgccggtccaggtgcccggggtcgcggtgatggccttgaacgagccatcggcgttgacgctgtccttgaccgaggtcagggtcacgccagcggtgccgttcacttccgcgaacacgccggtctcgccgatcttggcgttgatcgcggtcaccagtgcttcacgcgaggccttgccggtggcagcggcgtcggcgccctgcttgaccgagacatcggcaatggcaacgccattgatctgcaggccgctggtgctgaaatcagcgttggtgcccgggtcggccagggccagcgcgttggtatcgaacttggcgccgcccagggcgttggccttggcatcgatggtcttgtcgatggcgatggcctggccggcgttggcaccgacctggaacagctggctggagaacgaaccgtccagcagcttggtgccgttgaagtccgactgcttggcgacgcggtcgatttccgagaccagctgggtcacttcggcctgcagcgccttgcggtcgctggccgagttggtggcgttggaggcctgcaccgacagctcgcggacgcgctgcaggttgttgccgatttcggtcagcgaaccttcggcgacctgggccagcgagatgccgtcgttggcattgcggatggcgacgtcggtaccgcggatctgcgtgccgaagcgctcggagatcgccaggccggcggcgtcgtccttggcgctgttgatgcgcgaaccggaggacaggcgctggatggtggtagccagcgagctgccgctggtgctcaggttacgctga

SEQ ID NO: 503011 - DNA, 1155 bp, Stenotrophomonas maltophilia
atggcaaggatggggcggcccggcatgtctcgagcccagaagcgagatctatggcgacgatggaagggcggccagtcgctcagcgacattgcccgcttctttgacaagaatccgggttcgattttcggggttctggccgcgcaaggcgggatcgcgccgagggaacgtcgccgatccgcccggtcgctgagcttaatggatcgcgaagagatatctcgatgcctagcttctggccagtcgtttcgccagattgcgctcagcctagggcggcctacctcgacgattagccgggaagtggcacggcatggtggccgtgaccgatatcgggccgcacatgccgatgaggccgcttgggaggcagcccggaggccacagtcttgccggttggccgataaccctcgtctgcgctggttggtggcttgcaagctgggccagcagtggtcgccggaacagatcgccggctggcttaagctgaggttcccgctcaaccaggcactgcaggtgtcgcacgaaacgatctaccggagcttgttcatccaggcgcgcggcctgctcaagaaggaactcctggcgcacctgcgcacgcgtcgccgtatgcgccactcaaagctggccaccgcgatgcctcgcggcgggatcatcgacgcggtatcgattcgggagcgtccggcggaagtcgaagatcgcgccgtgccagggcattgggagggtgatctgatcacgggcagcaacaattcccacatcgcgacgcttgtggaacggcactcgcgcttcgtgatgctggtgaaagtgaagggtaaggacaccagcagcgtcgtctcggcgctgagccggcaagtgaaaacactgccaaccgcgctgcgaaaatcgctgacgtgggatcgaggcggtgagatggccagccacaagaacttcaccgtggcgaccgacacgcaggtctacttctgcgatccgcaaagcccttggcagcgcggttcgaacgaaaacaccaatggccttctgcggcagtacttccccgacggcacggatctatcccgccattcgcaggcattcttgaacaagatcgccagacgtctcaacgaaagacctcgtaagaccttgggcttccagacgccagccgctaagctgagccaagccgttgcgtcgacgggttga

SEQ ID NO: 503012 - DNA, 408 bp, Stenotrophomonas maltophilia
atggagctgcgaatccgggaagcgaatctggaccttgccaaccgcttgatgaatagacgtgaaggcgcggcggatatccttttccagctcgtcgtacagggtgaccgtggtggcgagccagcccacgggctgatcggccatggccttggagccgccttcacccttgaggacatcctggatcaccttgatcgcagagcgcaggccgataccgccagtggacttggccagtgcacccagcaggtgcagcaggatgtcgaagtgagccggcaggaatgggtagagattggtgaagctctctttgctgaagtccgcgtcgtaatacttggcgtcttgcagcttggtgttgtgccgcagcgcctggccgtgggcttcgaacagcttgcccagctcagtctcgccagccggtga

SEQ ID NO: 503013 - DNA, 432 bp, Stenotrophomonas maltophilia
gtggtattggaggtccggttctgggagcacgtcatcaatgacatcgagccaccagccgatggctcggagtcagcggccagggcgttgcggagcttgtacccaggcaaggacaccgttgtcgatttcagtcaggacccggaattggtcgagaccttcaccaaccttgtctcgttcactgaggcagttgcagagcaggaacagcaggtagaactgctcaagcagacactgcagcaagccatgggggacgcttccattgcccggttcggctcactgggagaagtcatctaccgccgtagtaaggatggcacgtcactggataccaagcggctcgcagccgagcacccggagatcgctgcggcctacacggcagtccgtccggggtcgcgccgattccggatcaacaccacgatcaaagaggtcaaatcatgctga

SEQ ID NO: 503014 - DNA, 432 bp, Stenotrophomonas maltophilia
gtggtattggaggcccggttctgggagcacgtcatcaatgacatcgaacctccggctgatggctcggaatcggcggctcgggcgcttcggagcctgtatccgggcaaagacacggttgtcgacttcagccaggacgaggcgctggtcgagacgttctccaacctggtgtctctcaacgaggcagtagcagggcaagaacagcaggcagaactgctgaaacaaacgctgcagcaagccatgggcgacgcttccgttgccaggtttggctcgctgggggaggtgatttaccgccgcagcaaggatggcacgtccctggacaccaagcggcttgcagccgagtacccggagatcgctgccgcctgcacggtcgtccgtccgggttcgcgccgtttccggatcaacaccacgatcaaagaggtcaaatcatgctga

SEQ ID NO: 503015 - DNA, 2127 bp, Stenotrophomonas maltophilia
atgaaagcgatactgcagtcggaggcaacggagtgtgggctggcgtcgatcgcgatgatcgccgatttccacggaaagaggatcggcttgagcgagatccgccgacgctatccgttgtcgctcaagggtgccaagttgggccagctcatccacattggccagcaactggggttgtcttcgcggcccttgcggcttgagatggagcatctttcccagctcaaactgccttgtatcctgcattgggatctgaaccactacgtggtgctggcaaaggttggccgcagcaatgtcaggattcttgaccccgccatcggggagcgggtgctttcgatggaggaagtgtccgagcatttcacaggcgtggcacttgagctgtcccccacggcggagttccagaaggaggccagaccagcttcgatctcgctgcggcagctgacgggagagatcaacggcctgtggccctcattggcgctggtcctgcttctctcgctcgcactccaggtcttcgtagtccttgcgccgttctttacccagtgggtggttgatcaggcactggtctcggcagatcgggatctgcttacggtactgggaataagcttcgggcttgcaatgctgttgcaggtggccatcgggctattgcgcggatggtctgtcatctatctctcctctacgctggggttgagatggatgggaaacgttatcgggcatctgttgcgcttgccgctggacttcttcgagaagcgacacctgggtgatatcacatccagggtttcctcggtgcagtccatccagaagacgttgaccaccagtttcgtcgaggcgctcatcgacggcctgatggcgatcgtcacgctcggggtgatggttctctacagctggaagctggcgctggtgacgctggcggcagtggtgctgtacacccttgtccgcgtcaccgcgtacacgccagttcgcgatcgtaccgagcgccagctagttgccagcgcaaagcaacaatcgcatctgctcgagtcgatccgcggcatgcagagcatcaaggtcgccggccaggagtcgatgcggacggcaacctacgagaacctgatggtcagtacggtcaatgaggaagtcaggctttcgaagctgacgctcgggtttaccagtaccagtcagttgatcttcggcatcgagagaattgctgttatctggattggtgcaatgctggccatgaacaatgtgttctcggtcggcatgctggtggcctatcttgcgtacaaggatcagttcgcgctgcgaatggcgggactgatcgacaaggctgtcgagttcaggatgcttaggctgcatggggagcgattggctgatgtcgttctcagtgcacctgaccaggatttcggtcgaatcgagacagtggtaccgatcgcgtcctccattgaggtcaaggatctttccttccgttatgccgaaggcgaaccctggatcatccgcaattgttccttccgcgtagaacaaggtgaagcggtggccatcgtgggcgcatccggctgtggcaagtcgaccctgatgaaactactgctcggattgctcaagcccagtgaaggaagcgtaagcatcggcggtctagacatccagaagcacggtccacgcggcatccgctccatggtgggagcagtcatgcaagatgaccagttgtttgccggaagcattgccgacaacatcagcggcttcgacagcggcttcgatgaacagcgcattgaggaagctgctcgaatggccgccgtacatgatgacatcgcggggatggcgatgggttaccacggtcttatcggcgacatgggcaactcgctctcaggcggtcagaagcagcgcgtgattctggcccgcgccctctaccgccggccacggattctgtttctagatgaggccaccagccatcttgatgtcatgcgcgagcgcttggtcaacgaagccgtgcagcgtatggagctgaccaaggtgatcgtggcccataggccggagaccataaacagcgccgaccgcgtgctcgtgatggagcagggacggatcgtccaggaggtgcggccccagcgtgcggcctcgccagcaccttcctccgatgccgagcaatgcgttgcggcaaccgcctga

SEQ ID NO: 503016 - DNA, 189 bp, Stenotrophomonas maltophilia
atgcgtgaactcaacaatgccgaagttgccaatgtcgatggcgcgggtgaaggcgcttcgaacggctttgccggtggtgtggttgccggtgctgcaatcgggttcttggtgggcggcccggtgggcgcgttcgccggcgccgtaagtggtggcatccacggtgccatcgtgggtcactacctgatgtga

SEQ ID NO: 503017 - DNA, 1032 bp, Stenotrophomonas maltophilia
atggcgcccgccaatggattcatgtcggaagtcagcattgcggaaggtgagcacgttgaagcgggtgcggtgattgcggtcttgactgtcccgcgcgccaccaccaacgatggagatactctgactgcgctggaatcccgcttcgagcgtaggacgtccggcctggaggcagcgcagactgccaagaggatgcggctgggcgcacagcaggagggattgcgtagccagctttccaacgcgcagcgggagttggcgcagatcgacgcggaagtgctgacgaggaaggatcagatcaggattgcacaggagactctggaacgcctccggctccttgaagacgatcgttacgtcagcatcctccagatcaagcagcaggaatccgcagcgctcacgcagaagggcgagatgcaggcattgcagcgacaggcgatcgccacgcacagaatgatcgagcagatcacgcaggcgctcaatgaactgcctggagaaaatgaggctgcggaggcgacattccagcaggaccttgcattgcttgagcaggaacgtgtggagaataccgcgcgtggacggctggccattgtcgctccggtgtctggagttgtagccacccagcagatcaaggccggccaagccgtgcagagcggccagccgatcatgagcatcctgcctggggatggccgtctggaggcggaactgctggttcccagccgggcggtgggcttcatagagcccgacgacaaggtcctgctcagataccaggcatatccttaccagaagtttggacatcatgaagggcgggtttcgcggatcagtcgaagcacactgggtgcctcgcagaatggcggcgcgacagagccgatgtaccgaatcactgtcgctctcgcagcgcaaaccgtaagcgcatacggcaagcccgagacacttaaacccggaatgctggtggatgcggatgttctgggtgagacgagatcgttttttgagtgggtccttgagccgatctactcaatcaagggaactgtgttcggacaatga

SEQ ID NO: 503018 - DNA, 306 bp, Stenotrophomonas maltophilia
atgtcgaccgtcaccacctacgctctcgtcgcggctctcaccgtgatcgttgttgcggcgctggtctacgccttcgggcgatacgcagaatccgaacgaactaaaacggcgaaggtgctaagactcacgcaggcgctgcccgcttcacgtccatgcaacgaaacagccgccaaggcggaagtgacactgccgaaaatcgagacatccgcgttcagcgatacggacgatgcctatcgtaggaaccacgtctcggtaatcggtgaacgcgatggattctgtggaaagaacaacattggccctccgtaa

SEQ ID NO: 503019 - DNA, 195 bp, Stenotrophomonas maltophilia
atggaccagaattgcaacaacaaggactacagtggcttggggcacgactggcaacaggcaatggacgcccctccgatcttgatcatcgaacggaacgaagcttccgtcatgagcaccgatgcgttgatcgcggcggccaaaacgggcctcagggacgcctgcgagaactaccggatggccctgatcgagcattga

SEQ ID NO: 503020 - DNA, 144 bp, Stenotrophomonas maltophilia
atgagttggttcaagggagaaaatccctcgcggacagaaatgcgtctcgagctcagcctgtacctcggtgtggcgcatggaaccaaaaagcacgtcccacgcacgaaagtgctgcttgggaacttgtggatgcaggcgcactga

SEQ ID NO: 503021 - DNA, 1143 bp, Stenotrophomonas maltophilia
atgccgctgctcaacagcgacgccattctggaggtcctgcggcaagaacgtgaccacggcacccggatctatgtcatcggtaacaacggcgaaggcaaaagcatactgctcggcgatttggcggatcgtctggtgacggaaggccagcgcgtcgtcggcatctcgttcggtctgactgacaggtttctgttcgaacgccccaagcacgacggacagccgttcatctatgtcggggcccgcacgtcggaacgcggcattgcgcttggtcgcactgcggcggacgtcaatcgcatggtgcgcgagatccatgtgagcgtcgagcggctcgaggtcttcgacgcggtcgtgaggcacctcggcttcggcgagcgtcggtacttggtgccagttggcctgaacagctccatcgatgaccaccgagagcgttacgccgagctgcaacagctaacagaaagtgccgatgagaacgcgcgcatcctacagaacgcaggcgcgaacaggtacgagctaggtctcatgcgacagggagaccagcgttcgatcacgacattcggcgagttgagttcgggcgagcagcaactgctgaccctagccctcaagctcacagcctacgccggcaacggcaccgtgagcctggtagacgagcccgagttgagcctccacgtgagctggcagcgcgccattccgaggatgttggagatcgtcagctcccgaatgggctgctcgatggttgtggcgacgcattccccggtcgtcgtcgccagcacgacccatcgagacgatcactgcttcgtcgccagcaggcgtgggctgacggaactcggctgccgtcagcgcagatcggtcgagacggcattgttcgatggattccggacttacacggcaaacaaccggcaagtgcacgagcgctgcgccgcaatggtgtcgcaaaccatccagcgtctcaacgcccggtcacccttacaggatgggaatcttccgaccttgaagtcgctatatgaagagctagagatgatggacgaagtgattcggttggccggctcggcacagttgtcgcatgctcgtgaagatctcgaactggtcagtcgcacccgtgcggccatcgatgaactcgcgtcgatcgagcgaggagacgccgtatga

SEQ ID NO: 503022 - DNA, 159 bp, Stenotrophomonas maltophilia
atgagtgacgcgtttgagattgtcatggaggcggtcccatcggttcatgtgtccacgctgctggaggagatgggccgcatggctgagtccgtttccgtcgaccgggtgggaaggcgaacccatcgcggctggcgagcactctgcaggacgtttccatga

SEQ ID NO: 503023 - DNA, 201 bp, Stenotrophomonas maltophilia
atggtgagcatcgaactgtcattcgatatggagtgggcggatatcggtgtcgcgatgtcggaactccaacggcattttctggaattgaagacgctgagtggatcgcgaaccgtatacggtggcatggagcccgctcaggatctggagacgagattcttcactgacgatgagtgcggtcccttgggtggcaccagtgcctga

SEQ ID NO: 503024 - DNA, 345 bp, Stenotrophomonas maltophilia
atgcctgaggttgtcaggaatgttcttcattactcctatggctattccatggggtcactgtggatcaacatgaacgttgagttggaggggcgtgacgtcaccttcgagcagcagacggaagcattcttttcgatgctgaagttgctgatgatggaaggcaagctgaagctggcttcgcaaggcgtcttcgccgatggggatgttgatgagcagttgggtgcgcttcgccgggcatggccggccgccagagatcaggcggatctcgatgagcacgggttctggttcctttcggatgcgccgtttggattggtctggatgtcacctgaaggcgacgtctggacctga

SEQ ID NO: 503025 - DNA, 489 bp, Stenotrophomonas maltophilia
atgcgcctggtactgaagctgttcctcggcttcttcctgatcaccggcatcgccgcgttcttcgtgatgcgcgtgttcgtcaacgaggtgaagcccggcgtgcgccaggcgatggagtcgaccctggtcgatgctgccaacgtgctggccgagatggcggccgccgacgtcaaggcgggcacgctccgcagcggcagtttcacccgcaacctggccaaggcgcggcagcgcgacctgaaggcgatggtctggcgcttccctaagcgctcgctggactatcgggtgaccatcaccgacgccaagggcatcgtcatctatgactcgctgggccgcgacctggggcgcgacaactcgcgctggaacgacgtgtaccgcaccctgcgaggcgagtacggtgccgttccagccccgagatcccgggtcaggaaggcgatacggtcatgcatgtggccgcgccggtatacgacccggccgatgggcggaccctga

SEQ ID NO: 503026 - DNA, 1155 bp, Stenotrophomonas maltophilia
atgccccccgtcccgccgcgacccgacgacgccgacaacgtgaccccaccgccgccgaccgacgcggcgcctgcgcccacgcccgttgaaccggcggtcgcgccgaaatacctcaagcccagcgcgcgcagcgtggtagtgatggtggtggtggccctgctgggcatcgcgctgatcctgcgtgcgtggcacctgtggccgttcaccagcagcgtgatggtgaccgacaacgcctacgtgcgcgggcagatcacggtgatggcaccccaggtgaacggctatgtcaccgaagtgctggtgaaggatttccagcatgtgcggcagggcgagccgctgctgcgcatcgatgaccgcatctatgcgcagcgcgtggcccaggcgcaggcgacgctggacagcgcgcgcgcggcgctggccaattcggaccagtcacaggcgcagaaccgcgcacagattgcgtccgcccgcgccacgctctcggccggccaggcggaactgcagcgctcgcgcaatgagctgaaacgctacgaggaactggcggcgcagcagctggtgtccatcaacgaccgcgacaagttccgcaccacccaggcgtcggcacaggccagcgtgcaacaggcgcaggcgcagatccgcatcgccgaggagaccctggtatcgacccaggtggcgcgcaagagcctggaagcccaggtggagagcgcgcaggcgcagctggagctggcacgcatcgacctggccaacacggtgatccacgcgccgcgcgacggccagatcagtgaggccagcgtacgcgtgggccagtacgtcgcggccggttcgcagctgctgttcctggtgcccgatacgctgtgggtggtggccaactacaaggagggccagacctggggcatggcgatcggccagccggccacgttctcagtggacgcgttccagggccaggtgctgcggggccacgtgcaggagatcgcgccggccaccgggtcggaattcagcgtgctgcgcccggacaacgccagcggcaatttcaccaaggtggtgcagcggctgccggtgcggatatcgatcaacagggatcagaagctggcaaagcagctgcggcccggcatgtcggtgatcgtgcgggtggatacccggtccaagccgatggactag

SEQ ID NO: 503027 - DNA, 1383 bp, Stenotrophomonas maltophilia
atggacgtacagaacgggggccaggcgccgcagatgaagtggggatgtcgctacctgggctgggccgtggtacctctgctggccggcgtgctgctggcccgctatgccgggccggctgcgcccgaagcggttgcgcgtgccacggccgccaccgaaggcagctgggcgcagcacctggcgtcaccgctgggcctgttcctgctgcagctgctggtgctgctgctggtggccaagggcgcgggggcgctgctcaagcgtctggggcagccggcggtgatcggcgagatggcggccggcctgatgatggggccgctggtgctcggcagcctgctgccgcagctgcagggtgcgctgttcccggccagttcgctgggcccgctgggcatgctcagccagctgggcgtgctgatgttcctgctggtggccggtgccgagctggacctggcagcactgcgtggacgccggcgttttgcctttaccgtcagccatgccggcatcgcggtgccgttcgtgctcggcgtcgccctggccatctggctgtatccgcagcatggcccacagggggtgggcttcacggcattcgcactgttcgtcggcatttcgatgagcatcaccgccttccccgtgctgctgcgcatccttgccgatcgcggcatcacgcagacgccgctgggtcagaccgccatcgcctgcgcagcattgggcgatgccaccgcgtggtgcctgctggcattgatcgtggccgctgcccaggccggcggctggttgccggccagcctcaacctgctgtgcgtggtcgcgttcgtggcactgatgctggggctggtgaagccgtggttcgcccgccagcaggtcgcgccggggcgtgagggacgctggctgctcggcatcctgctgctgtcgctgggcagtgcgctggtcaccgagatgctgggcatccacgcgctgttcggtgcgtttgccgcaggcgtggcggtgtcgtccaacgcgcagctgcgtgacctgttgatggcccgcgtcgaaccgttcgcggtgacgctgctgctgccgttgttcttcgccatgaccgggctgcgcatgcgcgccgatgcgctgcaggccagcgacatcgtgctgtgcatagtggtgattgcggtggccacgaccggcaagctgctgggcaccttcagtgccgcgcgcagtgccggcatgcccacgcgcgaggcgtggcggttgggcgcgctgatgaacacccgcggcctgatggagctgatcgtgctcaacctgggttacgaactgggcctgctcggcgaccgcctgttcgcggtgctggtgatcatggcgctggtgaccacggcgatgaccggaccactgctgaacctgatcgagcggcgcaggggctga

SEQ ID NO: 503028 - DNA, 2328 bp, Stenotrophomonas maltophilia
atgcgacgtacatggcgttggatgctgggcgtagtgatcgccatcgtgctgatcaccgcactggtcctgtggctgctgctgcgcggcagcctggccgacctggacggcgagcatccactgccgggcctggccaagccggtcaccatcgagcgcgatgggctgggcgtggtcaccatcacggccggtagccagaccgatgcgatgcgcgcgctgggccgcgtgcatgcgcaggagcgctatttcgagatggacctgatgcgccgcagtgccgctggcgagctgtcggcgctgttcgggccgaaggccatcgacgccgacaagcgcatgcgcgtgcaccggctgcgtgcacgcaccgaggcgaatctgcaggccgcactgggcggcaacggcgcggccgtgcgcgcctacgtggatggcgtcaacgagggcctggccgatctctccgtgcgcccgtgggcctatctgctgctgcggcagccgccgcaaccgtggcaggccagcgacagcgtgctggccgggctggccatgtacgccgacctgcaggaccccggcaaccagaccgagcttgcactgagccgcatccgcgcggtggtgccgccagcgctgtacgcgctgatcgcccacgacggcaccgaatgggatgcaccgctgttcggcgaaccgatcggcaacgccgcgctgcccgatgccagccagctcgacctgcgcacattgaagggaaaatccggcaccgcgcaggaagaggtggacgccgtcggcagcaacaacttcgcggtggccggggcgcttaccgccgacggccgcgcgatcgtcgccgacgacatgcacctgggcctgcgtgcccccggcctgtggttccgcgtgcgcctgcgctaccccgatccacaggctgccggcggccaggtcgacgtcaccggcttctcgctgccgggcctgccggcggtgatcgtcggcagcaacgggcacgtcgcctggggtttcaccaacagctacatcgacaccgcggactaccgcactgaaccggccaacgccacggtgaccgtgcatgaagagcgcatcgccgtggccggccaggccgatgtgcggttcccggtacgcgaaaccgcctgggggccgatcctgcatacccacgccgatggcagtggcgatgcgctgcgctgggtcgcccacctgcccggcgcggtgcgcctggacttcggtgacctggcccgcgccggtgacctggacagtgccctgcagttcgccgaccacgccggcatccccgcacagaacctggtggtcggcgaccgcagcggacgcatcgcctggcgcctgatcggcgcccgcccggatcgcggtccgggctgtgcgcctgcgggcttcaccgccgtcagcaaccaggactgcgccccctggccgatccgcagcgacgcctcgccggcattgatcgacccacccacccatcgcctgtggaccgccaacggccgcgtcctcgacggcgagtcactggccaatgtcggcaacggtggatatgacctgggcgcccgcgcgcggcagatccgcgatctgctcgccatccaggaccgcttcgacgagcacgacctgctggcgatccagctcgacgaccgcgccgtgttcctgcagcgctggtgggccctgctgcacgacgtcatcgaacgcagtgacgaccctgccctgaagcgtttgaaggaggccagccatcaatggggtggccgtgcctcggccagctcggtcagctaccgggtggtgcgtgaattccgcacgcaggtgatgcagacgttgtccgatgcactgttggcacccgccaacgcgcagttgggcgatgcctacctggagccgcgcctggcacagctggaaggcgtggcctggccgatgctgcaacagcgtccggccaacttgctgcccccggccttcgacagctgggatgcgctgctgatcgacgcggctcgccgtaccgaaggtgagctggccaagcagggaccgctggccaagcgcagctggggcgaacgcaacacggcggcgatctgccaccccatcgcacgggcgctgccggacatcgccaagcgctggctgtgcatgccggccgaccgcctgcccggcgaccgcgacatgccgcgcgtgcagacgccgaacttcggcgcctccgaacgcatggtggtctcgcccggccacgaggccgacggcatcgtgcacatgcccggcggccagagcggccacccgctgtcaccgtactggggcgccggccacgaggactgggtgcacgggcgcccgacaccgttcctgcccggcaaggcgcagcacaccatgacgctggtgccagcgcggtag

SEQ ID NO: 503029 - DNA, 846 bp, Stenotrophomonas maltophilia
atggtgcgtgagcgcgtgccggctgtggacgatgcgctcgccgcgctgccggccggtgagctgcactggctgaggtgtggcgacctggaggtcgcgctggcgacaggggcaggcgggcgcgtggcgcacctgcgctaccgcggcatggagtggctggtggatgcgcagcaggcgggtccggccgccatcgcgtggggctgctacccgatggtgccgtgggccgggcgcatccgccggggacagttccgcttcgatggcgcgccgcatgcgctgccgctcaatttcggcgggcatgccatccatggcgtgggcttcacgcggccctggcaggtcgagcgcatggaggcggccacggccacgctgtcgctggcgctgccgtacgacagggactggccctttggcggcgttgcaacgcaggaggtcgctctgcagcctcaccgcctgcagctgcgtctttcggtccaggcaggcgagcgcgcgatgccggcggtgctgggctggcacccctggtttctcaagccagagcggctgctgttctcgccccgcgcgatgtacccgcgggaccgggagggcatcgccacgctgcccgcagtcgatcctgttcccggtccctgggacgattgtttcatcgccgacagtgacatcaccctgctgcgtggtggccaacgactgcggctgcggtcggaccacgaccattgggtggtctacgacggcgcgtcacacgcgacctgcgtcgaaccgcagagtggcccgccggatggcttcaccctggcgccgcatcggctggagccggggcagcggctggcgttgacgttcgaactggcgtggtcggtcgacggcgcttga

SEQ ID NO: 503030 - DNA, 882 bp, Stenotrophomonas maltophilia
gtgttctttgaccccgacctgctgcgcgcctttgtcgctgtcgtagagaccggcggcttcaccaaagcgggtgaacgcatgaacctgagccaatccgccatcagccaccagatccggaagctggaagagcaggccggcagcaccttgctgaaacggaccacgagaagcgtgacactcaccgaagacggcgaggacttcctgcgtcatgccgagcagatccttgctgcccagagcctgctggttcggcggttccagaaggctcctgttaccggggcagtgcgcctgggggtgccggagacctatgccggcgaccggttgaccgcgatgctgtcgcgcttctcgcgcagattccctgctgtgcggctggatgtcaccgtggagtcctatggggcactgaacgaacagatacaggcgggaacactcgacctggcagtgaatctgttcctgcaggaggacgttgagtggccgcttctgagacgaacatgtttcgcctgggtcatcggttcggggttcgaacacgaaccggggaaggcgctgccgctcgcactcgcccccagcccgtgcacgcaccgggacgtgtgtatcgatgcgcttgttgaagccggcctggagtggcgcgtcacctttacctcggcgagccagcagggcctgcgatcggccgcaaaatcggggctcgccatcactgtcgctcttcaggacgacatccaggatggcctggtcgtcgcgggcgagggattgggccttccagcgctgcccgccgcgagcttccggctgatgcgcagtgcggccatccggacgccagcgatcgaggcgttggaggagcagttgcttcgcgctgacgatcgcacgtgttcggtccgtgcgctcagtgcggcgggttga

SEQ ID NO: 503031 - DNA, 1548 bp, Stenotrophomonas maltophilia
atgacttccctttcacctgccgctcgagaccgcctgacgctgtcagcggcgtgcttggcttccctgatgttcgggctggaaatctcgagcgtgccggtcatcctcccgatactggaggcagagcttggcagcagcttcagcggcctgcagtggatcatgaatgcctacaccctcgcctgcacgacggtgctgatggcagctggcgcactggcggatcggtacgggcgcaagcgcatcttcgtgatcagcctgctgctgttcggcatcacgtccctggcctgcggccttgcacgaagcggagcggcgttgatcgtggctcgatccctgcagggtgcggccggaggcgcaatgctggtctgcgtgtttacggtgctttcccatcagttcagtgactccgcacagcgggccaaggcctttggcatctggggcgtggtcttcggcatagggctgggtttcgggccggtcatcggtgccggggtcgttgtcatcagcagctggagctgggtgttcctggtgcatgcgccgctggcggtcggtgcaacggtcctggccgttcttggcatcgaggaatccagggcgccgagccaccggacgctggaccttgcggggatcgtctcgctctcggtcgccgtgttcttcttcacctggttcatcacccaggggattcctgcaggcctggccagtacctcttccatggcggccgctctggttgccgtcatcagcctggcggtgttcattgcggtcgagcgcagggtgccggacccgatgttcgacttttccatcttcggcaaccggcgcttctcgggcgcattgctgggttcgatgggcatgaacttcagcttctggcccctcatggtgtatctgcccttgttcttccagcacgggcttggctactcaagcattgcgaccggtctgtccgtcctggcatacacattgccgtcgctgctgctgccgccgtacggcgagcgcctcgctgtgcgcttcgggcccgagcgcgtgattcctgtcggaatctttgccatgggcagcggattgctcttgatggccatcggcgcgggcgcggaaaacgcaagctggttgacgctactgccgggctgcgtgcttgcgggctcgggcctgggggtgatcaatacgcccatcaccaatacgacgacccgttccgtgcccagcgatcgcgccggcatggcatccggcatggataccagcgcccgattcatcagcctggccatcaacatcgccgtcgtgggcttgatcctggtgaaaggcactgcctacgcacttgaagcaagcctgccagggttcgatccttcgcagctgcgattgcttgcggaaggattgtccgcaggcactgcgcgcctggatgagctggcggccactggccaggcggtgtcccctgacgttgcgcagcagtcgctgcttttcggttaccggcttgccatggcttacgccggcgcatgcgcctgtgtcctggcagctgtcagtgcgctgaggttccggggtagtcgaaactccccggcatcgtgcaccaacgagccgaacgtgctgtga

SEQ ID NO: 503032 - DNA, 870 bp, Stenotrophomonas maltophilia
atgccggcgggcctgtcactgcgggcggacgccttcatcaatgccttttcgctggaagtcagcgcgaaagccatgccggcgctgcgcgccgaggcggatcggatcccgcgcggtacggttatctccattccgtacctggccagcgaggatgacgacgcccgcctggccgccgcgcgcacggtgcgcgcgctcggcttcgagccgatgccgcatctctcggcccgccgcatcgggtcagccgcagcgcttgcacgcttcctggaacgtgctgttggcgaagccggagtcgcgcgttgcctgctgattgcgggcgacctggccacgcccgccggaccgtttgccgacagtgcttcgatcatccagaccggtcttctggagcactccgggatcaaggtcgttggtatcggcgggcacccggaagggcatccggtcatgagcagtgacgaacgctggcaggcgcttgagcgtaaattccaggacatcgaagcacgtggcatggcacctttggtcgtcacccagttcgccttcgatgccgataccgtgctggcctggctggatggactgcgcgcccgtggcatcagcgttccggtgctggtcggcgtgccgggtccggccagcatcacccggctgctgcgttacgccgcgatgtgcggcgtaggcgccagtgcgtcgatgctggccaggtatggcatctcgatcggccggctgattggaaccgcagggcccgaggtgttcgtcgatcgcctggtgagggggctgaccagtgcccatggccaggtcagcccgcacttcttcccgtttggcggtattgcgccgtcgctggagtggatggcgcagtaccggcggcgcatttccggcaccggtggctga

SEQ ID NO: 503033 - DNA, 699 bp, Stenotrophomonas maltophilia
atgcgcaggatgctcttcgcaggcacgctatccagcgtggcctgtctgttcgcccccgctgtgatggcggaagatgcccccgaaccaaccgacgactgcgcggagattgcgcggctgatggccagcgacgactttgcggcactcgacgcgatggccgcgcgtttccgcaagggcgagctcaacgccgccggccaatccaggctcggccggttctacatctgcatgtcgcgtgcaatcggcacgtcgcggcaggaggtgcaggcctggaacgactggtctgcatgggccgcgcgctgggttcagcacgcgccgaagtcgccggcggcgcacctgatcaccgcacgaattccactcaatctggcctggagctaccgtggcaacggatacgcccacaccgtcaacgccgaagactgggctcagttccatgagtacaacgcggtttcgcgggcctatctgcaatcgcatgaggatgttgccggcgtcgacccgttctggcacgagatgagcgtgctgatcgcgctgcgcgaaagcgcggatgacgacgaaatgctggcgctcgtcgatcgcgcagcgaaggccttccctgactacgagccactgcacctcattgccatggagcacttcacgccggcctggggcggcagcgcgcagaagatggaagccttcgctcggtactcgatggccagtgcgccgaagtag

SEQ ID NO: 503034 - DNA, 669 bp, Stenotrophomonas maltophilia
atgccctgctcttacccatccatcgcgctcctccgaggccgccatcacatcacagcgctgctcttctgcctgtgctgcgcggggtgcatcgctgacagaccttcagcgcccgacatcaaacctggggagatctcgacagaagcgccggccgccacagtcctgtcgaacgcggacgccacaccgtctcaggcgatggtcgccgtgcccgccaccggcacctcggcagcagccgcgcatcgcgcagcatcatcagccgctcttctgcggtcggaatccgcattggtgttcaaggagggcatctcgatcctggccgccgagaacctgctgacatccagcagcaacatgtccgatgcgatcaaacgcctgtcagaggaggcggcatccagccccgaggtgcaggacctgacccgccactatcggtcagcacttgaacgtgcgatggctcaggaaggtgtacttgaaggtttttcatgcggcctgagcatctgcatcggtctcgtccggagcggaagcctcgccggtcatgaaacttggagccgcaggtttgcgttggatgcggccgcccccacccacagctacgctgacgcgtctgaagattccaggatgggatacgagaacagattcatcttttcgaccgatccggcactgcgcgcgatcagcggcaactga

SEQ ID NO: 503035 - DNA, 579 bp, Stenotrophomonas maltophilia
atgatcctcgacctggtccgccatgccggcaacggtcgcgatgagttcctcgatggccgcagcgatccaccgcagctggcccgcctgccgcaggaactggtcgatgcctacgccgcgcagccctgggagcgggtgatcagttcgccgcggctgcgctcgctgcacacggcgatggccctggccaccccgcgcgggctggacgtggaagcagacgaggaatgggaagagctggatttcggcgattgggacgggcagtcgctgttcgacctgccggaggatgcactcgctgccttccacgccgatccgcatgcgttcccaccgccgaacggcgaaagctggggccacttcgagcggcgcatcgcgcgcgcgctcgaccgcctgctggacgaggatgatccggtgccgacgctggtggtcagccatggtggcccgctgcgcatggtgctgtcgcaggtctgcggcctgccgatgtcgctgtgctgggcactgcgcatcgaccacggcacgcgcctgcgggtatggctggaacgtggcgaagccgggctggcaggcgagctgctggaactgcagcagccgtaa

SEQ ID NO: 503036 - DNA, 1125 bp, Stenotrophomonas maltophilia
atggttgcgaaggatcgcctgcagtttctcgatgccctgcgtggcctggcggccgtatacgtagtgctgtaccacgtgcaatcaatgccggcaccggcactaccggtgtcggccggctggttgcctgccgtgcacatgggagccaccggggttgcgctgttcttcgtcatcagtgcattttccctgtgctacaccatgccccggcaccaagccaccggccgaccgctgctgagcttctacctgcatcgattccttcgcatcgcgccgctcttctatgtgctgttgatgttctccctgttccgcgatggccgcggcgaccatgtaggccattcatggggggagatcgcggccaacctgtccttcactttcaacttgttcccggactgggaaacgggaatcgtgtgggccagttgggccgtgggcgtggagatgctgttctacgccattttccccgcgctctacgtcttggtcggcaaggcgcgcagcgcctggggactgctgatcgggctactggcgctggtggtgctggcctggacgggtgtgctgggccagcgtatccaggcctcgctgggtgactacggatggttgcgccatgccccggtcttcgcgatggggctggtgggcttccacgcctttggtgcactcgcccggttgccggtgccgcgcgcgcggcggtgggcacaccgcctgaacctggcgggtgtgctgttgctgctcctggccgcgtcctcgacgacgtggggtgccgccggtccctggcaatggcatttggcggggctgggctacctggccttgctactgggcttctcgcagtgcccgccgcgttggctcgtgaaccggatcaccgcatggctgggcacggtgagttactcgctctatctcgggcatccgatcgtcatcgcggtgctcggtccggtgttcgcgcgggtgcttgccgtccagggcaacagtgttggctatctgttgtgtgcggcgatgacgctgtcggtggtactgccgctggctgcactcggccatcgattcgtagaagcaccgatgatccgcttgggcaagcggctgatgtcgcccgccgtgccagcgcgcagcgctgctgcaggtgggcaggcagagggcggcgcacgctag

SEQ ID NO: 503037 - DNA, 1842 bp, Stenotrophomonas maltophilia
atgaagctgcagtcccgaatgctgtccctggccgtgctggccgccctgcccgcgctggtccaggccgccgatgacaccaccgcgctcgaccagatcctggtcacagccacccgcaccccgatcgccctgcaggacagcatcgcgccggcgcaggtgatcgaccgcgcccagatcgaatccagccaggccacttcactgcaggaactgctgcgcggccgcgccggcatcaacctgaccaatgccggcgggctgggcaagcagagctcgctgttcctgcgcggcaccaactcgggccacaccgtggtgctggtcgatggcgtgcgcatcaacagcgccgacctcggcctggcgatgtaccaggacctgccgctggcgcagatcgagcgcgtggaaatcgtgcgtggcccgcagtccagcctgtacggtgccgacgccatcggcggcgtgatccagatcttcacccgccgtaacccgggcgactttgcaccgcacttccagctcggcggtggcagcaacggcctgcgcgaggccagcggcggcatcggcggcggtaccgagcgcggctggttcggcgccgacatcgcctaccagcattccgatggcatcgatgcctgccgcggctcggcaacgctgttcaccggttgctttgccgacgaacatgaccgtgacggctaccgcaacctgtccaagagcctgcgcggcggctacaccttcaacgaccagtggagcgtggaaggcagcgcactgcgtgccgacggcaagaaccactacgacggctactacaactactcggaaacccgtcagcaggtgctggccggcaaggtgcgctacaccccgtccgagcgcctggcattgaccgccactgtcggccgcagcgacaacgagtcggacaacgtcggcgacttcggtgcgcgtggcagtgcgcagacccaccgcgacagcgcctcgctgcagggtgacatcggcttggccgagggccagctgctgagcaccggtgtggactggagccaggacaacctggatggcagcagtgccggctatctggtcgacagccgtcgcaacaccggcgtgttcgtgcagtaccagggccgctttggtcgccaccagctacaggccagtgcgcgcaacgacgacaaccagcagttcggcaaccatgccaccggcagtgtcggctgggcgatggaactgggacacggcctgcgcgtcaatgccagctacggcaccgcgttcaaggcgccgaccttcagcgacctgtacgacccgtggagcggcgtgccgacgttgaagccggagaagtccaagagtgccaacctgggggtttcgcagcagggccagggctggcattggggcttggatgtgtacgagacccgcatcgatgacctgatcacctacgatgcgtcgacgttcaggatgcagcaggtggagaaggcgcgcatccgcggcgccgaactgaccggtggcatgctgctggccggcttcgacctcaacgcgcagctgagctacaccgacccgcgcaaccgcacccgcggcagcagccagttcgacaactggctgccgcgtcgtgcacagcagactgcgcgcctggacatcgatcgccgcttcggggacttccgtgccggcctcaccgtgcagggtgcgggcaagcgctatgacgacgcctcgaatgcggtgaaggtgggcggctacggtacgctggatgttcgcgccgaatacgcattgacgccgtcgtggtcgctgctggcgcgcgctgccaacgtgttcgaccgccgctatgaaacagtggcgtggttcaaccagcccggtcgcgagtaccagctgagtgtgcgttaccagccgaaatga

SEQ ID NO: 503038 - DNA, 666 bp, Stenotrophomonas maltophilia
gtgaccgcactggtcctgcagcgcggcaccgaaccgccgctgcagccctgcgagagcgtcacccccgtgcgatcactgctgcggcagccggaaatccgcctgcttgcgctgttgatgctggcgatggggatgatcgtcggtacggtcgacatcaccagcgtcgccttcgccgaacagcggggacagccgcttgctgccagcgcggtgctgtcggcctatgcgctgggcagctgcgcggcgggcctgctgttcggtgcacggacgctgcagataccgctaccgcgcctgttgctgaccggcgcagcggccaccgcactggccacggtgccgctgctgtgggtcggcagcctgccgacgctggccctcgctgtgctgctggccggggtgttcttcgcaccgacgatgatcgtggcgatgtcgctggtcgaacaacacgtgcccgaatcgcgcctgaccgagggcatgacctggctgctggccggattgaacatcggcgtggcgctgggcgcagcgctgtccgggcagagcgtcgatgcggggggtgtgcgcggcggttttgtggtggcgctggcggcaggcggcggcgtgctgctgttcgccgtgctcgcgcagcgtgcgctgcgcccgtctgccgcgtccagatctcccgaaggcatcatcccgtga

SEQ ID NO: 503039 - DNA, 294 bp, Stenotrophomonas maltophilia
atgtcccgtatcacccgtcgtagctacaccgatgagttcaagcaccaagccgtggagctggccgagtcgctcgggccggccgcagcggcccgtcagttggagatgtcggtcaagacgctggcaaattggcttgacgcggtccgtgctggccggtcgttgacctctgaggctcgcaggccagccaccgacctggaaagcgagatcagccgccttcgggccgagaacgccaatctgaagatggagcgggaaatcctaaaaaaagcggcggcgttctttgccagagagtccaagtga

SEQ ID NO: 503040 - DNA, 1098 bp, Stenotrophomonas maltophilia
atggacaagccacgctacatcgtcgatatcgtcattgcggcgccgggaacaccgcttctcgacccggtaacgcagcagccgctgcgtaatccggatggttccccgcagacatccgggccggggcacatgttctacgtcctgcgagcaccgggaaaagatccggcgagctacggctttgcaccgatcgagcacggcagcgtgaacggaccgggcgacatcgtggacagcgatgcaaagacctacaagaacccgcattacacgcgctctctggaaatcaccgaagcccagtacaacaagctcagagcgttcggcgacgatccagtggcgcacggcttcagcaagcactatgccgacgtgcgtcacaactgcgtggacttcacctgggacgcattgaatcatgccggcatccagcgcaagcacagcctggacgtgaacagcatcggcggccccgtcggccagttgctacccgatgtccgcattccgctgggcatccagtcacagggcaaggacggttaccgccccctgcgcaacatccatggcgtggacagcattgaaccgcccttccccaacagcgaactcaaccgcaccaccacccatcccctgcccgagcgcagcttgaagcagcgactgctcagcgaaaccgatggcgttgatggccccttgggcgagcgtctggctgcggacgcgcgcgcaccggggcacagccttcatgccttggaccagaaagtgcgtaccgcactcgcccaggccagcgaacagcagggactgccccccggacaggagcatgaacgcctggccggccatctgacccacgcggcagtgcaggccggcttcagcgaaaaggacacgctgcaggtggcattcagttccaaccgcaccgccgaggcacccggctacgtattcctgcatcgcagcggcgacaccgcctcgccggaccctgccgccaatcgccagcgcctgtccctgctcgatacacagatgggcgacgcggatacgctgtatcagcaggccaacgtgcagcagcaatcccgcgacgcaagccggctggcgcaggacgagcaacaggcacaacagcaggcgtcgccgcgcatggcctga

SEQ ID NO: 503041 - DNA, 381 bp, Stenotrophomonas maltophilia
atgccgctcgcccgcatcgatcttcgcaaaggtaaatccgccgactacctgcaacgcgtcggcgaaaccatctaccaggccatgcgcgcggtgggcgtgccggaaaacgaccgcttccagatcttccaggaacacgcgcccggcacgctgatccgcgaccccggctacctgggcgtggatcgcaccgacgacttcatctgcatccagatcatctggaacgaagggcgcacgctggagcagaagaaggcgctgtacctgggcatcgccgacggcctgcatgcggcggtgggcatccgccgcgaggatgtgttcatcaatctggtggaagtgaagaaggagaactggtcgtttggtaatggcgtggcgcagtacgtgagttga

SEQ ID NO: 503042 - DNA, 129 bp, Stenotrophomonas maltophilia
atgaaagatgccgtgaactcgcaggctcagggcaaccctgtgctagtgacctacggctgccacgacaccaagggcgtgttcattggcccggcggtgatcattgacggaatctatgcagaacagcagtga

SEQ ID NO: 503043 - DNA, 459 bp, Stenotrophomonas maltophilia
gtggtgccatacgaactggcgctggcctgcttgggacacgatctcgtcctgatcttcgacgtatcccgcgattacgagattggcgcgtacctcggcgaccagtacggggcgctagccgcagccctgcgtaacggggtcggccgtggcaatcccctccagcctagtgtcttcctgcgcgaaatcgatgctgccctgccgagcagtgttgtctcgggagatcggcccacccgggccgacgtggtggggatctatcgcgacgtggaagaggctaacaaggtgtatctgtgtggctggcgcgacaacgatgttcgtggagagcgcgtgtccgcagccaaccttgccaagacccggcgcctgctcggccaggctacctacgactggtgcaagcgccgaaacatcagtacgtgctgggcggatgatccaagtcgggaaatttctgccggcttacctagtctgtag

SEQ ID NO: 503044 - DNA, 180 bp, Stenotrophomonas maltophilia
atggaattcaagcttggtgacaaagtaaagctgaagagtggcgggccagtgatgactgtgagttccgtcagcgacaaggacgttgaatgccagtggttcgacccgaagggcaagctgcacaaagagaacttcgcggccgtagttctaacgccatacaaagtcggcgtttatgtcgtctga

SEQ ID NO: 503045 - DNA, 561 bp, Stenotrophomonas maltophilia
atgagctccagtaagcagatgactcgccggcagatgaagatggggctgtacaagttcgccctggctcgttccgactttttcgccagccgaaaggcctgcgaacacatggtcaagcatgtgaacgggttcgatcacccgctctactatcacctgtacgcatcctctgtcgtctcctacgcaaagcctttcgtgaactccgccttgggtgtgctcccaagccgatggggtaagtttgaacattcatggatgcgtgacgtccacaacgatgtgattagggcgcggcacgaggtaatcgcgcacaatgaccagaatgcccgcaagttgtcgatagtgccgcctggtgccgctcctgacgatgtcattccggtgtcccggattgggatcgcattgaagctcgaaacctactacatcagtggcggcttgttctcctcgcttggccaggtctgcgactaccagatcaaacgcctcaacgaggcaatcgatgatgcgcttgattccctctacgcaggacgagaactgccgccggaatctttcgtgttgacgttggacgacgatttgtag

SEQ ID NO: 503046 - DNA, 165 bp, Stenotrophomonas maltophilia
atgcttttacagctgacgtctccccactcgaatgaccgtgcggaacacaggcgcctgtaccaggcgggtgcgtcggtggcgggcaatggcgaggcgcatccggtcgcgatggcgtgcagtggggcgcgatggcttctgggctatgctgtcgacacgtgggactga

SEQ ID NO: 503047 - DNA, 294 bp, Stenotrophomonas maltophilia
atggagagaagaaggacattcagccgcgagttcaagctcgaggcagtcaggttggtcaccgagcgtggcgtggctgtggcccaggcagccaaggacctggacgttcacgagaacgtgctgcgcaagtgggttcgtgagttgcgagaggagccccaggaggcgttccctggcaacggcaagcagaaggcccaggacgcggagatagcgcgactgcgcaaggaggttgccaagctcaaggtggagcgcgacatcctaaaaaaagccgcggcctacttcgcgaaggagtcgatgtga

SEQ ID NO: 503048 - DNA, 4959 bp, Stenotrophomonas maltophilia
ttgacgggcacggcgagctactcgatcagcgttgctgcgccgaccatcacggtcaccaatgtgccttccgcagcagccatcaatacgccgtactccttcacgctgaccgccagtggtggcaatggcccctacagctttgcgctcgacgccggtactactttgccgaccggactggtgctggccagcaacggggccatctcgggtacgcccaccgcattgggggtgacgaacttcagcgtgcgcgtcaccgacagcagcacgcctacgcctttcttctcggcgaccaacctgtcgatcaacgtgcagaacgtggtgccgccggtcgccaatccggtcagcgcgacggttgcctacggcagtaccagcaacccgatcaccttgaacatcaccggtggcgtcccggcatcggttgcggtcggtacccaggccgcgcatggcactgcaaccgcctcgggaacctcgatcacctacacccccacgccgggctatgcggggccggacagcttcacctataccgccaccaatgccggtgggacctcgagcccggcgaccgcgaccctcacggtctcgccgccaacgatcacctacgcacccgccaacccgcccgcaggaaccgtcggcgtggcgtacaaccagtcactggccggtgccagtggcggcaccacgccgtacagctacacgctcaattcgggcagcctgccgcctgggttgaccctggccagcaacggcagcctgtccggcacgccgaccgccaacggcagcttctccttcaccgtccgcgccactgacagcagcaccggcaccggcccgttcagtgccaccagcggcacgctgacactgaacatcgctgccgcgaccgtcacctatgcaccgggcaatccggctgccgcaacggtcggcacggcgtacagtggctcgctggccagcgcagcgggcggcaccgcgccctacagctatgcggtcacctcgggcagcctgccggcgggcatcacgctggccagcaatggcagcctggcaggcacgccgacggcgggcggtaccttcaccttcacggtgaccgccaccgacagcagcggtggcaccggacccttcagtgcgagcagcgcggcgctggcactgaccgtgaacgacccgacgatcctgatcgcgccgagctcgctgcccaatgccaccgtggccgcggcctactcgcagaccgtgaccgcttccggcggcaccgtcggctacagctacgccgtcaccgccgggtccctgccgccgggcctgagcctgtcgagcggcggcgtgctcagcggtacacccactgcaggcggtacctacaacttcacgcttgcggccaccgacagcagcacgggcacgggcccgtataccggcacccgagcgtacgcgatcaccgtaagcgcacccacgctgacattgacgccgacaccgggcagcgtgctcaacgcaacggcgggcgcagcggtgaccggactgagcttcactgccgccaatggcaccgcaccgtacagctacgcgatcaccgcgggcgcattgccacctggcgtcaccctggcctccaccggcagtctgtcgggtacgcccagtgccaccggcaacttcaccttcaccctcaccgccaccgatggttccagcggtccaggcgctcccttcactgtgtcgggcagctacacgctgtcggtggccgcgcccaccatcacgctgtcgccggcaaccttgcccgcgccgacgatcggcatcgcgtacagccagacgttcgtggcttcggaaggtcatccggccacgttcacctatggcgtcaacgcgggtgtgctgccggcaggcctgtcgttgaaccccagcaccggcgtgctgagtggcacgcccacccaggcgggcgccttcagcttcaccatcagcgccaccgatggcggcggattcaccggcagccagtcctattcgggcgccgtggcgggcggtgtcgtcgtgctgccggcggcaagcctgggcgatgccagcgccggcaccgcctacaaccacagcttctccgccagtggcggaacaccgggttatacctacgtgctgctgagcggggcattgcccgcaggcctgtcgttgtccagcgccggcgtgttgtccggtacgccgaccgtggcgggcacgttcaacttcaccgtgcgggcaaccgacagcagtaccggtaccggtgcaccgttcactggcagccagagctacacgcttgtcgtgttggcaccgacgatcacgctggcgccttcctcgctggcggcagccactggcggccagctctacgcgcagaccatcagtgccatcggaggcaccggcggctacacctacagcctgtccagcggcgcattgccgccgggcatcagcctgagcagcgctggcgctgtgtccggtacacccaccacccctggcacctacgccttcacgatcactgcgaccgacagccacgccttcaccggcagccagacctacagcttcacagtcactgcgccggcgatcacgctcacgccggccacgttgcctgcggcggcgggcagcactccctacagccagacactgaccgccagcggtggcaacggcggttacaccttcagcctgactgcaggtgcgctgccaccgggtatcgcgctgagcagtggcggcgtgatcagtggcacaccgaccaccgtcggcagctacaccttcaccgtgcgcgcgaccgatggtttcggcttcaccggcagccaggcctacacggtggcggtgaatgcaccggccattgtcttcatccagaccacgctgcccggtggccaggtcgcaacggcctacagccagacagtgagtgccggtggcgggagtggcagtttcacctacagcctggccacaggcgcgctgcctcccggtatcgcgctgagcagcgccggtatcctcagcggcgtgcctgcaactgccggcaactacagcttcaccgtcaccgccaccgattccttcggctttaccggcagccaggcttacacgctgggcatcaaccagccggtgccggtggtggtgaacgatgcggccagcacgccggccaatgcggcagtgagcatcaacgtctctgccaacgacaccgggccgatcaccagcatcgcgatcgtgcaggcgcccacacatggcacggcggtggtcagcgggctggacgtggtgtacaccccggccaccagtttcttcggcaacgacagcctgacctacaccgccaccggccccggcggtacttccacggcggccacggtgagcatcaccgtcacgccgctggcggtgccggtggcggcgacgcacagcgccaccgtgctggccgggcaatcggtcaccgtgcaggccgaggccggggcgaccaatggtcccttcaccgcagtgaccattacccgggcaccatcgtcaggcactgcggtggtgcagggcaccggcatcgtctacagcgccgctgccgacgcgtccggtgtcgtcgatttcgactacacgctcagcaacccgttcggcgcatcggccccggcgcggatcagcatcaacgtcaatccacgcccggtggcaccggcactgaacgcttcggcgattgccggcaccgtggtccacgtggacctgaccacgaccgcacgcggcggaccgttcaccgccgccaacgtggtgtcggtctcgccggccgaagcgggtaccgccagcatctccgccagcggcaccggctacacgctggccttcaccgcggcggcgacgttcgggggtgcggtgcgcatcacctacacgctgagcaatgccttcgccacctcggcgcccggcacagtggatgtgatggtcaagccgcgcagcgatccctcacgcgatgctgaagtgctgggcgtgctcgacgcacaggtggagggtgcgcggcgcatggcgatcggtcagatcggcaacttccagcggcgcctggaaagcctgcgcgccggcggcggccgcagtggcttcagcaacggcatcaccttcagctcggccagcagccagcgccgtgcgcagcagaccgagctgctgcagaagggcatcggcgccagcggcgaggcactgtcgatggtcgaggaaccggcgctgcagggtgatgccgcgcctgcggccacctcggccgacggcttcgcgttctggaccggcggtgcggtgaacgtcggcacgctgaagccgggtgcaggcagcaacggcatcgacttcaccacctccggcgtcagcccgggtgcggaccgccagctgggtccgtcgttgagcctgggcgcgggcatcggctatggccacgacgcgtcggatatcggtcgcaatggcagccgcagcacggtcgatggctacagcatcgccggctatgccagcttccatccagaaggcgggttctatgtggatggcctgctgggctatcagtggctgaccttcgatgcacgtcgcttcatcaccgacaacggcaataccgcctatggcagccgcgatggcaggcagtggttcgcctcgttctccaccggcttccagcaccgtctggacaacctgttgctgaccccgtacggacgcctggacctggcccgcgcaacgctggatggctatcgcgagcgcggcgatgcggtgtacgcgctcgactacgggaagcagacggtgaacaccagcaccgccaccgcaggtgtgctggcgcagtggtgggtgaagcgcgactacggcatgtggacgccgcagctacgcgccgagttcggccatgacatgcagggctccagcgaggccttcatgcgctacgccgacctgatgtccggcccggtctatcgcaccaccctgggccggcagtcgcgcaaccacacgctgctgggcgcgggtatcggcctgcagacgctgaagggctggtcgctgcgcgccgaataccagagccagttcgacagcagcagccgcgacaaccagggcatccagatcagcgtgcagaaaaccctgccaccgtga

SEQ ID NO: 503049 - DNA, 201 bp, Stenotrophomonas maltophilia
atgcgctacgggttccggggtcggatccctgtccgccaggaaagggctctgcccccggccgcaggtcgagcaagctcgaccaccaccagaggcgtggccggctacagcttcatgttgaggccgacgaatacgctgcggcccggcgccggcgagaacatggggcgggcgctgtcccagaaaaagctgtcgtaccaggcgtag

SEQ ID NO: 503050 - DNA, 261 bp, Stenotrophomonas maltophilia
atgcacaatgagttaagttgtcgaatctgtggttacatttccgatgcgccccattggggtgaggacgggaggacccccgattttgagctgtgcgcttgctgtggggtcgagcatggctatcaagattgcaacagagtgtcgtgcctgaaatacagggaaaaatggatcgccgaaggggcccggtgggaggagccgaagatgcgcccagatcgatggaactgggaggagcagcttaagaatgtttcggatgaatatttgtaa

SEQ ID NO: 503051 - DNA, 603 bp, Stenotrophomonas maltophilia
atgggaaaccccgaggcccgggcacgaaagctgctgcgacgcgcaggcaccctgcgcgcccgcgaactggtcactgccgggatcgcccgcgcccagctgacccgcctggtcgaggccggtgcactgatccggttgtcccgtggcgtctacgcgttggcggaaagaaacagcgacgacgccgatgatggactgcagatcatttcagaacgcctgccgcacccccgtctatgcctgctgagtgccctgcgcctgcatggcctgaccacccaggcgccattcgaacgctgggtctccatcggcaacaacgaccgcgttccgcggatcgactggccccccctccgtgtggtccgcatgtcggcaacgaccctcaatgtggggctggaagaacgtcgcgtaggcaggcgtctcatatacgtcagtaacgtagccaaaaccgtcgtcgattgcttcaagttccgcaatctcgtaggacttgatgtcgcacttgaagccctgcgtgacgcgcttcacagccgtgcaaccaccctggatgcgttgatggagtatgcgcggatctgccgcgttgccagactgatgagaccgtacctcgatgccttggcgtga

SEQ ID NO: 503052 - DNA, 693 bp, Stenotrophomonas maltophilia
atgttgtttgcagtgtggttcgacgcgccccaccgtcccacgcgggatgccgactttctgcgattcggctctgcacatcccggccatctgctgcacatcgcacggtcgctctgcgcaatagcgggcgacgacggcctgtgcttcgacccacgcagcatcgccatcgaggccacccgcgaagaagcggagtatgaggggctgcgaatgcgcctgatagcacatcttggtcgatcgcgctgccacgtacagtgggacgtggggtttggcgacgcggtgattcctccaccgcaggaaatcacctacccggtgatgctcgatggctttcctccaccgtgcctgcacgtctatccgcgcgaaaccgtgtttgccgagaagttggaggccatagcggcactgggcatcgctaacagcaggatgaaggactacttcgacttgctggcactgatccgcgaagacgccatggatcgcccgcacctcattgcggccattggcgcgacgtttgatcgacgaaggaccccggcgccaacgcccctgccctacggactgactcagtcgttcgccgcagatacccagaagcagacccagtggcgcgccttcctgcgcaggaaccgcctgatcgcgccggatctctcttcggtgattgccgagattgccgactatctggacaccctcgccacaaccctgcagtcctga

SEQ ID NO: 503053 - DNA, 657 bp, Stenotrophomonas maltophilia
atgctgccaatgagaattgttggaaagttcgaaagcgttgcaactttgtcgctggcaggcagcggatggcgattcttgccaaatgcgacattcttcgccgctcgcaccgtagaatcgagtgcgctcaaccacttcgtcgaagtgacatcggcttcagtggggttgccgcgctcagcggtgccgctacgctgggtagatgaaaattctcttgatcgccttcttgctggcctcttcgccggacgtcatagagcccggctacaggatgggcagctacaaggaaaatccgtcgccgatgccgggcacgttgaaggcattgggcgcacgatgggagatggactacagaacactacgccctgccttgttgaaagcggggtggggcggaataccacgcgagtactcgcatccgaccgtgcttggatttcccgaggtcaattgtggtcgcggctggcaggcggtctgctggtccatgttccacaagaatggccgggatgtttttctgcaactgcatcccacagacgactgtcgccttatcctgattggcgcagagtgacactttcgccatcgccgtcgtcgagctgtttgttgatacccaggcattcattggtcgggatgccggaggcactaccggttttcggggttcccgctgctgaactgtga

SEQ ID NO: 503054 - DNA, 273 bp, Stenotrophomonas maltophilia
atggctgtctccaaggcaccggccatcaccctggacaacgtgaaggccgacgagctgaaggcgggtgacaacctgctcaagcagggcacgttgaacttcaccggctgcatcggagttgccaaagcgaagaagggcgataccggcattgaagtgcccgtgaccggcgccacggccagctatacgctgcgcgcgggctattacctgcccacgaccagcggcgtcaacgcgggtgccgtggagacggccattaccgtgactgcactctacgattga

SEQ ID NO: 503055 - DNA, 501 bp, Stenotrophomonas maltophilia
atggagggactccccatgacagacatcggaggcgtcacccatgtctatccgcccaatccgtcattgaaaaaactcgaaacgttctccatcactgccaacttgcgcaccaagacctgcacgctggcaggcacaccagtggtcttgaaggacgtatctgccgacgagctgcctgccagcggaagcagtgccgggggcagggacttgagcgttgcgatgacctgtaatggggcattcccggtgaacttgatgctgaccgatgccaatgccacaggcaataccggcagccggctgacgccgaccaagaatgcggacgcacaagcggtgagggtagagctgctacgcgagggcgtgcccgtcgtgctggggcagacgtggacgctgccgcagagccagaacgggccgcaggatattacgctcagtgcacgatactatcgcgaggcaggagctttcaaacccggagtcgtggagggccaggctaccctcaccgccacctatcggtga

SEQ ID NO: 503056 - DNA, 519 bp, Stenotrophomonas maltophilia
atgtctttgcgccggcaaaacggcttcacgctggttgaactgatggtcacgatcgccgtggtggcgatcctggcgaccattgcgttccccagcttccagagcacgatccgctccaatcggatcgcctcgtcgggcaatgaaatcaccggcctgctgtcattggcgcgcagtgaagcggtgcgcaacaagcggggcggcggcgtctgtggcagttctactgggaccagctgcgacaatgcctggacatcggggatgctcgcctggtccgatgccaacggtgacggcgcgatgcagacgggtgaggcggtgttgcgcttcgtgaccatttcttccgatgcgatcagcgtcaccgctccctccgacagcgtgattgcgttcgacaaccgaggccgccgccgcgccgcggcgacccaggaaatcgtgctgcagcccaagagctgtggcagcgatgcacttcggcgcacactgaccgtcaatgcggcgggccagatcacgtccaccaaggcagcctgccaatga

SEQ ID NO: 503057 - DNA, 477 bp, Stenotrophomonas maltophilia
atgaaccgtcgtctcccgtcctttgcccggcgccagggcggcttcagcatgatggaagtgctcgtcaccatcatcgtgctggcgttcggtctgcttgggttcgccctgttgcagaccatgaacgtgcgcttcgtgcagagctcgaactatcgcacgcaggccaccaacctggcctacgacatgctcgaccagatgcgaagcaaccggtaccaggccgcgtggtataccaacgctacgttcgccgccaactcgatcaaatccagctcatgcacccgcacactgggagcgggcctgggcgtggccagcaacatcacccgatggcagtgccaggtcgtccaggcgctgggggaaggcgcgagcgctacggtcctcaacgccaatggccaggtcaccgtggccatcgcctggggtgaccagcgctgggatgccagcaacccagacacccggaccacctttaccctggtatcccagctatga

SEQ ID NO: 503058 - DNA, 1167 bp, Stenotrophomonas maltophilia
atgagccttcgtcccgtcccgccgcaccgggtggccggcatttcattgatcgaaacgatgatcgccatggtcatcggcctggtactgatgctgggcgtcgcgcaggttttcctcgcttcgcgggcggcctcgcggctggccgagggcaacggacgtgcgcaggagaatggtcgattcgctctcgagttcctgcagcgtgacatccgcatggcgggccatttcggctgcgtgaacgaccaggcgcatttcgtacgtggcgagggtgatccggtcatcgataccggtgccgccaccggctcaggtcatccgctggatttcagcgtgacgatccagggctatgaggcgccgaacacggaaccgggggcgaacctcaccctcggcggctcctgggcgacgccgaccgcactcccggcgtcgatcgccgcactgtctcctcgtggaggcagtgacattctggtgctgcgttatctggcgcccgaaggcgttccggtcaccggactggcgccaagcagcaacagtgtggtggggtttgacaccaccgctggggcccgcatggtcgaaggaggtgttgccgcgccgaatgtgttcggcgtggccgactgcagccacgtcaacgtgttcaagggcacctacgcggccggcaaggtcacggccaatggttccaacctggggcgatacaccgtgcagccgaccggtcagaccatgatctatcgggccgagtcgttggtgtactacgtaggaacctcggccaccactgggcagccggcgctgatgcgggcgcgtgcggacggcaacaacggttacggcacgccggaggagctggttgaggggatcgagaacctgcagctgctgttcggtcttgacagcacggttgccatcagcaccacctcgccgccgaccggcaacatcaccggactgtccaccgccaccggcgtgactgccgctaccggcgccgccggtgcggcgcagtggcgccgcgtcgggcaggtccaggtcggcatcctcgcccgtagtcctctgccgtcgcaggcagaagctcctgccaatgcagtcaactatccacgcgcattgggcgtgggctttgcgccgggaagcccgagcgatgggcgctaccgctcaacgtacgaatccacgattgcgctgcgcaaccgcctgttcgggaactga

SEQ ID NO: 503059 - DNA, 510 bp, Stenotrophomonas maltophilia
atgaatgctcgagtccgcaagcgccccatggcccgtacccagcgtggtgcggtgctctatgtggcattgatcatgctcatcctgctggcgctgatcggcatcgccggcatgcaggtcgccggcatgcaggaaaagatggcgtccaattaccgcgcgaccaatgtcgctttccagaacgccgagggtgtgacccggcgcagtgagcatgcactcgagaacatcgccaaccgtgttgcggcggccagtgatgcgccgttggtggataccgatgtccagcagaactgtgatatcgccttcgatccggtggcatggggccgggggcgtgcactgacgacccgtgaagccgtcaatgtgcgccgtatcgactcttgtgtcatcggtggcggttcgctgtcgatgggcaagccgctcgacccggtgacgccgatctaccagatcaccaccttcgctaccgataccccgacggattcctcgtcgacggcgtcgatcgattccatcttcaagccctga

SEQ ID NO: 503060 - DNA, 3867 bp, Stenotrophomonas maltophilia
atgtcccgtcgaaccccccggatcatcgctgcgtccgctgtcgtcctgctgggcgtgggcggctatttcgcctacagcctgttcgcagcgcaagggcagggcgatctcgcccaggcaccgcttaacaacaccacggccatcccgcccgccttcatcatggcggttgatgattcgaactcaatgacgttcgagcgcatcttcaaggggggggatggtcgcatgcaatggacgggcagcagcttcttcagctccgcgggtgtgttctacaacgtcggtgagggctgctcaaccaactcggcggactgctacctgtatcttttcccgcattcgggattcgccgcgtcgtactcgccgggacgcgccatcccgccaatcgattcctttggtttcgcgcgttctccgacctacaacgcgagttactacaaccccgacgtgacctacagtccctggaaacttccccaggccgacgcgagcaacaacaccctgtggccggatgcagacttcggcaacgcccgtaccgacccgcgcgatcccggcgtttatggcaccgatttctcgactggatacggcacgatttacaacctggcctatcgtgaagtcaatggtgaagccttccagttcatgacggggatgacgatcccggcgggcacccgttatcgctccactgcccgtagctgcaactcgaccagcagcaatggcctggccagttccaacggcaactggatcaccttggcgaatgatgtcgatgtgcgcgccaactgcaccgtgcagatgggatatgtaccggcgacattctatttgcccgccaatgcgccggcaccggccggctacctgaccgcggacgtgaaccggcccttgatccgcaatgcctgcggtccaggctgcgacatgcgccgctatcagatcctcgacgcgaactacgcgcagggctcgccccagctcgccgaggcgaagaagaatttcgcgaactggttccagtaccaccgcaatcgtatcctgtcgatggtgggctcctcttcgcatgcgatggcaggcgtagagaacatgcgtgtgggctacttcaccatcaacaaccgccagaacgtgaccatgttcgacgtggctacccagcgcgcggacctgtttgcgcagatttatcgactcaagcctgccggcggtacgcccaaccgacaggcggtcgcgttcctcggtgaacagttccgccggaccgacagtggcgccccggtcgttcgcgcctgccagaagaatggcggcatgctgtttactgacggttacaccaatgccaacaatgtcgccagcggctatgggaatgccgacgcggccgggggcacccacttcccgggcgcgccttttgccgatggttacagcaataccattgccgatatcgccgcgtcctattacgccggcgcgtccaccccattgcgtaccggcgccagcttcccggctggcctggtgcccgttccggagcagtgcaagagtctcgattcctcttcgccggactggaagcgattggattgccagaccaacctgcacatgaatttctacggtgtgacgctgggggcgcagggcaacatctacgaagtcaatcaggcgtcgactgatgatccttacgcaaacccgccgaactggaacgccaacggcgacccggtgacggccgacgacggccgcgtgatcgacgaattgtggcacgcctcgatcaacagtcgcggcgagttcatcaatgccaagacgcctaccgacgtgaccgatgcgatgcgtcgggtgctgtcggcggtcagttcgggttcttcgccgtcgggaacgttcgctcagagtggtgcccgcatcggcccagggtcgctgacggtcgtgccgatgtacgatgtccagaacaatggcactgactggttcagccgcctcaccgccagccaggccacgatcaatccgacgactcgcgaagtgcagtacacgcgtatctgggaagccagcgagcagttccctgccgccaccgcgcgcaacgtttatttcaatgatgcaggaacagtgcgcaagttcggcacgaccacggtgtcgttggcggggttgtgcggcctctcgtccacgcaatatccggcgcagtccatctgcaatgcctcaacgctgaccgcgctgggggttgatgctgcggcagcggcaaattatctgcttggcgacaccagtcgcgaggtccgtcgtggtgggcggctgcgcgatcgcacgacgttgctgggcgacatcatcaattccacgccggtcatcagcgcgccgggagacgacttcggctatcgcgcattggcgggtagcctcgggaccacttactccaactatctgacggcaaaacgcgcgaaccgccgctatgtggtctatgccggagccaacgatggcatgttgcatgcgtttgatggcggcatggatgcggctggagtggtgggtggccagggcggccgcgagttgtttggctacattccggccacctcgtatggccacatgggcaatctgctgatcccgaacgatcccgagaagaagtacgcacagccgttcgtgcacaagtacttcgtggacggtccgctgaccgtcggcgacaccttctacggcggtgactggcatacgacgctggtaggtaccaccggtgccggcggccgtggcgtgtttgcgctggatgtcagcgcgcccgacaccttcgctggtgccaaccgactgtgggaaatcaatgatctcaccggcgatacggcggtccgcgccaacatcggccacgtgctcggaaagccggtcattgtgccggtgcgtgcggccgatggctcggtcagctggaaggcgattttcggcaatggctattccagcgccagcaacaaggcagtcctgttcgtggtggatatcggcaccggagcgacgcctcgggtgcgcatgattgaagccagtgaaccgggctcgaccattgcgggcaagaatggcctgggcaacatcgtggtgcttgatcgagtggacagcacgcgtctggatccgaccacaaacgcccccatccgtatccgcgatggctacgccgataccgtttatgcggcagacctgaagggggcggtgtggaagttcgatctgctgtccgatgcggcaacggtaacggtaccggcgttcaccaccgggaccttcgtgcagagcggttccacctaccggcagcctattaccggcggtctgcaggtggcgtccggtgagagtggtggcgtgctggtgatgtttggcacgggcagcttctcgttcaacgatgacacgctgccgatctccggtacccagatccagagcatctacggattcaatgatctgtccgctggtgtgatcacaaccacgttgacgcgttccaatctcacgcccaacacactgtccaccaccgggggcgcgcgcagcatccaggcgggtacggcaccgaccgggtcgcgtggctggtacgtggatctccccgcaggtgagcgtgccgtgggttatccggtgcttgcttcaagcacgttgttcatcacgacctatgcgcccgaatccatcaccagcggctgcagcaccagtggtgccaactggctgctggggctgagtccgcggaccgggttgggagcactggcgggcatgcggcttgggtcgatcacgggtacggcggcagccgaaggtacagctggtctgcagttgagtaccggcggcaatgctccggtcaaggatgtgggcgtctcggtggtgccccgtctgcagccggccagtaagtcctcggacgatgccgagattccgacgattcccagtggcgctggctgctggatcgcggtcaatgtctcaggcgccgcgcccatgtatgccccctatccctgcggtcgccagtcctggcgccagatccagtaa

SEQ ID NO: 503061 - DNA, 450 bp, Stenotrophomonas maltophilia
atgttccccacgaatgcagggtcgttggtgcgccagcctcgcgcgtttgcgcaggcgaagggattcaccctgatcgaactgatgatcgtcgttgccgtgatcgcgatcctggcagcggtggcttatccttcctatgtcgaacaggttcgcaagtcgcgtcgcgcccaggcgaaggcggatcttgtcgagtacgcccagctggccgagcgctcgcatacgaccaacaacacctatgccaacttccggttcagcggcggcgctacgacggcccagtcgccgcgcgaaggcggcacggcgcactatgcggtgacggtacaggccgcacaggggacgttcacgctgaccgcgactccccagggcgaccaggccaaggacaagtgcggcaccctgtccatcaatcaagccggcgtaaagaccgcaagcgcgtcgacggtggcggcctgctggtga

SEQ ID NO: 503062 - DNA, 660 bp, Stenotrophomonas maltophilia
atgacccattcccaacgtcttttggccgtggccgccgcgtccgtgctgtccttttcggcgtccgccggttccatctccgttggccccaccaccctgatggccgatacctcggccaagcacgtcgccgtgacgctgcacaacagcggggacgcctcggtgcgctaccaagtcaaagctgtgggatgggatcaagccacggggcagaacgtgttatcccccaccacggagatcgtgggggcgcccaccttcgtggacgtcccgccccaatccaagcgcaccgcccggttgatgcgggtgggcgcactgggcgagcggcgctactaccgcgtgctgctgatgcagctcaaggaccctaacgcccaaggcgtccagttgctggtcaaccaggacttgcccgtggcctttgaagcaaccaacgcacccatcccccaggtgaccgtccaagcggtggccaagggctaccgcctgaccaaccacggccagaccgcggcccgcgtgttgtccatcggcccggccggtgggaagccgtggcgcgacggtgcattgggttggacgcttccgggggcctcgatgacctacgagacccaacccggccagcgcgccgaagtgctttcgatcaccgtcaacggccagcccgtcaccgtccccgtggggcggtga

SEQ ID NO: 503063 - DNA, 1029 bp, Stenotrophomonas maltophilia
gtgtccgatgccacccccaacgaaagctcccttcagcgccactcccgcgacgtcgtcgaacgcctgattcggcaaatggaggagggcaccggtcccttcctcaaaccctgggacgcccgcgtggacctcgggttgcccatgaaccccacgacgggcaagagctaccttggcggaaacctgctccacctgtgggcccttcagagcgcctgggacacccaggacaaccggtggatgacttacaagcaagccgcggccgtgggcgctcaggtgcgcaaaggcgagaaagccagcgtgattgagtactgggactggtcgccggtggaagaggccaagaagagcggggaccccgatctcatcgccaaggcccaccccaaggtcttcttcccacgcgtgttcaacgcgatgcagatcgatgggttgccggcgttgatcctgccacccccgcgcgcagagcccgatatccatcaggcctgcgaagcggtgctcaagggcagcggggctgagatccaccacgacgggggcaaccaagcgttctaccgtccgatgaccgacagcatccacttgccccagcgcaacagcttccactcggccagcggctactacgccaccgcgttgcacgaactgggccactggaccggctttcccactcgcctcaaccgcgatcagaaaggggcttttgggagcatcgactacgccaaggaagaactggtcgcggaggtgtcatccatgctgatgggcgaacgcctgggcattggccacgatcccacccaacacgcggcttacgtgaagtcgtggatccaaatcctccgggacgatccccgggagctcttccgagccgcggcggcggccgagcgggtggtggagttcctgaaggtgcccgagttggttcgcgagccgctcccgaaggttgagcaggagcggcagcctgtggcggccaatcagcaggagcttgaaaaacctaatggcacgaaggcccgcacgaaagcgcgtgaggaggccaagcagaggagccacgtgatggtggcctga

SEQ ID NO: 503064 - DNA, 903 bp, Stenotrophomonas maltophilia
atgggcacgttggttgtcaggcactatccgaccaagctgtttctcaaggctgcggatcacacttacgtcgagtgtgggacaggggcgagaggatggaaatgttggggtggcaagaccggagggaaatttcttcgatctgtcacagggagcacgctgcgagcggattcggtagcgacgcccaatgaaacggctggaatcacgtgttacctaatcaatggtgtctgccaccaggcggccaaccgaatcttgagccagtcgaacatcacggtggacggagcgcgtggatattcgctgtctgtttcgctgttcggagttctaggcagggaaagaggatttcttggccgctgtaaggcgccgttcgtggacttccctggggtgacgggagacctgcccgcatgcattggagacacggttctgcacaccggagacgatgtgcgcgtgagcttcaatcccggtcggcgcgattacgaagacgttcgctatatgtcagaggttcgcgagctctatcagcgtgtcaatgctggggcgctgcaggacaccactgcgctctttgagaaccagatgcagcacttccgactattcctgaatcacaagttcggatacccgcaggatcgggtcagctctgccgaataccaccgcatcatggtggcgcgcgagaactttgagagccgtcgcattcgtgccgaagaggcgttcgcggaaacgagggatggtcttgcatttgttcgtaagtttgacgaaatgaccctggagtttcaggatgaggtggcgcaagctgtggatgggcaggcctatttcactctgctgaacttgtcccccgacgagcgcatcgtcctttctgaccctgagggcactttcgaagcgtatggcgatgggaccgagcccgggggagcagcaacctga

SEQ ID NO: 503065 - DNA, 387 bp, Stenotrophomonas maltophilia
atgtccgcacgccccttgttcccccaactgcatgccctgatcggcgaagccgctgacctgctgccggccgacgtcgccgagcgcatcgaaaccctgctcgacgatccgaaggacctgctgcccgcgctgctggcccgcatggatggccgcgacgcagccgacgggcggcgattggaagcacagggcctcagccctgcccaggcggccaccatggccggcctcagccgcaccctggccggcttgaatgcactcatgcaggtgctgcacgccgccgaagccgcccgcgaacagggcggcgcccaccagcagctcagtccggatgtcgtcgacggcctgctgctcggcgcccgcgaactggcccgctacgcccgcctgcagctggagtag

SEQ ID NO: 503066 - DNA, 429 bp, Stenotrophomonas maltophilia
atgaagaaccagaagggcttcacccttatcgaactgatgatcgtcgttgcgatcatcgccatcctggccgccatcgccctgccggcttaccaggactacctgatccgttcgcaggtgtccgaaggtctgaccctgacctccggtgccaagtctgcagtagccgagacctactccaacaccggcgcattcccggcggacaatgccgctgctggtctggaggccaaggccaacatcaagggcaagtatgtgaccggcgttgaagtcaagaacaacgtcatcaccgctaccttcggtaacgacgctaactccaagattgcgggcggttcgctgaccctgaccggcaccgacaacaatggctccatctcgtgggcttgcgccggcgatggcaccaaggttgctgcaaagtacctgccgaaggcttgccgctga

SEQ ID NO: 503067 - DNA, 3063 bp, Stenotrophomonas maltophilia
ttgagatcttcgtcattgcctagtggtgcgttgttgttgtggctttttgtgttgtctggtttctcggggctgatctaccaatcgatctggacgcattatctcgggctattcctcgggcattcgtcctacgcgcagtcactggtcctgcttctcttcatggggggcatggcctgcggagcatggctggtcagccaacgcagcgagctgcttgcccaacctctgctggcttatgcggcagttgagctgataatcggcgtactcggtcttgcgttcgacccggcttatggcgcgctgacgcgatgggcgtacaccagtgtattcccaggattgggtggggatggcgtcagcctcgtgcggtggggcttggccacggccttggtcttgccgcagtgcgtgctgctgggcgcgacattccctttgatgagtgcaggattcattcgtatcaaagagaacgccgagggggaagttctttccggcctgtacttctccaacagcattggtgctgccgccggtgcgctggtggctacatatctgcttctgccgcgtattggtctgcccggtgcaattatgaccgcggggctgctcaacatcgcgatcgccattttcatttacccgctcactaagtcggaatcggcgggggcggcggttgcggtcggggagggctcgaaggcgagtagctctcggcatctgccgatatttgtgttgattgtggcggcgctgactggtgcttcttcatttgtgtacgagatcacctgggtccgaatgctatcgttggcattaggcaccacgatccatgcgttcgagttgatgcttgcggcgttcattgcgggtatcgccatgggcggcctctggctccggtcacgcgccgaccgccttgaatcacccctgcgcactgcaggttgggtccaggtgtggatgggcttggcggcactggcatccatgtttgtctacgcccaatcgttcgagtgggtcggttggctgatgcgggtaattgtgcgcggcagcgaaggctatgggctctacaacgttgccagtggaatcatttcgctgctggtgatgttcccggcagccttctttgcgggcatgacgcttcccctgctgactctcgcgctattgaggcaagggcatggcgagcgtgccattggacaggtttacgccttcaatacgctgggtgccatcgtaggcattcttttcgccgttcatgtactcctgccagggctgggtctgaagctagccttggcagtggctgcggctattgatctgctgctgggcctgcttctgctgaggcgctacgcgagttctacggtcggtcaggtcagggatcttgcatgggcggcggggctgtctactgcggggattggctgcgccctgatgtttgtgcactttgatccgctgatgctcaattcctccgtttatcggcacggccgcccctcgctggctgcgggctccaaagtcatttattccaaggatggcaagaccgctacggtggctgtctatgaagctcctcgtcatggtgatggtgcaatatcgcgctctatttccactaacggcaaggtcgatgcggggttgacggttcgaccatctgatccgccctcgacggacgagtcaacgatggtgctgttggcggcgttgcccctgtcgttgcgtgcagagtattcgcatgtcggggtcattgggtttggttccggcatgaccacccatacgcttttgggcagctctgccattggccgagtggatacggttgaaatcgaaccggcgatggtcgaggcagcccgtcatttcggcgtcaaggttgcacgtgcttacgatgatccccgctcgaacattgttatcgacgatgcgaaggcctacttttctgcttcgcctgcgaagtacgatctcatcgtatctgagccatcgaatccgtggatgggagggaccgcctcactgttcagtacggaattctatgcgttcgtgccggggcaactgaacaaagatggactgttcgttcagtggcttcagttgtatgaaatagacccagcattggttagttccgtcattacaggaatgctggtgaactttgctgatgtgcacgcgtatcttgccaacgacagcgatctgattctcgttgcgtcgccgaagggcgatgttcccaagctatcgtccagcgcgtttcgtagcgcgtcagtgagagacgatctggctcgagtcggtgtgagaacactccgggatttgcaggagagcttcgtcatggatcgacgcggtctggtcgcgttcacgcagcagtatcctgctcgcgccaactcggattacttcccactgttgcagttgcgcgcccccgaggccagatttaagaatgcggaggttatcgagttcgatgccgttagcactgccccttggccgatcacgcaattcttgtccgggcatgggcgtcgggatgctcgtgacgaacaggctagtggaggtgggttgcctctgcgtgtgactgccaagaatctagcggcgcgggagctgcgcttggcattggtggatggaaagatcggcctggattcttccgtagcttaccaagatgctctgattgccgagacactgcgatcacgtgcgaagtcctgcacgctggacgaaaatcccgttggaacggcggacatgatttactcgcttgcgatggagaccgtgccattcatgtcctcgggcgagcaggtcgacctttggcagtcgcccagttggataggctgcggcacttcagcgagggaggtgagagatgcgcttgctctcgtcgcggcaacttccaaggacgatcaccaggctgtcctgaatatcggtcagcagatcctggaaggcgagggggcagctgaggtgctgagcagcggaattgccagttactacgtgttagggagtatgtatttctcagccatggcaacccagcaggcagagctcgcgcagtctcttcacgccacctacaccaggcgcttgcccgcagtaattgctcgacatcccacgttgcagttgctggcgcgtcttgcgtccctgggtgcggatcgcaaaccgcaattgtcggttgtagggagacgggagcaggggtaa

SEQ ID NO: 503068 - DNA, 849 bp, Stenotrophomonas maltophilia
atgcgcctgatcgtgctgtcactgttgttgtcggttgtctccacagcacctctgaaggcggcagaacccgcgccatccgcacaggctgccgcaaccccactggtgatcggcgaaaccttcaccatcgagtcgaaggcgctgggcgaaacccgccgcatcaatgtctaccgtccgcagccgtggggcctggacccgaaggcgccgttgccggtgctgtacatgcccgacggcggcatcgccgaggacttcctgcacgtggccgggctggtgcaggtgctgagcggcaacggcagcatgcgcccgttcctgctggtcggcatcgagaacaccgagcgccgccgcgacatgaccggccccagcagtgatccgcaggaccagaagatcgcgccacgcattggtggatcggcggcttaccgcagcttcctgcgcgatgaactgatgccgcaggtacggcagcgttacccgaccaccgaagagcgcgcgctgatcggcgagtcgctggccggactgttcgtggtcgagacgctgctgcaggagccggcgctgttcaacagctacatcgcgctggaccccagcctgtggtggaaccagggtgcaatgctggccggggcggccagacagctgccggcggtgacgcgcgcacggccgcgcgtgttcctggccagcagtgggcagccggaactggccgcatccactgcacgactggccgagatcctgcagcaggcctcgccgtcgccgctggtgaagtacctgccgctgccggaggaaacccacgccacgatctatcacccggccgcattgcaggcgctgcgcacgctgttcccggcgccgccgtcggcctcgccgtga

SEQ ID NO: 503069 - DNA, 591 bp, Stenotrophomonas maltophilia
gtgctggcccgcgtgtccaacatcgaggcgttccggaagtggcgggacgccgacgaccagccggtggcagatctggtgcgttacatcaccgtggatcagcccaccaaggcgatgctggccggcaccgcgttccacgatgctctggaacacgcggtgccgggcgactacgaagtgctgcaggcgatggaccacacgttccacctgcccgactgcgagctggtactgccgacgatccgcgaggttcgcgcctatggcgagtacggccacctgaccgtgaccggcaaggtggattgcctcgacggtaagcgcgtggatgaccacaagaccaccagccggttcgatgccgagcggtatctggccggctaccagtggcggtactacctggacctgttcggcgcagatgtcttccgctggaacgtgttcgagctgaaggaggttggcgagcaggaataccgcgtctcggcaccgcagctgctggaggtcacccgctaccccggcctgcacgacgactgcatgcaactggcgctcgactacctggcctttgccgaggaacacctgccagcaaaccaccgcgtcgaggtggccgcctga

SEQ ID NO: 503070 - DNA, 894 bp, Stenotrophomonas maltophilia
atggcactgcgcatcatccgctccaccgaccccatcacggtcaaccgcctgaacgtctgcatctatgccgcgcccggcctgggaaagacgtccatctcgttcaccgccgacaaaccgctgctgctggacttcgaccgcggcgcgcaccgatccgccaaccgaaaggacaccgtgcaggtggagcgctgggaagacgtggcgcacatcaccgccgacgacctggccgacttcaacacggtggtggtcgacacggccggccgcgcgctcgacacgctgacgcctgacatcatccgccgcaatccgaagatgggccggggcggttcgctgacgctgcagggcttcggccagctgaaaagcgagttcgtcgcatggctgaagcacatcaacagcctgggcaaggacgtggtgctgatcgcccacatggacgagcagcgcaacggcgacgagatcattgagcgtctggacgttcagggcggcagcaagggcgagatctacaaggcggcggatgccatgggccggctgtcgatccgcgacggtaagcgcatgctcaacttcagcccgaccgatgcgtcgttcggcaagaacccgggccagctggagccgctggaagtgccgcacccggagcgtgacccgcagttcctggctcgcgtgatccagcagatcaaggaccggctcaacgccatgaccgaggaacagcgcgaggctcaggcggcgctggagaagtggcgcgaccgcaccacggctgctcaggacgtcaccgcgatcaatgcgctgctgccggaggcaaagggcggctcgcaggccatgaaggtgctgctgaacgatcgtgcagccgcgctcggcctgaccttcgacagcaaggccggccagtacgccgcgccgaaggcagcctga

SEQ ID NO: 503071 - DNA, 414 bp, Stenotrophomonas maltophilia
atgtcacccacgctccagattccgcaggacgtcatacagccgatcatccaggccaacatcactgcagccatcgcgcaagcgctaggcggtagcgcaaacgtgctggaaaaggctgtcagcacgatcctcgcgacacaggtggacagcgaaggaaagccgagcaactaccaccactcatcccataagacgtggctggactgggccatcggggacgccattcgcaaagccgcgcgcgcagctatcgaggagcagatcggcacgctgcaggcggcgctcaaggagcagatggttgcccagctcacgaagaagaactcgcctctgatcaagcagatcgcggagggcctggcagcaggcgcattcagccccgaggcaatcaagtggcgcctgacgatcagtcccgaaagccgcgactga

SEQ ID NO: 503072 - DNA, 519 bp, Stenotrophomonas maltophilia
atgttccaactcgatcaacacgatgcggtgttctcgcatctgaacctgcggaaggaaaagcacggcgacgaagacgcggccgctgctgacctgaagttctcgctgaacgctccgaacacgatcctcaacaccatcgacccggccatcctgccggcgttctggaagaaggccgacaagggccagcagcagaacctgccgatggaaggcagcacggacctggtggcgctgaatctgccgctgctgggcgagcaggacatcaccggcaagttcgaaggctacgagctgtcgatcggctccctgatggaccacatcgatccggtgttcttcgccgacgccaaggtgaaaaagatcacctggaagccgctcgaaggcggcagcgtggctatgggcttcaccgtctcggtgctgctggacgaggacgaagacgccgagctgatctctgcatggcgccgcggtcaggtgcgcctgaccctcacgccgccgagcgccgccccgcagcaggccgacctggccgcgtaa

SEQ ID NO: 503073 - DNA, 240 bp, Stenotrophomonas maltophilia
atgagcgcccctgtcgacctgcagcgcctgcgtgacgcccttgcatggcacttgcggctggagcgcggcgccagccgccgggctcggtacttcgagcgccgggcaaacaatccccgcaatccgaaccgcgccgcatctgcccgcgtcgccgccggctaccagggtgacgccgcgaaagaccgtcgccgcatcgccgagctgcgtgccgagttggcgagcgtcaaaggcggtgccgcatga

SEQ ID NO: 503074 - DNA, 324 bp, Stenotrophomonas maltophilia
atggcagaccgcaccgcaaacgacctggcccgcgctgcccagcgcagccatgacggccgcgcaccggccgaacccaacgacgaggccttccagttcgcctgcgaccacgtggcggcggagctggagcgcgagggcgacgttgccccgctggtcgagaagctgagccaggctcggcacgtgatgacccacctcctgacgcaggaggttccggcccacctgttgccccacttccgcgagctggccgacctggtccgcgacatgtcccgccgcgtggacgcctcgatgaaggatttcgaggccgggcagctggaggacgccgcatga

SEQ ID NO: 503075 - DNA, 225 bp, Stenotrophomonas maltophilia
atgacgtctggcagcagcgtttttgtccttctatgggtgtttctcgccgtgctctggctggttgttccattcgccatctttgctatcaagaagctattgaaggacatcctggccgagcagcgacgcaccaatgaactgctgagccgaggttccggcccggctgaagctgggtcgcatgtggacatcccggagttccgccccaagggtggcttcttagggcgctga

SEQ ID NO: 503076 - DNA, 369 bp, Stenotrophomonas maltophilia
atgtcagtgagcgagcaggaaatgcgtgggatggccgcagcggtagcagcagcaatgggtgcaagaacgggcaggcgcgcgcgtcggttgaccgtcgttgggcctgatcgcgcggatgacgtgcgcctcaatgcgctgcagagagacgtgctttaccagcgcattcgtgacctcggtcgcatgtactcgttgatgtggctcgtccggcaggagaccgcctgcgtgaacggtgtgctggaatgcctgcccgaccaggatctcaacgccctactcggaaagatggagcgcggtcgagagtgcagagtcgagggcatcgctttcgacgacgccggcttggtccgtgactcgatcgacatcgacctcgaatag

SEQ ID NO: 503077 - DNA, 483 bp, Stenotrophomonas maltophilia
atggcttctatgcacccctccatgaagcgtctctacgacgcagcccaacgcctggaatccccaatccgggggcagtcggaactcgcacgggccatcggccagtcgccacagaccgtgaagaactgggaaaccaggtctacgggcgtgagcgccgccggtgcctcaaaagcacagcaggccttgggcatcagttcgacatggatacttgaaggcgccctgcccatgtttgtcggagcgccctccggctctccttctcagtctcagtctgcgggactgcagcgtcagatcatcgccaccacggtgaggttgatcgactatgtgaatgacatggtcctggaccccatcccggaagaagaccgcgataggctgatcgacatcgccacggccgaagtgatggaccgctgggcatccgggattgaaggggaaaaggatctcgcgtcagctggtcgcaacgtgatcgccaggttccgatcaggagggtga

SEQ ID NO: 503078 - DNA, 231 bp, Stenotrophomonas maltophilia
atggcgtgtaatacggccatgaacgccaaacccacccccgaagtgcaccccgacgcccagttgatcgatcagctgggcggtccggccgttgtcgctcgcgcccttggcttcgaaatgcctggcggcacacagcgcgtccacaactggaagacgcgcggtatccccgcgctgacgcggcaccagcgcacggacgttttcgggccagttcccaagaacttcggctcgtcctaa

SEQ ID NO: 503079 - DNA, 450 bp, Stenotrophomonas maltophilia
atgaacatcacagacgccgcacacaagaccgtgaaggactaccccggtggtagtgaagcgctggccgtccgcatcggcatgtccgccgcggtgctgcgcaacaaggtcaacccgaacaacaacacgcatcacctgacccttgccgaagccagcgagatcatgggcgtgaccggtgacgaccgcatcctgcacgcgatggccgctgagcacggctacaccctccagaagatgcaggcggacggcatggcgtccgtgatgggggcgatgctggagaacgctgccaagcagggcgcgttcgcgcaggcgctgcaggaggcgctgtctgacggcctgatcagcgagaacgagatgaaggccatcagcagcgccggcactgcgcaggtggaggccatgatcaacctgctggcacgcctgcgggctgtgaccggccagcgtggggtgggggcatga

SEQ ID NO: 503080 - DNA, 861 bp, Stenotrophomonas maltophilia
atggcccgcatccgttcgatcaaacccgaattctggtccagtgagcaggtgatggaatgctcgccgatggctcggctgctcttcatcggtctgtggaacttctgcgacgacggtggcaaccacgtcgccagcgccaagaccgtgaaggccgaaatcttccccggcgacgatatttcctcgtcggatgttcagcgaatgctcgacgagctgtcgtcgaattcgctgatcgccttctacgccaatggtgacaagcagtatttgcacgtcacgggatggaggaagcaccagaaaattgaccgccccacattcaaacatccgccattctcggatgacgctcgtcgagggatcgacgagccctcacccccggaagggaagggagaggaagggagaggagaggaagggaagggagaagatctatcctcgcttcgctcggattcgtccgcaccttcggcgctgaccctcgacggcggcgacgggaacatccaggcactggaccccaagcagcggaagacggcccgaatccagcagatcgctcaggacgcgcagaccgcgtacaacgcgatcatggccaagccggaagggctgctggctgcctgcacggtgctgaacaagccgcgcatcaaggctgtcgagaaggccctgccgactgtgcggcagctgtgcgttcggctgtttggcagcgagaaggtcaccccgcagttctggcagctgtacttcgagacggcagcagaggacgacttccacgccggacggcaacccggtggcccaggccatgagaactggaagcctgacttcgagtacctgctgcgcgagagcgtgatcgccaagctggccgaccgcgctctgtcggaggccgcatga

SEQ ID NO: 503081 - DNA, 1467 bp, Stenotrophomonas maltophilia
atgagcgccgcccgcgacgaagtgagccggctgtcgggtctgtacggagaccagcaggcactgcgtctgccgccgcacagcgtggaggctgagcagtccgtgttgggtgggctgatgctggtcaaccgtgcgttggtcgaagtgcaggacgttctggccgaggcggacttctaccgccgggaccaccagctgctgtggcgctgcatcctgcagttggccgagaagggtcagccgttcgatgcggtgacgatcggtgaatggttcgaggcggcgggccagctggagctcgttggggacggcgcgtacatcatcgagctggccaacaacacaccctcggcggccaacgtccgggcctatgccgagatcgtggcggagaaggccaagctgcgtgcgctgatcgacgccggacacgatctgatagacgcggcgtacagcccggaaggtcgcagggcattggacctggtgggcgaggcacagacgcgcatcggcagcatgttggaccgggagccgtgcgacttggaatcggtggcgccggtaatggaacgggtgttccaccggctgggagaaagggcaacgtctgagggcggcatcagcggcctgaccaccggcgacccggatctggacgaactgctgggcggcctgcaggcgggctgcctgtacgtgctggcggcgcggccgaagatgggaaagaccaccaaggccatcaacatggcggaacacgtggcgctgcggctgcacaaacccgtggcggtgttcaccttcgagatgcagccggaggaactgggcgaccgcatgctggccaaccaagccggcatcagcggcacccggatccgtactggcaagctggacgacgccgactgggccaatgcttccgaggcaacccgccggctgtcgcaggcgccaatcttcgtgagcaggccgaagcgtgcaagggtcgagcacgtctgcgcgcagatccgccgaatgcacgcccgcaacgcgctgggcctggtggtgatcgactacctgcagctgatgcatgtgaatggcgacaaccgggcggccggcatcggcgatatcaccatggcgctgaagctcaccgccagcgagctgggtctgcccatcctgctgctgagccagctcaaccggaagctggaggaacgcactgacaagcgcccgatcgtggctgacctgcgtgactcggggtcgatcgagcaggacgcggacgcggtgatcttcatctacagggacgaaatctataaccccggcagccgctgggagggcaccgccgagctgatcgtggccatccagcgcaacggcgcacccggcatggtccgccagctgtaccagcccgagtacttccggttctcgccgctccctgagtactggcagccaaagcagaccagcgcatcggcgccggccgccggctcggcgccgagagctcgtcgagggctcgccgccgcgttgccgagaggtgaccaggaatga

SEQ ID NO: 503082 - DNA, 540 bp, Stenotrophomonas maltophilia
atgaccatgacagctgcagcaaagaagatccgcgccaagcgcgcgcgccggccgatctacatggtcgtgaccaagctgatcgatccggccaccggtgagcttgttggggcgcttgtgccggctcatgacgtcgaccagcgcctgatgcgtgagcgcaagttcaaggtgggccgcgaggtccgcgctgaactgaagcagccgcgcgaaggttggcagcatcgcctggtgcacaagatcggccagctgatggtcgacaacgtggaggggtgggagcagctgggcagccacgacgcggtgaagcggctacagcgcgagtcgggcacctgctgcgaggaaatggagattgacgtccctggcgtcggccgcctgatggtcaagcgggccgagagcctgtcgttcgacgaaatggaacaggaccgattccaggtcctgttcgatgggatcactgagcacatcggccagcgctacacccacgtgatgctcgacgacgtgcgggcggagttctgggacatggctgggtcgaacaggagggctctgtga

SEQ ID NO: 503083 - DNA, 717 bp, Stenotrophomonas maltophilia
atggggatgctggcgacggctttaatcatgaccttcgttcgacttctgaagccctcgatgccgaagtacaggcaaaatcctgacagccagctcgcgactcttctcgatgtcccggctggccttctccaggaacggcccatcgagtgttgggtgctctctcatagcacgcagcatcattcgaagatggtcctgtctggcgatcaggacgttcacgtcgaccccagtgttacccatcaagtgcaggctgctccggaactgatcgaactctggggcacgatcaaacacatccccgggaagcgcgcggcgaacttccgccgagtggtgcaggaaccggataatcatctcgcagtggcccctgaactgctcgataggctggaacagggcgccgtgcattacacggatgagctgttcctccctcgcgcgttccctgtcgtctttagctcgggcatcttcaatctgctgctttctctgtctccaaggaaccatgatcgcgacgccgattgcgatgagactgccgatcgcctgaacccatgcagcccattgctccacggtgagacgtggaatggctgcctgttggccactgagagcccaagtaatcagcgatccagcgccgaacgtcatcaaagctactacggcccagtcccggtctgttcttccgtgcttcatgttgtttccccttcgatggaccggattctaccgctcggggtggccgcgtga

SEQ ID NO: 503084 - DNA, 285 bp, Stenotrophomonas maltophilia
gtgaggaccaagaattccaaggcctttaccccggccgagaagcggcacgtggacgcggtgaaactcttgaagtgcagcgtctgcgacgcgcccggacccagcgacgcccatcacatcaaccagggccagcacttcacgaccgtggccctctgcaaggactgccatcagggcagtttcaacggcatccacgggcaacgccgcatgtggctcgtcatgaagatggacgagctggctgccctgaacatcaccctttcccggctacagctgcaggaggccgcacgatga

SEQ ID NO: 503085 - DNA, 462 bp, Stenotrophomonas maltophilia
atgatcaacctcaccctcccgtacccgatcagcgctaaccgttactgggcagtgcgcgttatcccgaagaagccgaagccgctggcaatcacctacgtgaccgaggacgcgaaggcctacaaggcggcggtcggccacttggccaaggcggctggcatccgcgctccctcgaccggccgcgtggggctgtacatcaagctgttcccgcaccggccgcaggactgggcgaagcgtgcacggaaggacccgtacacctgggacgacacggtgcagtgcatcgacctcggcaactgcgaaaaggtgctgtccgacgccctgaacggcatcgcctgggtggacgacaagcagatccggcggaccctgctggaacgcatggagccggacgagaagggcgcgcggctggaggtggccatcgagtacttggcctcggcgccgagcctgttcggggaggccgcagcgtga

SEQ ID NO: 503086 - DNA, 396 bp, Stenotrophomonas maltophilia
atggataagaagcagctcgaagcgcgcctgatccagtgggcggaagagtacggcggtggccggtacgagcacatcggctactccagccggaacctgcttcagtccctgattgagcatcaagggtttgtgccgggtaccggtggctaccgcggcattctcatcaacacgcctggggacgaagtccaatccgcagtgcttgccatggaggcgtatggctacatccgaccaggtaggacgctgcgatgcgagtacttcctgaagtcggcgccactggaactgaagctgcagaacctgcggcgcgcggggatcgacattaagcggccgacctactacgactatctcgccatcgcaaaggcattcgtgatgggtcaactttcgaaggagaacgcagcatga

SEQ ID NO: 503087 - DNA, 384 bp, Stenotrophomonas maltophilia
atgaagatgcgcgtatacatgatgatcgccgacgcttgctgtggtgagagcttctgcaagatcggggtgaccaccgatctggctgcgcgggtcagcgccgtgcaaaccggctgcccgatgccgatcaccgatgtggcgtacctagacctgccccgtggtgcccggtcagctgaggccatgttccatgaccagcttcgcgcctatcacacgcagggtgagtggttccgcatgaacctggctgaccccgtccacaagcaggcgatgaaagatgcaacggccttggtcgtgaagcacttcggcgtgagcgggacccggtggaagcacatgagcctcgaggcgatccggtcgttgtgcaaggtattgcgtctagacaatgtggcctag

SEQ ID NO: 503088 - DNA, 501 bp, Stenotrophomonas maltophilia
atgtcacagctaccgctgccgatgaccgcggcgcagtgcctgcaacacgtggttgtcccggccctggcactgctgggagccgcccgctacgactcgcccgaggcgcgtgtgatgctgctggccatctccgggcaggaatccggcctggcccaccgccgacaggtgaagggtccggcccgtggtctgtggcagttcgaacagggcggcggcgtgcgcggggtgctgaaccacccgtcgacccgggcagcggctgcgctgctctgcggcgcgcgcggggtcaccgcaacgccggccgccgtgtatgcccagctggagcaggacgacatcctggccgctgggttcgcccgcctgctgctgttcacgctgcccaagcgcctgccgccgatcggcaacgtctcggtggcttgggcgcagtacctggacgcctggcgccccggcaagccgcacatcgaccgttggccgaggaactaccgcgccgcggttgaggcggtaagggcgtga

SEQ ID NO: 503089 - DNA, 240 bp, Stenotrophomonas maltophilia
gtgaaggatcgattcaactggcagggcgtggctggtcgcgccagcacctggctgggcacgttggccggcgctgccgctgcagcactcggcgcctacgcgctgatgccggagcgggcgcagaacctgttccccgagtggggcctgatcgtgctgggcggcctggccgtcggcggcgccttcctggtccccgtggctaccagcttcaagcagaaacccaagcgcccaaaggagggcctgtga

SEQ ID NO: 503090 - DNA, 381 bp, Stenotrophomonas maltophilia
gtgaacgacaagaccatcgagcaggaaatccagtccaagggcctgaacgccccgcgcgtgacgccggatcaggtaagtgccgagatcgttggcgagaccttcacggtgctgcccaacgggcgcacgaccgtgtgccaactgacgctgcgcaacggcttcacggtggaagggatctcggccgcagtcagtatcgagaacttcgacgctgagatagggaacaaagttgcgcgccagaacgctctcggcaaggtatgggagctgctgggcttccgcctgcgcgatgacctggtgcgctcggcgctgactgatgccgatgcgcaggccgatctggctggcactagccggccggatcacccgagacactccgttgctaatccctga

SEQ ID NO: 503091 - DNA, 303 bp, Stenotrophomonas maltophilia
atgcgacgccattccgttgctgtgatcctggctgcggccctgccgctgtgcgggtttggcagctgcagcaaggccgagaagcctgacctgcccaaggtggtgcatgtcccggtcgagcgcacggtggctgtgccggcggcgctgaccgcccgctgccccgtgaagcgggccagccagcggaccatcgagagcgtggtgtcggcctacaacgccaacgtgctgagcctggagcagtgcaacacccagctgggcgcaatcgagaacctggctccggccaacgcaccgaagcagatgaagccatga

SEQ ID NO: 503092 - DNA, 324 bp, Stenotrophomonas maltophilia
atggcgagggtcaccacactcgcaccgcgcatagccagcgcgcccagcaggctgaagcccacggcaccggtggcacccagctacgggaagggcaggggaggcagaccctggcgcaggaagcgcgacgcagtgatgcggcgggaccagtacctgtgtcagccctgcaagcagcagggacgcgtcaccgaagccactgaggtggaccacatcgtcaacgtggccgagggcggcagcgatgacgagacgaacctgcaggccatctgcaccgaatgccatggggtgaagacccaggcagaggcaaggcgaggtgcggcgcgacgttga

SEQ ID NO: 503093 - DNA, 414 bp, Stenotrophomonas maltophilia
atgcgcaaaaacacgaaacctggccgcccggcgttcaaggccaccgcggtgcagcgccgactggtgaccaacgcagcggccagcggcatgacgcaccaggagatctcgatcgcgctggggatctctcggaacaccttggagaagtacttcgaaaaggagatctcggcagctgcactgcgccggcgaatggaggtgatggacgccatggcgaggacggcacttaagggcaacgtggccgcccagaaagcgttccttgcgcaggttcccacgctggctgcgcccccggtgccgcaggagaagccggtgggtaagaaggagaaggccaacgctgatgcggtcggtgcggagaccggtaccggctgggaagggctgctgggcaacaacgtcacccccatttcccgggctgccaagtaa

SEQ ID NO: 503094 - DNA, 1689 bp, Stenotrophomonas maltophilia
gtgagctgggacctttcctgtcgggactggtggggcaagctgcaggccggccagctgccggtcgcgcagctgcccctatggacccaacaggcggaacgcgcggcagccattctgggcaggcttcgtctggcggacgtgcctggcacgcccaccgtgggggaggccggcggcgagtggttccaggacgtggcacgcaacatgttcggctcggtgaacccggagaacggagaccgcgagattcgcgacctgttcgccctggtaccgaagaagaacgccaagacgaccttcggggcgctgggcatggtgacagccacgctgatgaaccagcgcccacgtgccacgttcctgatgacggcaccggtgcaggacacggcgcagctggcgttcgacgccgccgccggcgcgatcgagctggacccggtgctggatgccaagttccacatccgccaccacctgaagacgatcatccatcgcgagacgaaggcctcgctggagatcatgacgtttgaccctgcggtgttgaccggcgtgaaggtgtcgggcggagcgctgatcgacgagctgcacgtgtgcgccaagaaggcgaaggccgcccaggcgctgcgtcagatccgcggcggcatggtgccttacccggaagcgttcctgtggttcatcaccacgcagagcgacgagcagccagtcggggtgttcgccgacgagctgcagaaggcccgggacatccgcgacggaaagcgggtgggcaagatgctgccggtgctgttcgagttcccgcaggagatacaggagtcgaaggaccagcagtggaaggacccgcagctgtggccgctactgaacccgaacatcggccgggccatgacgctggagcgcatggtggaagagttcgacgacgcagtgggcaccagtgaggccgagctgcggagctgggcgtcgcagcacctcaacgtgcagatcggggtggctctgcaccaaggcagttgggcgggcgccgagttctgggaggcgcaggcggaccagaggatcaccctggacgggatgatcagccgttgcgatgcgattacggtcggcatcgacggcggcggcctagacgacctgctcggactgtcgttctgcggcagggacaaacacacgaagcggaagctgctgttgagccgggcattcgctcatcccaaggcgctcaagcgccggaagagcgaagaggcccgctacaccgacttcatcgcagacggtcatctggtggtgggcgctgacggtgaagatggcgcgactgacctacgtgacatggccgcgatggttaagcgtgtggacaaggcccggctgctggccggcatcggcgtcgatccctcgggcctgggcacggtgctggacgccctggccgccgagaagatcgatgccgagctgatcgtgggcatccggcagggctggcagctgacgggcacctgcaaggtattcgagcggtggctggccgatggcctgcttacgcatgacggctcgcggctgatggattggtgtgtgggcaatgccaaggtcgaggcgtcgaagaacgcgctgtacgtgaccaaggcggccagcggggtcgggaagatcgacccgctgatggcggcgatgaatgccgtggagctgatgtctcggaaccccgagccgaagaacaaaaaactcgtcctcatgaccgtgggtggaagccgatga

SEQ ID NO: 503095 - DNA, 1440 bp, Stenotrophomonas maltophilia
atgaccctcgcagaacagctggaagccctccgcgcaacccgcgccgagctggaaaagaagctcagcaccgtcgtcgagaagtcgatggccgagaagcgctcgatgaacaccgccgagcaggaagagttcgacggcatcggcgaacagatcaagaacctggacggtgacatcgaacgcttcgataagctgctggcgatccaggccaagtcggccaagccggtcggtcccatcgccgacgagaacggcaaccgcgtcggtggcggcgaaggccgtgccctggagccggtccaggtgaagaacacccagaagttggagaagggcatcgagttcgctcgctacgccatgtgccagctgaaggccaagggtaatgccgaaaaggcgttccgcctcgccgagcgccatttcccggaaagcgagcgcgtggtgcgcacgctgaaggcccaggccgagggcgctgacctcgaactgatcatgaaggcgacgatcgaagccggcaccacgctggatccgaccttcgctgcgccgctggtggactaccagaacttcgctggcgacttcgtcgagttccagcgcccgcggggcatcatcggccagttcggtcagggcaacatcccggcgctgaacagcatcccattcaacgtgcgcatcgccggccagaccagcggcggcagcgccggctgggtgggtgagggcgccccgaagccgctcaccgcgttcgatttcaacgcgaccgagctgcgctgggcgaaggtcgctgcaatctcggttctgaccaatgagctgatccgcttctccagcccgtcggccgagcgactggttcgcgatgcgctggccgctgccgtgaatgagcgtctggacatcgacttcgtcaacccggcgaaggctgccgtggccaatgtgtccccggcatcgatcaccaacggcgcgaccgcgattccttcctcgggcaatgatgccgacgccatccgtgcggacctgaaggcgctgtgggcaccgttcatcgcggcgcgcaatccgccgcgcagcgcggtgtacatcatggacagcaccaccgcgctggccctgagcctgatgctcaacccgctgggtcagctggagttcccgggcatcaccatgaacggcggcaccttcaacggtgtgccggtgatcgtgtccgactacctgccggtcaccagcgatggcggcatcgtggtgctggtcaacgcatccgacatctggctggcggacgatggccaggtcacggtcgacgcatcgcaggaggcctcgctgcagatgctggacaacccgaccaacaactcggcaagcggcacgccgaccaccatggtctcgatgttccagaccaacagcacggccttccgcgcagagcgctacatcaactgggcacggcgtcgcgcatccggcgtcgcctacctgaccggcgtgagctggggcggcgcgtaa

SEQ ID NO: 503096 - DNA, 264 bp, Stenotrophomonas maltophilia
atgaccaaggtcgagatcgagaagcgtggcagggtggcgaaagtccacccgcgagtggcccacatgctggtgcagcgccatgggtatctgcgccgcgacatgcaggcgcagcagccggccggcccgacgccggaagagctggcagcagcgcagcagaaggccgcggaagccagggcacggaaggctgccgaggccgctgccaagaaggcggcgaagaaagccgaagcgcagcagaaggccgcggaagccaagggcaaagactga

SEQ ID NO: 503097 - DNA, 750 bp, Stenotrophomonas maltophilia
atgacgacgaacgttttggataggcgtaacaagatggtggccagcgattcacgatggtccagtcatcctcccagtttccctgacctgatggtctttcttgacgacactgggttcgacaagatcgtcgacaggccttcggccgtgatgatgtgtgccggatcaatgaagctgatcgccttgtggaagacttggttcgtagcgggcacaggtccgatgccggtgtcagagttctacgagggcagcttcaaacacgagatctgcgtcgcagtggtgcgaaagcgtgacttcggtctccgtttcagcgccggcacatatgagaattttgaagacgcggctgaattttgtggtacaggcgcgatttacgcgaaagattgctactcagtaaacggctgtgcgaagacggcggtactcactgcttctcgtcacgatccgatgactgggggagaggtaaagtttgtggacactaaagtgcctttttcatctaacgttatgaacccctcgacgaccgtcgaggaagttgaggcgcagctagcgaccaagggatttgtcatggagaagtcaacgggcaacgtgttcagcatcgcgaccgggcagcaggttcaccagcaggcaatgtctgcggcaatcgctgctggtctttcggcccctaccggacagaagctgcgttcgtggaccgagcgcgagcgcgaggatctgcagaaggtcatgaacgagattcttgaagacgaagctgcagcgaataactcctga

SEQ ID NO: 503098 - DNA, 855 bp, Stenotrophomonas maltophilia
atgccagttaccgattccccgctcagatatcctgggggcaagactcagcttgcccctctcgtggttgacatcgctcgcgcaaacagcgtctacgggggcgtgtatgccgagccatttgccggaggagccggcattgcttggcgccttctactgaacggcgatatgacagaggtctggctcaacgatatcgatcccgcaatctatgcgttctggaagaccgttgtcgattttccagatgagctctgcaatcaaatcgagaagactgcagtcactatggatgaatggcacaagcagagggccattcttcaagatggcaatgcggggcttgccgagctcgcattcgcgacgatcttccttaaccggactaatcgctccggcattctcaagggcggcgtcattggtggcaaggcacaagagggtgactacaaactagactgccgctttaacaagtcagatcttgtccataagatccagcggatacatctctaccgcgaggtaatccaggtaactcggctagacgccgagaactgcctcaagaagtgggcaaagcttcttcccaagagagggctgatcaacatcgatccaccctactactctcagggacgcgacctatacctgagcttctacaaccctgaagaccatgcccgtcttgccaaactcgttcgaggcatgaaggtgccatggatgctcacctacgacgatgtaccccaaatcgaatctctgtatgaaggaatgccaacctatcgaaaggcgctgacctattacgcgcaagtgaagcgcaaggcgtccgaactgttggtgttgtctccaatgctcaagtgtcccgcgacgttgaacgggagagtcgccgcctga

SEQ ID NO: 503099 - DNA, 1374 bp, Stenotrophomonas maltophilia
atgagtaatcagaatcaagcgcaagaacaactcggcgatcaacgcatcgcggtaagcaggctccacctcaatctcaacaatccacggcatgagccggtatcaagcgaggcagaggctattgcggctctctgcgatgatgaactgatcgcggagctcgcaaaggacatcgttgaaaggggggcgctcagtccgctggaagtcctgggggtcatccctatggaaggaaacccagggcatttcgtttctgtggaggggaacagacgcacctgcgcactcattgtggccaatgacccttccagggctccagacgcaatacggccgcagcttcgtgcactttcctccagagccaacctgcccaaagaggtcaaggttttcgtcttcgccgacgaagcagaggcgcagcaatggattcagttgcggcacctaggggctcaaggtggcgcgggcaccaaagactggacagctactcagcagaatcgcgcggctggcgggagcaaaggcgctgcagctcacgcgaataccctagcagtgagcgttctggatcgactagttgcgcggggggcgctcactccacagcaacggaaacaggtcaaccttacgacgataacacgctacctaggaacccctggagtccgagccatccttggtcttggaagcaatcgcgaacttatctatacacacgacgttgatgaagtcgacggtgcactgttgcgcctggtggaagacagcctgactccagcggaggatggcagctacagagtgcactcgcgctcaagcagctcggatcgcttgaactatgcccacgaactgaaagcccagggagtcgcgccgtccactcttcttgaccgcccacacgctccccctgcggcaacgaagctcagaactcagcctgagaactctaagacaggacctcagaagcggagcgcagcgcatccggatacacgaaaacgactgattcctacagattttcgtatcagctacaaggatccgatcctggctcgtcttcgacgtgaaggattggagctggaactgaacgatttcaccttcagcggcaactatctgctccgcgcgttggtggagcaagtgatgacgctatatgccaagagcgtcagaaagcacagacccggcatgactgatgcagcgctgacgcaagcctgcgcagacgagcttaaaaagtctggtgtcacaggcaaagctctaacaaatctcgagaaggcggcgggcgcaatgcatacaggtcacagcctacacagcctcgggcacgctgttcacggcggcaccatacccaccgccaacgacctcaagaagcacttcgacacctggcgtccttcgctagaggcaatgctcgatcaccttgaaggcggaaaaccttga

SEQ ID NO: 503100 - DNA, 231 bp, Stenotrophomonas maltophilia
atgagtaacgcaacgatcacaggctgcacctccacccggatcctgcagctactgcaggaggggccggccctggccggcgagctggccgcggaactgcagctaccttcgaaccgggtcagcagctacctgcaccagctggccaagaccggccgcgtgcggcgcgcgcccttccacggccccgacgagcgcccgtcggtcctctggagcctgcaggtagtgtccaatgagtag

SEQ ID NO: 503101 - DNA, 648 bp, Stenotrophomonas maltophilia
atggattggtggcttggcttcagtcagtgctggcccatgggcgaggtgtgcaccatcgattgggatgcatgggcggttgtggccacccttgtcacgatttacatagcctggctttcggctttggtcactgctctttccgctgccgctgttttttggcttggcaagcaagccaattccgtagcgactgcatcccaccgcatcgccacggcctcccatgaaattgcccaggccgaaaggtcgcgagaggcgcacttgatccttgcatacctctattcggaggttctggacacgtactccagcatcgaaggatggcttcagcaggccaatgcggtggaggcgcattttctcgggatgaacgatacggagcggcgacaggttcttgatggacttggccctctcgctatgcctcagacagaggccatcttcggtagactccacgtcgttgacgaggaagtgggtggccggttggctcgtgctctgggaaccctgaagattctgcggcttgcgcgcgagccgatgtttcgcctgcagaacgacgatgaaggccgcgtgcgagtttgcgcagtaattcgctacgttcgaagccttcgtgacgatctgcgggtcgtgaacgaggctgggatggaggcaaaccggcctgtggcctag

SEQ ID NO: 503102 - DNA, 129 bp, Stenotrophomonas maltophilia
atgaagaccgaagagatcatcgccgaggccaccggtgcgctgttccggcgggtgctggccatcggcaccgccgccggcttcgtgctgggcgtgttcgcaaccctcggatccagggcggtgctgtcatga

SEQ ID NO: 503103 - DNA, 264 bp, Stenotrophomonas maltophilia
atgaacgcgcctggtgaagtgctggcggccaagctggccggccgatgtgcgaatggcctcgagcgcggccagggcaccaacctgcacgcgatcccttccgcgcaggtgcggcgccatggcggatatgtcgaagccaccggcaaggcgctatgcggagcagcaccaggccgccgttccgtgggctggaccgcctgcgaatcgcatgctgtgacctgccctcgctgccagcgcgccctggcgcgtggcaaaggcggtgccgcatga

SEQ ID NO: 503104 - DNA, 300 bp, Stenotrophomonas maltophilia
gtgaccgccccagtcgacttcactgccaagtgcttcggcgcgaaccttcgcctcacccgggatagcgacagctcctggcgcatttcgctctacaccttcgtcggcaagaacaagacgctccgaaacatcgccttcgcctgtacccatcccggcaaagtgccgcgcgtagttccgcccgatgctgacgccgacacgcccgccgctctgtggcttggctctgccgccttcgatctgccggacaccctcgccccgaagatccaggccttcctcgctgagcatgccaaaggcggtgccgcatga

SEQ ID NO: 503105 - DNA, 195 bp, Stenotrophomonas maltophilia
atgcccgcggccatacgtcatgaggtcgccgatggcgcgttgagatactccagcccgctgagccagcgccgcctgggagtcgccgcgcgcctgcatgaagcggcggacgttgtctgcaatcgttaccactgggtctactttcgccatttgttcagcgtaagcaccggcttgcgcatttcggtgcttgccggataa

SEQ ID NO: 503106 - DNA, 198 bp, Stenotrophomonas maltophilia
atggagtacgtgcatgtcctgagcgaccgcctcgaactgtccgcggacgcggtgctggaagccgtcaaagtcaattgcaagttgctgcaaatctgccatgggtgtctccggttggtgtttgggttgggttgcacccccattctgccagccggaggacccgcccttactaccgaggactcccatgccctggatcgatga

SEQ ID NO: 503107 - DNA, 468 bp, Stenotrophomonas maltophilia
atggttgagaccgtactgggtatgaccgaccttcagatcaaactcttcactgcgatcgggcagatactcgtcgctgctgcggtgggaatcatcgcgctgcgtcaatggctgacggcaagaaataagctgaaggcggatctgttcgataggcgctacaagctgtacgtcgaccttggtcagtccttgcagcgaatcgtggagggcaatagcgatgctgttgtccagatgcgtcgcctgctggccgaggcgcgatggctgtttggagagaagacggcagaaaggctaaggaaggaggtgggcaacccctttcaaatactggccgaagcgaaggatgcggcttggagccgaaccgcgggatccgacgagtcgaagctcgccgaagaacacatagatgccatgggcccggcatctcgagcggcattggtacttcccgagatcgtcgcacctcatctgtccctcaaacactga

SEQ ID NO: 503108 - DNA, 285 bp, Stenotrophomonas maltophilia
atgttgaaccagcaagccggcgtgaaccaactggcggagccgcaaaccccgatcgaatctgccgtaaaggacctagcgcgggcccagcaggatctgcacatcgctgtcgagcagctggcgcttcgcctagcgccggcgctggcagaggcgaagcctgagtcgtcggcatccaccggacgtgccgtcggtgcgtccccgttgctcgaagacctgttcaagaggcgagacgcagctgcgcagaccctcgacgtcgtcaacgcactgcacgcccagctgaccctgtga

SEQ ID NO: 503109 - DNA, 1080 bp, Stenotrophomonas maltophilia
atggctacccgcactccattgatcctcaaccagaccacggctcgcatcgaagagctcgcggctgctgacaccatcccaggtttcatggtcgagggtatgttcggccggaacgtgctgatcaacggcgatttccgcgtatggcagcgaggaacgaatttcccagcggccgcttctgcacgctatacggcagatcgttggtttgcgtgggccgccgggtcaacagtgcaagtggatcggatgggcgcagatggtacttcgctgcctcccggtataggggttgcttcgcgcccgcagtacgcgtttcgagccaccgtagcatcggtcgccggagcgaacaattttgttctgttgcagcagcgcgttgagaatgtgcgcactctttcggccggaaaagccacgttcagcgggctgatttgggccagcaacagcagtggtatcgcggttagcttttaccagattttcggtactggcggctccgagtcgattgtaggtacgccggttattgtccctactgtcgcaaatacatggcagtacgtgaccgtaaccctcgacgtgccgagcatttttggtactacgatcactgacgacagcgcgctctggctgaatatttggctcgacgctggttcctcgtcaggaggcgctggcggccagaagaacggcgtttactggtttactaacctccagttggagcgcggcgcgtcggctactgcttttgaacgccgctccgatgcgcttgaacttatgctctgccagcgctactacgaaaagacctacaacctgagcacagcccctggcgctcctgaaaatcctggccgcgaggcgcacgcatcgtctggtgtaaatggcactacgtgctgggccactgtccgattcacgcagcgcaaacgtaacgtgccggcggtagtcatctacccagccaacacgacaggggccaaccctggcaacgtcgctcagaacgacggctctatcacgggtgctgctatcgagaacgttggttcttccggcctgcaggtggcttggggtaattccgccggtaaattcggcggctggttccactggaccgccgacgcggagctttga

SEQ ID NO: 503110 - DNA, 465 bp, Stenotrophomonas maltophilia
atgtaccgactgaccgacaatcccgacatgctgtattgcatcgaaactggcgctttcataccgcgcggccattggatgtggcctaccgagtggctgctgatcaacactccgctgcccgtccctgcgccctacgaacccaacacgccggctcaccatcgtgccatccgcgatgcagcttggaagtggatgaacgacgtggtcaatgaacgtcagtacgacagcatcgaaagctgcgtgggctactacaacagcggcgtggagcggtaccggttggaggcacgggcaatggtggcctggcgcgacgcagtgaacgagaagctggttgcgctggtgctcgatccgccgccgggcgtagtgacatgggagcaggttcgacctctgctgccccaaccgtcccagttcaactggccgtccagcttggagctcccgctcggagtaggtgacggccccgcagttcaactttga

SEQ ID NO: 503111 - DNA, 1554 bp, Stenotrophomonas maltophilia
gtggaggaactgagcgaccaggacgccagccgaatcatcgagaagctgggcgatcggtggtggcgcctgaacaacctgtactacatcaccgacaagttcggtcgacgggtgcagttcaagctgaacgaggtgcaggcggacctcgacgacaacctgcacacgttgaacttggcgctgaagtcgcgccagcacggcatcacgacctgggcctgcatccgcgccctggacatggcgctgttcaagaagaacaccaaggccggtgtggtcgcccataccgccggcgatgccgccaagttcttccgcagcaaggtgctctacgcctacgacaacctgccggactggctgaagaagatccggcccgcagtccggcgcgacatgcgcgacggcgtcctggagctggccaatggctccagcatcgaggtctcggtttcccaccgcggcggaacgctgacgttcctgcatatctccgagtacggcccgatgtgcgccatgtacccggagcgggcaggggaggtggcctccggcgcgctgaatgcgatcgcctccggcaacatcgtggtgatcgagtcgaccgcctatggcgccgccggcgacttctacgagcgctgccagacggcgatcgagctggacaggcagatccgcgccggtacggccaagctgacggcgatggattaccgcttccacttctatccgtggttccgggatccgatcaacgagctcgatccggacggcgtcacgctcaccgccgaggacgaggcttacttcgccaaggtcgaggcggagatgaactacgcgctgcggcccgagcagaaggcctggtacgtcaagaaggcggccgagcagcgcgacaagatgaagcgggagcaccccagcacgccggaagaggcattccaggcgagcactgaaggtgcgtactacggcaaggagatggccgccgccgacagcagcgggcggatcacggatctcccgatcaacccgcaggtgcccatccacaccttctgggacatcgggcgcagcgatgcgacgagcatctggttcatgcaggagaacggcccctggctggacttcgtcgacttctacgagaactccggcttcggcgtggcgcactacgccaaggtactgaaggagcgcggctacctgtacggcaagcactactggccgcacgacggtgccaatgaggactggtcggccaatgagaaccgagtgcaggtcgccggcaagctggggatcaagcccattgtcgtagtgccccggatcaacgacatcaccgagggcatcgagatggtccgcaacgtgctgccgcgctgccggtttgacagggttcggtgcggtccgccgaaagcgggcgagggccgcggcggactggaggcgctgcgccgctacaccaaggtctggaacgaaaaaacggagacgtactccgacctcccattccacaactgggccagcaaccccgccgatgcgttccggcaggtggcccagggctacgtcagcagcagcggccgtcgcgtcggcgagtcgcgcggcatggccaacgacaactggagaactgcatga

SEQ ID NO: 503112 - DNA, 9561 bp, Stenotrophomonas maltophilia
atggcaacgttcgaaaaggtcgatgggaatccctttggcgcaggagcagccgcagcgccagcaccaacccccgcagccaccgacaaggttgcgcgccgaccgacgctgtcccccgtgcagggcgacccgttccagaaggtggccaagcgcccggagcgatcctggggtgaggcgttcaaggacaccgggctcggcattgcttccggcgccgccaacatcctcggtggcgccgtggagcagcggaactccatggagccgaccaacatcgtgcggcagggcctgcgcgcgctggacaggttgggggtcaagggcgcatccgagaccgccgcgctggtaccaggcacaccatccgagatcttcggcgggcgccgggctggctcggatagcgcgggcttgtcgaaggcaacgcagctggccaccgactacctcggcgagagccagtctgatgcgctcaagcaggagaagcaggacctgcaggacaccaagggcttctttgccagtgccggcaaggtgctgtcctcgccgcgactgatcggcaatttcctggccgagcaggtgccaaacgtagccgcgatgggcgccggcacgcgccttgcggctgcgcgggcgggcgaacgagcattggcgggtgcgttggccaagggtctcggtgccgaggccgctgaaacggcagccaccgccgctggacatcgcgcggcgactgccgctgccaccggcctgacgacgatcatggagaccgggtcggcgggccagcaaacctaccagcaagcaatggcgcagccgcagtcggtctgggatgccaatccggaatacaagcgcatggtcgccgccggcggtgacccgcagacggtcaaggagaccatcgcgcgtggcgcatcgatggaagcgcaggcgatcaccgcaccgatcgcggcgatcgccggccgcattgcggcgccgttcgaagccgacgtcttcacccggggcctggcgcgcaagccgaaggcgatgctcgcaggtgctgcgcgcgagactgtggaagaaggcatccaggagggcggctcgcagctggccggcaaccttggccagcgccaggtcgatccgacccaggcagcgtgggaaggtgtccctgaagcggccggtaccggtgcggcgatcggcggcctgctcggtggcggcatggccgccggcggcgcgatcgccagccgcggcgacaaccaggccgcagtggcagctgatgcggagcgggaacgtctggcacgccggccgacgccgacgccacctccgctgccaccgccgccgatcccccagatgctggcgcttccgccgccggaagtgatgactgctgcaccggatggcactgtcacgcctggcagggtccgcccggaggttatggccgaacctgagatgcgctttccgcagggccgcggcatgtccgctcccttcgacgggactcgcgtcgccgcgcggccgcagccgacggtaccgttccctgatgcaacccctgactcgatcgccggcatcgccaacctggtgtcccaggcccggcgtcccactgagcctgcggataccgcaacagctgcggcagctcaggcagaacccgtcgccccgcaagctcaggaaggccaggcgcccctggtaacaccggaagttccggccgccgcggcgcctccggcgcctgcggtcgcgccgccgtgggtcgatgcccagaccggtgaagcgctccgtgagccgaccacgacggacatcaagcagctgctgcacagcggcctgcagtaccaggtcgagacgcatggcggaatcaatacgccgaccctgctgcgatccatgcgtgaccagtacggcctgcccagcgcccgtgtgcgcccgctgctggacgaggtaaagggcgagcgtcggcgcggcctcactgagccgccagccgatgccggcaacctggcagcgagtgaggccgccggcgcagcatcgccggcgcagcagtcgctgagggaggccgcaccgtctgcagatctgcagctggatggtgccgcgccgaccgatcgatccgccccggagccactggccagcgaattgcagcgcgcgcccggtgatgcggctgcgcagttggacaccggttcgtctcgcgcaccggtcgctgagccgcgtgcagccggcgcgacggagacaaccggtgtggccgggaccgctccggagcagtccgtggccgaggcgagcgctggccaggccaacgtgccggcgcaggccgaagtgccgaaggtggccactgcggctgctgaggcggcgacgaatccgcagaatgatctgcctgcgcccacggatgcacagaaggaagccggcaactacaagaagggtcacgtccgcatcaacggacacgacatcagcatcgagaaccccgccggcagccagcgggatccacgctggcccgcactgaagaaccactacggctacttcaagggcaccgtcggcaaggacaaggaccacgtcgacgtcttcatgaccgaccgcgctgaggatccggcgctgccggtgtacgtggtcgaccaggtcaacaaggacggctccttcgatgagcacaaggtcatcatgggcaccgcgtcggagcaggaagcccgcgagacctacctggccaactactcgaagggctggacgggcctcggcggcatcaaggaaatgtcacaggagcagttcaaggcctgggtgcgcgatccgaagaagaccacgcgccgcgttacgagggcccagcaggcggagcccgcgccggcgccgcaggccgctgcgcctgcaggtggaacggagcagggcgtaagcacagcacccgaaagcgtcggtgcgccgtcggaaaccggtggtgcgttggccaagatcgaaagtgaacccgccgctgcagcagctgcagcgccggcaacgaccgaccagcccccggcctatacgcccaaggtgcgacgcatcggtggttctccgcagtacgaccgcggcgacattggcacgctcggcgcctacttcacgccggggcgcatcgtgaatgcctacggcaacacccgggatcgagtgattgagtttcggccgccggggaaggatccgcgctggcaggtgaaggttcagcaggtcgattccgccggcaacccgctacctgacgaggatccgcgctggcacagcaccatcccgtcgccgaacgacctggagcaggtgctcggcaagccggtcgcgaaggcgcgcaaggctgccgctcctgcacaaaacagcaccgcggcgaccgacgctgcgcccgcgctgccgcagaagcaggccgctggtccggcggtgatcgaagacctgggtgagaagctgggcggcgcgcgcaaggatctggccaagcccaccggtacgcgaccgcagcgccgcgctgacgccgacgctggcgccgaggcgggcccggcttggtcgaagaagtacgtggcgatggaagacgcccgcagcccgggcagctggcgcctgttcaaggcgaaaaagggccgcctgggcaacccgttggccagccggcagaccttcgccagccaggctgaggccgaagcggcaatcccgatggtcgagctggcccgcaatcatcgtgccgtggagcgcgagcccggcaactgggcgatcgcgcgagacgtcaccgaccggaagcgcgtctatctcaaggatggcttcgacagccgcgcggcggcgctgcagtacatggccgagaacgcgccagcactgatcgacaccaagaccaccgtgggcgaggacgctctgccgcggccggacaaggtcatgcgcatcggtgaggcgcggcgcgagggcgatgtccagggccaacagttcatggacaccttcggcttccgaggcgttgagtttggcaagtggaacaaccaggacgagcgccaagaggtgatgaatcacgccttcgacgcgttggtcgacctgtccgagctgctgaacctgcccccgcgcgcgatgagcctggacggccagatcggcctggcgttcggtgcacgtggccacggcctcagcggcgcccgcgcgcactatgagcgggactatgcggtgatcaacctgaccaagctcaagggtgccggttcgctggcccacgagtggatgcatgccctggaccactacctcggccggcaggacggccgtgggtcggaacagatcaccaacagtcgcggcgacaaggtcatgaaggcgtcgggtgttgacgactacctgagcaatgccagccgattccgggggaacgtgcgtccggagctgcgtgcggcgttccaggagctgatggacaccatgcgaacccgtgccgagcagtatgtcgaagacacggcgcgcgctgaatccttcctgggcaaggcccgtgaccaggtgcagaagcaactaggcgatctgcgtgcccacatcgagaaggagagggcctggggatcgcggaagcgaccggcaacacaacaggaactggccacgttcgacgccgcggcggatcggctgctcaacggcgagacgttcagcaccgatgcgaagccgaccaagggtggcggggtacggttcaccaacgaagaactggacgcgctcgatggcgtcttgaaagccgttaccaaccgcacgggcttcaactccgagcgcaccggctcgctggatcgattgcgcgatgcgatgggcatgtatcagcgccgggtggagctatggcagtcggcagacgccggcgaggcgaagaccaagaacgtgccgacctcgttcatgaccgaggcccgaaagctggacgatggccgcgtaggcaattactggaccgcgccgcacgagctcctggcacgtgccttcagttcctacgtcgaggaccgcctgcaggatgctggccgggccagcgctttcatgtccttcggttcggacccgcgcttcgcggtgccggtcggtaccgagctcgctcggccgttccccggcggcgccgagcgccaggccatgaatgccgcgttcgaccgcttcttcgccgaggtcaagcacgaagagagcccgaccggtggtgtccggctcttctcccgccgtggctgggaggccgacttccccgatgtcgtgacggctcaccgtcccggtcgcctgagcgcgcacgcggattacgctgcagccaaagctggcgacgacaccgcggccctgcgcgtggcgcgcgacgtcatcaccccggcgtttgtcgaggacgtgcgtgctgcgctgccggagggcagcaagcccctggtggtggccgtgcagtcccaggaagccacgggcaacaaccgcatcccgcgcatggccgccgaggtgctggcccagcgcctgggactgcaggtgtccgaagacatcgtccaggccgccaaggtcaatcgtagtgccggcgatgccctacaccggctggccaaccagcccccgttcgccggcaaggtggagaagggccgcgactacgtcctgatcgatgacacgctgacccagggaggcaccctggcccagctgaagacccacatcgaggacaacggcggcaaggtggtgctggccacggctttgaccggcaaggactattcgcggaaaatcgccctcaactcccagagcctggccgacgtccgtgaacgtttcggatcaatcgaaccctggtggcgcgaccagttcggctacggcttcgaaggcctcaccgaatccgaagcgcgcaccatcctcaccctcgacaagggacgtctcgatgctgacgccctccgagatcgagtcgctgcaggccgagtaccgggcctccggccagtgggcgaaggagcaactggccaaggatccggagctgaagcacctgggcccggcgggcgggtaaaccgatccgcagctccggccgccagtggcggcctggactttgaccgcgcgctgcagctcaaaaccgacctgacccagcattggggcgaaaacgcgcccagcgtggtcgtggtgcgctcggccgaggacttcccggccagcgccaaggtagatccgggctatcgtcgcgccgagggtatgtacgacggtcggcccacggtctggatcaacgccggcaacatcgccaccgagcagcgcttcgcgcaggtgctggcacacgaggcaatcgggcactacggcgttgagtcggtggtgggggccaaggactggacccagatcgtggacgcgatcgacaagctggcagcggacggatccggcaccgccgcgctgaagtcggtgctggccgatgtgaccaggcgctacggcactgtcgatcgcgagaccttcgccaaggaagcgatcgccgtcatggcagagcgggggatccgcaacagcttcaccagccgcgtcgccgccgcggtccgccgcttcctgcgccgcgtcatgccgtcgctgaagtggtccgagaccgaggttcgggacctgttgagccaagccgatggattcctgcgtgccggcatgtcggcccaggcgcagcgggaaatggtgcggtcctactcgttcgcacaaccgcagatcgacggccgcggcgaggccttcctcgagcagaacggtggtcgatttctccgccgcgacgaccagtggtacctcgccgacgagcggggccgcccggctgacttcctgaccctcggcgccgcgcgcgctgaggccgagcgcaccggtggccaggtgctggccgatccggttgagagtgggccgcgcacctggagcgtggtgctgcccaatggtgccgaggtgacacgggccgcgcgcggccgcctcttcagcatgccgccggcagacgcgctcgcggacattgatgcgatccagcagggcatccagggtgacggtgtgctggcacgtgcgcggcagaagctggaagacctgacccccagcaaagtgaaagacacgttgcggtccacgtggctcggtgcgctggccacccggcacctgacggagctggggcgcgactacttcccgactatcgatcgctactcggactacctggccgaaatgcaggccgaccggaacaagctgcaggcagaggcggaagcgatcgccgagcccgctcgtcaatgggccagcaagaacaaggcggaaagccggcgtctgttcgacctcatgcaccaggcgaccatggacggcgtagatccgtcgcgcgagtaccagcccctgcagttcaaggcgccaggagggcagggtctgcaggaggtcaaccgcaagaacgttctacatgcgatcaaggtgatccagcagcagatgagggaacgcagcggcgataccaagacgaacatgatgaatgaagtgaagacgctgaaagcaatgctgaaggtcgaaccacgtcgccgcaggcagtacgtccccttggtcgagcagtggtcacagctgtcgccggatgcaaagtcgttctatctgcagttccgtgatgcctatcgatcgaggtccgacgcggtggaagcggccctgattcagcgcatcgaggacctgaagggtggtgatctggttggaggccaggtcatcagcgacagtagccgccgcatgctggtgaacaagatccgtgagcagttcgaatccgcacgcctgcaaggcgtctacttccccctgcagcgattcgggaagttcttcgtcgcagcggagaagggcggcacaagcactttcctgatgttcgaatcacagaacgagctggaccgagccgtgaaggacctccaagccaaggagtgggccatcaccgcccggggaatgaagatggagggcagggcggccgacgcaccgagcggcaccttcgtcgccgacgtgatcgaccaactgcggacggcgcacgtgtccgacgcggtccaggaccaggtgtaccagttgtacctgcagaccatgccggagctgtcgatgcgcaagcaccagatccaccgcaagtcggtgcctggcttcgatcctgatgccgtgcgtgccttcgcctacaacatgcagcacgggtcgcaccagctcgcccgactgcgatacgcccacaagctgcagggtgtgctgaccgacctgaaggacgcgcagaagaagattcaggcgtcgcccagcgtcgacacgcgaaagattgtggcgggcgacgctctcctggaagagctgggcaagcggcacgaatggatcatgaatccgaccgactcggcgctgaccaacctgatctcgtcgttcggctttacctactacctgggcgctacgccggcagcggccctagtgaacgtgacccagaccgccctggtcagctacccctacctggccgcacggcacggcggggtcaaggccatgaactacctgctggccgccagccgtgacgccgtgcgcacagtgggcaacatccagaggacgctgaccgaccccgacgagctccgcgcctaccaggcgctggaagtcgccggcgcgatcgagaagacgcaagcccacaatctcgccggcatcgccgagggtggcctgacgggctacaacccggcctggagcaaggcgatggagatcatcggctggggtttccacaagaccgaggtggtcaaccgcgaggcgaccggcatggccgcataccgcctggcccgcgccgacggcaagtcgttcgacgaggcggtgaagttcgcccgggacgccatcttcgacacccacttcgactacagcaacgccaaccgcgcccgcttcatgcagagcggcaccgccaaggtgctgctgatgttccggcagtacagcctgaacatgacctgggcgctcgggcggatggtgtggcaggccaccaaggggcaggacccgcaggtgcggcaaattgcccggcgcaacctgaccggcctgctgggcatgagcgcactgttctccggcgccatgggcctgccgatgatgggcatgatcatgggggcgctcaatggcatccaggccaccttcggggatgacgacgagccgtgggatgcagagaccgagctgcgggctttcctcaccggcatgctggggcagggcggggcggatctgctgctgcacgggccggcggataagctgaccggcgcgaacatttccggccgtgtcggcctggatagcctgtggatccgcgacgccgatcgggagctcgacggccgcggcatgttcaacaacctgctcgagcaggctgcggggccaatgggcggcgtcctgaagaacgtgctggtcggcaagcagcaggtcgacgagggccacatcatgcgcggcgtggagaccatgctgcccaaggggctcaaggacatgatcaaggccggccgttacgccacccagggcgtcaataccctgcgcggcgacccggtcgtcgaggacctgtcgccctgggagatcctgctgcaggccaacggcttcgctccggagaaggtgtccaggcagtacgagaccacccgcgcgctgaagaactacgagcagcacatcctcgaccgtcgcaagtcgctggtgaatgccttcgccatggccctgcgcaacggcgacgccagcgaccgggcttcggtgctaagcaagatcggcgccttcaacaaggccaatcccgagctggcgatcacctcgagcggtctgcagcagtccatcaagaaccgggcccgctacagcgccagggctgaggccggcatcgtgctcaacccgaagcttgccgcgcggctgaacaatgcagtgacggagtaa

SEQ ID NO: 503113 - DNA, 207 bp, Stenotrophomonas maltophilia
atgctggacggcagcaagctgctggtggcgctgatcgatggcgagcagctgccgccctcggaagtgtcctccgcatgcaacctgttgccagcggattggcgcacaggggattcggtcgttgcccagacgcgagggtcgtcccaaggctaccgttcctcgtccagcacctcgtcgtcgagctcgtcctcgagcagttccggcggctga

SEQ ID NO: 503114 - DNA, 405 bp, Stenotrophomonas maltophilia
atgcaacggttgaattcccgggttgggttgaactcaggcgcacacgccacggactggcctgagcttggggaacgctcgatgctttgtctcattgcagcaacgtcgccccaccagctgccttcattcaccgcggcgttggacgcggccatatcgcagtggatgagcaaggcgaaagaagaatccttcggtggcatggagcaggagctggcgcgcctgcatgccttgaagagcattacctcggcgttgggcagcgccggggttgccctgacctgcgacgcattgagtgagtgtctccgctcgggtacagaagcgtgggctgtgcggcggcgggcgtgcgcgttggcgatgtctgcacaacgccttctacgccgtgcgacgacacatttccgtatcgaagggggctga

SEQ ID NO: 503115 - DNA, 780 bp, Stenotrophomonas maltophilia
atgctgacattgacacttctcctgctgctttcatgcagcgtgctggtctggaaacgccgtctgcgcattgctgcgtgtctggcgacgcttccgctggccatggcagccagtgccagcgctccggtcacacaatggttgctggatcgcgcgcagggcacccgttctgtcaatgaccacggcgcacttcatccgcgcactgtgatcgtggtgctgggtgccggtatcgaccacgacgcccagggctccaggcccgggctggccggctacagccggctgctggctgctgcacagcgttaccacgaatgcgagcgcgcgcgcgagaactgtatggtgcttgccagcggaggcatcactgctgcgggggacgtcgccgaagccgacgtctatgcacgggaactgatggcgctgggcgttcccaccgagcacatcgtccgcgagcgcaccagcgcaaacacatggcagaacgccagaaacagcagtgcaatcatcggtcatcacagttcgagagtggtgctggtcacctcgggccttcatctcacgcggagcctgacctacttccgtcacttcggcatcgcggccgaaggcctccccagtgaccgcctccgcgccacccgtgggtggctgccctccacattcaatctactgctggtcgaggtgatgctgcatgagcgcattggcgttctccgttaccatctttacaaccggatgggctggaacgacgcccccatcgagcccgtcagtgccgcgcctgcagcaaccacccacgcattgccgcactga

SEQ ID NO: 503116 - DNA, 546 bp, Stenotrophomonas maltophilia
atgatgtttgttttgaagcgcgtggcgctggcatttcttgctggcccacctctgctcttgtctgcctacgctgtggaagccagcgcgatctatggcgtcaaccacacccattgggcgatcaaccggttcagtgtcgatggccgttcggcgattgacattattggtccgtatcaaggtggcggtggacggtgctgctacatggccccagatcaatggcaaccaggaacgatggtacgggtcgattgggaaacgggggtaggaggctcaaaaggatttcctggatttgctgatgaggcgaagtacgacgcctggctgcaacaaatcgaggcacaaaagcgttaccacagcaaaatcgtcgccgtcccggattacaccaaccagaatgtctgcggcatcactgtacatttcctgccctgcgatcagattcaggtcaccacctcctgttacacctacggtagccccgagtacccgatcaagactccgctgcaattgccggagccgcagtcatgtccggcacaacgtaccaaccagcagaagacgtattga

SEQ ID NO: 503117 - DNA, 618 bp, Stenotrophomonas maltophilia
atgcgcagcgtacttctggcagcgatcatcactgtctcagcgccagcggccggcgcagaaacgcatgtagccgccgacggtgcgacaccgcagggaagcctgcgagtcgaggaaagatcgcccgtgatcaaacaactttgcaagacagagaaggtctggctgtcctggaacaaagccgtaccaaacgcaacgctggtgacctgcgattgcagttgcacatcgcatgacaactcaggatggcttgttgaggcgcaaccggaagtcgacacctatcgggtacatcgagtctctctcggcaaggttttcagtcccacggagttacgtcgggctggtgcgcggattcaggacatcgtctcgtcgcatccgtggtgttcagccgccagaccgagcgtgccgacgaatgccgtgttcgcgacgttggtgaagcagcccacggaatcgggcgatgagccctactgctttacaccccacttcttcgtaggtgatccaaaagcccccctgagaagaactccagtttcgggtgaactgttctccgattcgcccgcagcagaatcagcagtgatcgcgcgggaggtcaagatgctgcgtgactggaggcgggagtttgcgcctgagtag

SEQ ID NO: 503118 - DNA, 684 bp, Stenotrophomonas maltophilia
atggccggagcttccgatgccagcgagcagtccattgatgtcgcggcagtcggcctgaacgccgagcgcgaacacatcccatcggtgggcgacagcctggctgtcgtcgtcggcgagctcgagggcgatgccacacctggtgccagtattggcaaggtgctcgagatacttgcagagagacttgaacgtacgacctgccatgtacagcccccgggcaatgacagctcacgttcgtccggcgtgacctgcggcggacccgatgtagacagcctcttcccggactacaccgccttgcgtcaggcgagcacaccggcggagcgtgatcggtacggccgtcgcttcctggacgcctatgcgacgttgctcagggatgctccggatgtcgccctcacgcgaccaagcgaggatgaggcggcagatgggctgttacatgtactcttcccgttcaaggcctgggacgagaagctgaacattccacgccatgacgtgcacttcccgtttgttcctgtgtgcaacctcgttgtcgctcgcgctgcgcgctgcccgggagccgaccagctgcgcagggaaattggtcgggcaggcgatgagagtgaacagcgcttgttgtgcatcaaggagttctcgacgcggcagctggcggaggaaggtgaatgcccggaagcgaccaccaccagcccttga

SEQ ID NO: 503119 - DNA, 1449 bp, Stenotrophomonas maltophilia
atggaaaacagcaacatcgaatcagggaagtacaagccgcgctttgacttcgaaaaagatcaaaaaacagatccgcctgagactggaagtatcagcgagcttttggaagagctcaactatgagatagcgcatgcatcagatggcagcaaagccaaacactctaatgcttcagggaaaacaataacccgcaaggagcttaaaggagtcattgacttcataaactccacattgggacaagagattcctactgggaactgtacacttccactctccaccctaaaaacaatcaagctcctctacagcaagaacgactccagcgacacccagctgcttcaaagaatctcgaaaccaggtaccattaaggccaccttcgagcactggacagaacgcaactctccaagaaacgaaaaaaccatcaaagcagcatcgcatctcatgtccacacttgagcttgagatagacgaggaaagacgaaagcacatacacaccaacaggctcacgccttcgaaacttcttgaatactacgccaggcaaataaaggaacttattgaccccatctacacagctttcgccggcgatgatgaagccatagcaagcgcttttatgtttggcgcacatcaaatagaaagctatcaaccctcatcactcctgaccagcaaagaagccgcccccatctacgaaagactatacatctatttgataacccttccattcttgcacttcgttggcgagtatcaacgaattatcgaatcagaaaacgaagcgttaagtaaatacaagatagagccactcttcgctcacgccctctcctcaccgtcagagagcgatgacctattgcgacctgtcacatcactcgcaactattcactctttcctgaaaacccatgcaaaggagctggcacgtctggttcaccaagccactggtgaagaatttagatccagcgaaatcccaaacatagctgacgaaacgcagaaggttctgcatgcctatgtcttccacgaatggcacagaacagatcccgaggccgtcaatatctcaatggcagactgcatcgcagccatatcagccataaagatacaaaagaagataaaaacgaagtacacgccctactggaaagggcagatctctagtgaaaaaacggtatctcgtctactgagccacctggatccatcaagagacatcggagagctgtatgaagaggattacattccgcaaggcgcaatgattactctctatcatcgatactgcatcgtcttctcattactattcggacgcaacaaccgaatggaagcattcatgaaatttcagctcgcctacctgaaacacatgaccatagctcattctcacttcgatctcgtagcaggcaacgaatacgagacaaagatcaacatgttttgcgaagacttgattcagtacattgaagatcaagccacttcgcatgcaatgtaa

SEQ ID NO: 503120 - DNA, 714 bp, Stenotrophomonas maltophilia
atgccaacggcgattctcatcgatggtggttacttcgttaagcggttccgccgtatcgaacctcacaacgccaacaacgccgaacgtgccgcggaagtagcccatcggtgggcactcgcgcacctgacctcctcaggttgtcagcgacgggaactctatcggatcttcttctacgactgtccgcccctgcagaagcgaatgcacaacccgatctcgggcacctgcatcaactatgcgcgctcacccgaggcgctcttcagaatcgatctgcacgaaaccctgaaacagaaacgcaaagtggcactgcgccttggtcacctcgcggattccagttcgtggacaaccgattcccgaacgctcgatgcacttctgaaaggcaagcgctcattctccacgctcctgcccgaggatctgcacccggaggtcagacagaagggcgtggatatgcgcatcggcctggacatctcctcgctttccctcaaacgacaagtccgtcagattgttctggtcgctggtgatgccgacttcatccccgctgccaagctcgcgcgacgcgaaggcgtggactttgtcctggaccccatgtggtctccgataccccaaggacttctggagcatatcgacggtgttcgctccacctgcgccaggcctgcaaacaggaaggaagggaaggcagtgatcgaacacgcgatggtgggtgcaacccgaccctag

SEQ ID NO: 503121 - DNA, 672 bp, Stenotrophomonas maltophilia
atgaccgagttccaacgccccaccctgaccctgcccgccgacggcaagcgcctgctgctgcattcatgctgcgcgccctgttccggcgaagtgatggaagcgatcaccgcctccgggatcgactacgcgatcttcttctacaacccgaacatccacccggtgaaggagtacgagctgcgcaagcaggagaacatccgcttcgccgagcagcacggcattccgttcatcgattgcgactacgacaccgacaactggttcagccgcgcacgcggcatggagaacgaacccgagcgcggcatccgctgcacgatgtgcttcgacatgcgtttcgaacgcaccgcgctgtacgcgcacgaacacggctacgacaccatcagttcgtcgctgggcatctcgcgctggaagaacatggcgcagatcaacgactgcggcattcgcgccgcctcgcgctatgaaggcctgcagtactgggactacaactggcgcaagggcggcggtgccagccgcatgatcgagatcagcaagcgcgagcagttctaccagcaggagtactgcggctgcgtgtactcgctgcgcgatgccaaccgccaccgccgcgagaacggccgcgagcgcatcaggatcggtctgctgtactacggacaggacgctggaacgccgcagggcgattga

SEQ ID NO: 503122 - DNA, 1050 bp, Stenotrophomonas maltophilia
atggaattcgactatctcgtcttcatcgggcgattcgagcccttccacaacggccacgccgccgttgcccgcctggccctgagccgggcccgcaagctgatcttcctggtcggctctgccgataccccccgcagcctccgcaatccctggaccgtggccgaacgtgccgtgatgatccaggcggccctcgacggccacggcgaccgcctgctgatccgcccgctgcgtgaccacctgtacaacgaagcacagtggatcgccaacgtgcagcgccaggtggctgacgccctgcgcaacgacggcgccgccgccgatgccagagtcggcctgatcggcatggacaaggatgcgtccagctactacctgcgcgagttcccgcagtggccgctggtggacgtgcagcacaccgccacgctgtcggccaccgaactgcggcgttacctgttcgaggccggcgacgtggacttccacggtgcattgctgatgctgcgtggcaatgtgccggcgccggtgttcgacatgctcgaagcgttccgcaagagcgcgccggcctatgcccagctggtggccgagtaccgcttcatcgaacagtacaaggcggcctggaaggatgcgccctacgcgccgaccttcgtcaccaccgatgcagtggtggtgcattcgggccacgtgctgctggtgcgccgccgctcggaacccggcaaggggctgtgggcattgcccggcggtttcgtcggccaggaacagagcctgctcgacagctgcctgcgcgaactgcgcgaggaaacccggctgaagatcccgctgccggtgctgaaggggtcactgaagggccagcaggtgttcgaccaccccgaccgcagccagcgcggccgcaccatcacccacggtttccacttcgaattccccgccggcgaactgccgccggtgcgcggcggcgatgacgccgacaaggcgcgctggataccggtgagtgaagccctggacatgggcccgcagctgttcgaagaccacctgcacatcctggagtatttcctcggccgcggctga

SEQ ID NO: 503123 - DNA, 255 bp, Stenotrophomonas maltophilia
atggcgcagtgcagcagccgtttcaaccgccccagcccccgccaggcttggctttcaggctcgatcatgttgcgcagcaagggtttgcgtgctgcgcagcatggcctgtggcaggggccggcagcagcggccggcagcagcgaccgccaggccccctgcgcggcttaccagcccatgtggtggccgccgttgatgtccaggttgctgccggtgatccacgaggcttcgtcggccaccaggaaggacacgccatag

SEQ ID NO: 503124 - DNA, 1686 bp, Stenotrophomonas maltophilia
atggatgcgctttcacgggtctcggcccaggtcctggacagtgccctgcccagcctgccgctgtacctgctgcaggccaccgcggtgatcggcatgatcggcgtgctgctgatcgccacccgtcgcgccggacacgccatcgagggccgtcgcctgtatgtcggcgtgacgctggggctgatctacctgttcaattcctggttcgtggccggttacacccagggcgtggtcaagctgcaccttggcttcgacatcctgctggtcagcggcctgctcggcgggtggcgcggcggtctggcctgcctggcggctgccgtgctggcccgctaccagtttgtcggcacccagtttttcctgcccgccagcctggaggccgcgctgcagatgatcaccggtgtctggctgcgcaggcgcctgcacccgcgcatgctcaacgagctgtcgctgcgcatgatcctgcgggcgtggtcggcgcgcatcgccgcgaccgcggtggggctggcactgggcgtggcgatcatcggcgccgaccagctgccggtggccgaactggcgatccagcgcgtactggcactgccggtctcgctgctggtgctgggcgcggtgttcgcgctggtctacaacgacgcccagatcgacgcgcagcgccagcgcgagcaggcctggttgcgcatcgacccgatcagtggcctgcccaacatgcgcgcgctgggcgaacgactgcaggacttctggcgcggcaacgacggcctcggcaaggcctgcctggtcgtggtcgagatgggcaacctgcgcgatctgcgcctgcgttacggcccactgcaggacaacgggctatggcatcgcgatacggcggcggacatccatcggttgctgccatcgcttcccgccgatgccttggagatctatcagttcggtgacgcggcgctggccctgctggtgcgcggcatgtcgttggccgagctgcgcagccaggcccatgtcaccgcgttggcctgcaatctcactgagcgcgtcagccgcgactggccgggcttccggccgctgttccgctgcgccgtggtcgagctgaagcctccggccaacgccgatgaaggccacctgccgttgcgggcgatcacgctggcgctgagcgcgatcgagtcgggcgtggtgttctttgatgacccgatccagcgcgacagcgaaatcgatgccttgatcgaggtcgcgctcgaacgctggctgcgccagggggatgcaccgctgagctaccagcccaagcatcgcctgcgcgaccggcggctggtcggtgccgaggcactgctgcgcatgcgcgatggcgagggccggccgatcacaccgatgcgggtgatctcgctgctgcgccggcagggccggctggccgacctggaatgggccacgctgcagtcggcggtgcacttcctgcagttctgccggcaggatggcgcttcactgaccatcgcggtcaatgtctctgccgaatcgctgcgcctgcccggattcggcctgcgcctgcacgagctgctgcaactgcacgacatccccggtgcgatgctgcgcctggaaatcgtcgagtggaccgagatcgtcgagcgcgacgtggtcgatgacaacatcgcacaattgctggcggcggggtcacgctgtcgctggatgatttcggcgcgggctactcgaccctga

SEQ ID NO: 503125 - DNA, 597 bp, Stenotrophomonas maltophilia
atgcgactgtgcaacttctcactcaagggtggcgtcggccgcacgacgctggccctgaatctagccgggtgctatgcccgtgaccccagcctgcgtgtgctggtcaatgaccgggacccccaaggcggggcctgcgcgtttgcctcactgtcggacgaaacaccgttcagtgtcgggcgatcgcgctcccctggcttcgacgtggagatcaccgacaccccgccgcgtctgccggacaacgaggtgattcccgaggcggacctctacctggtgccgacgttgctcgacggggccagcttcctcatcttcctgcgaaccgtggatgttcttgaaaagaagggaaagcgtttcctgcccatcgccaaccgggccaacgagaggcgggcagcccatcgacgtcgcctggagcaccccaagatgtcgggcgccatgctggtgcgggatcgtgcgttgtttgcggactgctacgaggagggaaagaccgtgttcgacgccaacggccgctgggcccgggtggcccaggaggagatccacgccttggcggtccgggtgcgcgacatcctggctgctggtgcaggccggagggctgcggcatga

SEQ ID NO: 503126 - DNA, 609 bp, Stenotrophomonas maltophilia
atgatggagcttcccttggtttccctcccagacctacccatggccactcgcaaagctcctgccaagaaggctgccacgaagaaggccgtcaagcgcaccttggatgacgtcaaggacgtgacccatgccaagccccgccgggccagcaaatcggcaagcgttccgattgcccgcatcccggagcacctgttgctggggccaggcgactacccggagcgcaagtcctactttgactacgacgacagccagaaggcgggaagcgtgggaggcaagcgggttcacatggtcatgccccgatcggtcaccctgcacgactaccgccgtcgggaggacgggctgcgccaccaccgggccatggtgacgatcccgccaaagctccgcgagaacatcgccaagctgttcggctttgacgattcggaggacgccgggagtgaagtcgcgttgaccaccgccatggtggcgctggcagactacgcggccgcgtcgctcatccaagacaacacgctgttgatcgtgagctcgccggtggacgagcacgcggaggaccgcaaagccgccagggtagcggtgcggaacttggggatgagcaagaacggaaagatctactga

SEQ ID NO: 503127 - DNA, 885 bp, Stenotrophomonas maltophilia
atggacgacacagacaaggaacggattgcaaattggcgtctgacgaagcagatgcggcgagagagaaagtgggacgagcaaaacagcaggtcctacagcagtcatttcaccttgacggacaaggacgctgcagatgtaaaggagttcgaagagcacctggttcgcaaacacttggggaagggccagctcacccgacgcatgtccaccaatgagcttgggctagcattgcgcgcctggaacctagaagagctgaatcagctctggagcatgcgccgagagaagctcacttacctcgaagacgccgccctcctgttggcccatatccgacaccgatccggcattgacccaaagctgcgcccggcagcggagctgcttggatacgacgccatccaagccctccagggcgtccttgaggagagcgggcggttggcagtggaacaggcactgcccccagcggcggaagccgtcgttgccgagggcaagcgggtggaacaagtccttcgggtgatccgagagggccaagcggagtttcgtaaacgcctagtcgctcactacggagccgtgtgcatggtcaccgggaccgccttggcaagcgtcatcgacgccgctcacatcgtcccctacaacggggcagccaccaatgctttgagcaatggcttactgctacggaaggacatccacgcgttgttcgatgcaggcctgttaacgatcgggccggacctggtcgtctacgtcagcgcgggggtggacgatccgttctaccgttcgttggacggaaagaagctctcgctggacactccgcccaagatgtccaaagaggccctgcggcggcgactggcgggcaatgaatcgtccgaactggaggttgctagccttccccaatga

SEQ ID NO: 503128 - DNA, 852 bp, Stenotrophomonas maltophilia
atgactgtcgcaatggacgtgaacgcagcaagccccttgaattcgatggagaagaacatggaaacccctccccgtattgccaagacgccgagcgcaggatcccggctccgtttcaccgccatggcgatttccgtcgccgcattgcttgtcttccctgcgaagggatacaccatcccggtggttgaagttggattgaataccttaaacagcacgttgactgaagccaatacacttgccgctcaggcggaagccttggctgagtacagtacccaggcgcaacggtttctggaaaccactcagaactgggcgcagaagctcgcgaagttcaatcagatcatcgcctcgccactgatgcctcaaggcgtgaagctggagccggttccgcttgagtggaatgtcgccgagcgctgcggcgccggcaatatcatgagcctgagcggtatccttactgcgttggacttgagcccgggtggggacatcctagcccagcagcgcaacatctgcgctgcaatccaggtcatggagaatcagaagtacaacgaaaccgtggaagttgtgcagaagacgatgcctgacatgcgcaaggtgctggacaggatcaaggatatccgtgatctgtggagcggcgagggtgcgatggcggaggcctccgcgaatgcagtcgtttctgatgcctatatgcaggcggattttgcgacttgggaaaagaagactgaagggtatgacaagcagattcaggcgctgaccaaaatgcagcagattcttgcgcagcgcgcattgaagggtaccggtcagtcacctctcggtaccgtagtgaaggccgcggcactgaaggcagcgctctccaactga

SEQ ID NO: 503129 - DNA, 1161 bp, Stenotrophomonas maltophilia
atggatcttgggctgatggatggcatgttggggcagggtcccctgcacatgctgcagaatctgcacgcgtcatcctcaattggtgattttgtgttcttccggctgatcctcgattacctgcataaggaaatcgcggagtacggcgtcaagctgcttggacgcatgatggcgtgggtcggtggcattgcactgactctcatgacgctctgggttctgattcagggtttccggatcgccaccggtcgcagccgcgattcgttgatggtgcttgtgaccaacatggccaaggctgcgctgatcgtgtcggttgccacgaccatgggtatgttcggtcgcgaaatgcatggctttctcatcaatgacgtgaagaacgagatcacttacgtcgtgaccgggaagaaggactcaccggaggatctgatcgatgagaatctgggctacatgcagctggcgctatccagcgttgacgcgctggacgtgatgagcgacgtgacgctggacaatgcgaagacccgtgccatgtggttcattggcatgggcacgggcggtccggcagtcacagctggctcaatgcttttgctgtatgaggtcgccctggcgttgttcatcggcctggggccattgttcatcctgtgcttgctgtttgaccagaccaagcagctgttccagaagtggctgctctacggcataggcacgatgttctccatggcggttctggcagcgatgaccggcatcgcgatgaagatggtgtccaaggttgcgttcgccttctggggaagcacgttgacgggtacgctgatgggtcagaatttcagtgaaggtatgtcgagcatggcgctgcagcaaggcggcatgggcctgatcctgaccacgctgattctgactgcgcccccaatggcggcgatgttcttccagggaacattgggcagcttcatggcatattcgcagataggcggtagtgcagtaccggcatcgcctggcccgaatggtcagccgccgggttcgacgggcgggcagagctataaaccgagttcgccttctgtgacgcaagctgatgctggtggtgtggggcaggtggtcagtccacgattgcatggcggaggcgattcggcgccgtcagcctctggtcttagagggaatgccagttccggcaccgtctag

SEQ ID NO: 503130 - DNA, 642 bp, Stenotrophomonas maltophilia
atgaccacacggatcctcatcgccgacgaccacccgatcgtgcttgccggcatccgcgacgtgctggccggggaactggacctggaggtcgtgggcgaagcgcccgacccggcgacgctgatcgagctgatgacccggacccggccacaggcggtgatcaccgactacagcatgcccgggggtgatcacttcggggacggcatcaagctgatctcgttcctgcgccgcagctttccggagacacgcctgctggtgctgacgatggtatccaacccgtcgctggtggcggcgatgtatgccgcaggcgccggcggcgtggtgctcaagagccatggactgggcagcctggtacaggccctgcgcgtggtgctggccgaccgggtctaccggccgccgggcctgctgccggtagacgcgggtgaaccggccgacgccgaggccgtgcgtgcgcgcctgtcaccgcgcgagctggaagtgatccgcctgttcaccggcggcatgagcgtgggcgagatcgcacgacagctgcaacgcagtgccaagacggtcagcacgcagaagatcagcgcgatgcgcaagctcggcgtggacagcgaccaggcgctgatcgagtactgcctgcaggcctcgttgttcgcctga

SEQ ID NO: 503131 - DNA, 393 bp, Stenotrophomonas maltophilia
atggagaacagcaccacgcggcacgtcagtgatttctatgccggggcctgccggctgcgcatgaaaggcttcggcctggcccaggatgatttcgggcagggcctgagctcggtccacaatctggtcaatacccccttcaccgaggtcaagatcgaccgcgcgctggtcagcggctgcgcccgtgatcctgccctgcacctgaccctgtcgacggtgatcgcactggccaaccaactgggcctgaccatcgtggccgaaggcgtggaaagtgatgcggacctggccgcactgcgccagctcggatgcagccaggtgcagggcttcctgatctcgcaggcgctgccgtcggacgagttcacccgcctgctggacgaggaagcgccctgtggatga

SEQ ID NO: 503132 - DNA, 363 bp, Stenotrophomonas maltophilia
atgtggtattgtgcgcatgccattttttactatgaatgcgaagggcaggactcgattcttgtccatgagaacgtctatctcctcagtgcggatggcgaagagcaagctctcgacaatgcgaaagcgcttgcctctgagtatgaggatctgagcggccgcctgatgggtgaagacggtagaccgtccctctatcgattcgcaggaatccgcaagctgatatcagtagagactgatgaggacactgccgagggacgcctgcactccggtgtggaggtcacgtactccgtcatggcggtggatacgttggatcaggtgagacgtcttgcccgtggtgatggcgtggaagtgctataccaggagtag

SEQ ID NO: 503133 - DNA, 1728 bp, Stenotrophomonas maltophilia
atgcctcgaattcgccatttggccatccggaattttcggtccatcaaggcactcgactgggcgccagctccgggcatcaactgtttgatcggtcctggcgacagtggcaaatccaccatcctcgatgccatcgacctgtgcttgggtgctcgacgaagcatctccttcggcgacatggacttttttggcctcgatgtctcagagccaattcgtattgccgtgacattcgggggactgccagcatcgctgatggacattgatgtctatggggacttcttgcgagggttcgatgcggtatttgacaccctcgaagacgaacccgccgcgggcctggagacggtgcttaccctgcagcttcaagtcggggcggaccttgagcccagctggacgctggtttccgataggtcgcttcaacaaggcttggaacgaagcctgccttggaaagaacgaatcgcattggccccggcacgtataggcagctttgcaagctccaacttgtcttggagccgcggatcggtcctcaaccggctaaccgacgaacgcgcagaattgggagcccagctcgctctcgcagcgcgtcaggcacgcgccaactttggcgctcaagcgtcgccccacctgagtcagacactcggaatcgtccaaacaacggcccagagccttggggttaacgtcgggtcgatgccgcaagccttactcgattcgcactccgtctccatcggcgaaggcgccatcgcgctccacagcgaggcaggcatcccccttcggtcacttggtacgggttcttctcgactcttggtgactggacttcaacgggccgcatcggagtcagcgccgattgccttggtggatgaggtggaatatggattggaaccccatcggctcatgcggctgctggattccttgggagccaaggagacgcccccgcctctccaagcgtttctcacaacacactcccctgtggcacttcgcgagctttcaggtgagcagctacttgtggttcgaccacgaccggctggccatgtcgtcatttccgctggctcaaccgacgagattcaaagcacgctgcggactgacccggaagctttcctggcgaagtctgcgattgtgtgcgagggagcaagcgaggtgggatttgtgcgtggcctcgatctatggggagtggccaacaaagaaccatcttatttggctttaggtggtgcatacgtcaacgcaggcggaggcactccggataacgcttttgcccgtgcaactgcgcttatgaagttgggttaccgagtcctcgtcttcatcgacgctgacaagcccgccgcgccaggtgttgcagaggcatatctccaatcaggtggcagcctcacgacttggcgggcaggaatgacgttggaggacgagctgttcctctgccttcctgacacatcaattgatgccctgctcctgaaggctaaagagcgtgtcggtgaagaccttgtgaaccaacagctggttgccaaatcgaacggtctaacaagcttggcgtccatcgaagcattgaggccgaagtcgccgtatccgctcgatattcgcgtactgcttggcgaggtctcgcgcaccaaaaagaagagctggttcaagtctctcacgacttatcagtcaatcgtcctggatatcgtctctcgcggctacgccgatgcggacgccagctttaaggcagtagtagaccaactctgggcctttacccgtgccgcctga

SEQ ID NO: 503134 - DNA, 876 bp, Stenotrophomonas maltophilia
atgaagatcgccgtcgccaagtacgcggttggcaaccccgccgacttcgaggcctttgccgcacgccagcgccagatcctgggagaagcatgcggtaccggcgtcgaactggccgtgctgcccgaatacctgtcgctcgaactggcgtcaacgttcgcgcccgaaatcagccgcgacttgaacgcttcgctggccgcgctgcaaacgctgcaatccgcgtggctggcgctgtacgccgacctgtcgcgcgagctgcgcctggtcatccaggccggcacgttcctgaccgaagtcgccccgggacgctatcgcaaccgcgcatggtggttcgccccggacggcacgcgcggctatcaggacaagctgcagttgaccggattcgagcgggacgctggcgtcatcgagggcggcgacgaactcaaggtattcgacttggcgggcgtgcgcgccggcatcgctgtctgctacgacagcgaattccccttgcccgtgcgcgcccaacgcgaagccggcgcccgtctgctgttggtgccgagctgcacggacacgcaggcgggcgcgacccgggtgcgcgtcggctgcatggcgcgcgcactggagaaccggttgttcgtagcgcaggcagtaaccaccgggaccgccgactggagtccggctctggatacgaataccggcgaggccacgatctacgcgccgatggaccacggctttcccgatgacggcatcctcgcgacgacccgcggcgggcaaacgtgggcgatcgccgatctcgacatcgacgcgctcgaatgccaccgcgcgcaggcccaagtagccgtcgacctcgattgggatggccagaaggcgccggcattccggcaggcccggcattcgtga

SEQ ID NO: 503135 - DNA, 609 bp, Stenotrophomonas maltophilia
atggcgggggacattcgcgtgctggtccgccgcgctgccgacatggtcgagtggttcgacgacgtggcacgcctgcgcgccgaggtcttccgcgcttttccctacctctacgagggcgatgccgagtacgagaagcactacctcgctatgtacgcccgttcggcagacagcctgctggtactcgcgctcgctgatgacgtggtcgtgggtgcgtccacgggattgccgctcggcgatgcggagccggccttccaggtgccgttcctcgaccgaggcatcccggtggaggaggtgttctactgcggtgaatccgtcctgctcccggcgttccgcggacagggtctcgggcatcgcttcttcgatgagcgcgaggcgcatgcccgttcgctgggtggcatccgctggacctcgttcgcatcggtgaatcgggcaagcgatgatccacggcggccggccgattatcgcggcaacgacgtgttctggacccgccgtgggtacacgcggcagccggacatgcaggtaagcctgccgtggaaacaactcggcgaagcgcacgaatccgagcagacgctgacgatgtggctgcgtccgctggaggccgggcaatga

SEQ ID NO: 503136 - DNA, 192 bp, Stenotrophomonas maltophilia
atgcgaggtcgaagggaatcgaccggcgcatgtccggccgccagccgcgtcgccgtggagacgcgggccgccagcgggcagggcctggcgctcggcagcgatgcggtgcagggcgcccctgacgtgctgcagccgcagcaggagaccccgcgggagccggcgcggcaggcccagaaggcgatgggcgtctga

SEQ ID NO: 503137 - DNA, 1575 bp, Stenotrophomonas maltophilia
atgccagttcccataattgatatttttgctggcccaggagggctcggggaaggattcgcgtccctgcggggccacaagaggcagccattcttcgagattgccctttctattgagaaggatgctgtcgcacatcgcacgctgtcgctcagggcagtgttcaggcgcctgcgtggcaccaaggacgtcaagcactactacagctacatacggcgcgagatcgatgaggctgcttttcgcaagatccctgccgtggccagcgcctttgagcatgctgccaccgaggcgagatgcctagaacttggcaagtccgatgaagtcagtatagacaaggaaattcgggctgcacttaaggggcaggaaacctgggtgctgatcggcggcccaccctgtcaagcgtattcgctggcggggcgctccaggcgtgccaacgacaaagactttcacaaggatgaaaagcacttcctctacagggagtacctgagaattatccaagtgcacaagcccaccattttcgtaatggagaatgtcaagggtttgctttcctccaagcactccggcaatccgatgttcgagaagatcatcgcggatctttcaatgccgaccgaagggctcgagtacgaaatccgatccttcaccaagaagggcgacgagagctcgctggaacctaccgactaccttattcattccgagcgacatgggattccgcaaagcaggcatcgcgtgattctgctcggagtgaggaaggggttggatattcctcagcatcagttgctggcacccgtggcaaagcctgtcacggtcaagcaggccattgacgatcttcctcgaatccgcagcaagttgtcgcgtggcgattcggtggaggcgtggcgcaaagctgtccaagctgccccctcgtgcgtcaagggctggaagacagagaatgaatctgccattatcgagaaaatgcgttcctttgctgctgcggcaaccagcactaccactggtggcgcctttatttcacgggactacaaaaggctaaagaagccaacagagcttcagcaatggcttcacgaccgaagtttggggggggtttgtcagcatgaggcgcgtgggcacatggcatccgatcttgctcggtatcttttctcggccagttttgctcacttatcgggatactgcccgacgctggatgtcttccctcccaagctgcttcctgatcacatcaatgcgcatgtcgatcgggaatccgaagtgatcccattcaaggaccggttccgcgtgcagtgcaggaatgaaccgtccaccacggtggtggcccacattgcgaaggatgggcactactacatccactacgatccctcgcaatgcagaagtcttacggtcagggaagcagcacggctccagacgtttcccgacaactacctcttcgcgggcaaccgcacggagcagtacacccaggtcggcaatgcggtgcctccgttgcttgcccacaagctagccaagaccgttcgtagccttttgaacgaaatgaataagaggaggcgaaggcagactggttacatcttaaagaagatgccggcgggaagtatgtag

SEQ ID NO: 503138 - DNA, 1479 bp, Stenotrophomonas maltophilia
atggctcgtgatcgcagtcatccgccgagcgcggcctgcctttcggaatcgatgcgggaccttgggtactcactcgaaactgcgattgccgatctgatcgacaacagcatttccgctggcgcggacaccatcgacatcatttgcgatgcatccggtaagcatcctgtgatggtcatcctcgacaacggcaaggggatgacagaagacgagctgctcggtgcaatgcgtcatgggaccggcaaccccaggcagcatcggtcgccgcaggatctagggcgcttcggccttggcctgaagacagcctcgttttcccaatgccgctcattgaccgttgtgagcacacgcgatggaactttctgcggagccgaatggaatctggatcgcatcgatgctgccgacgactggattctctccatcctggacgatgcggacatccatgggttcccttatgtcgaacggctcggcgcccgcggcacggccgttatttggcgagagctcgatcgattgatggaggacgaagccgggcatcgtcgagacgagattgtcaatgagaagcttgaggcggtgggcagacatctgtcacttgtcttccaccggtttctctcgggtgagatcaagggacatgccaggatttctctcaccgtcaatggccgtccgattacggcattcgatcccttttgcaggaagaatcctgccacccaggtgcttccagaggagatcgtccgcatcggcgaggccgaggtgcgcctgcagccttacgtgcttccgcatcacagtcgtctgtccgcgtccgagtacgactactaccaggatcgtagtgacttcatctctaaccaggggggctacgtctatcgaaacggccgcctaatggcttggggcgactggttcagactcgtgccgaagggtgaggccaccaagttggcccgggtacagatcgactttcccaacagtctggacgaagcctggaccatcgacatcaagaaatcgcgtgcccgcccgccgcatggggtgcgggagcggctgcgtcagatcatcaacaggattactgcccgcagcgtgacggtgcatagggggcgcggacagaagctctttcaggaaagccaggccctattctgggagcgctacgccgatcatggcggcatccgtttcgcaatcaacgagcagcaccctctcattgcatccctgggcacaagactttcgcccgaggatgcggatctgcttcgtgtcctgctggattcgattgccgcctccctgccggtggagatgatctattccgattactcgacccatccgcgccagatcaaccggagggcggtggatgaaagccagactctggagcgcctgaagagtctcaggaaggtgctctacggcgacgggccgggcgatccgaatgcctttctccagatcgtgcgctcgacgcaccttttcgatggccagatcgaactggccgaaaaattcatcagcgagacctttgcatga

SEQ ID NO: 503139 - DNA, 2655 bp, Stenotrophomonas maltophilia
atgagcctcacagtcatcacggaagaacgaaacatcgccaacgcgctcatctcaggccttgccaacatggccgagacgccgacgcgcgagcaggtggaggagaaggcgatagagatcgccgcgatcttcggctatacgggcgatctccgcaatatcgtcaccgaggcgatgatatcggttgacacgcgcatgggggccggcgtttcgctggtggatgtcactgcgaagcatgatgatcagtgggtccacaagcgtgatgatgtcgcttggacatatgcggaatcctatggaaactttcttctcaaggaaggttggccgccgcagatggtccagtcgctgagcgatgtcacgacccgcattcttggccacctgcaggatccgttgagcgagggcacgacctggaaccgtcgcggccttgtcatcggtcatgtgcagtcgggcaagacggccaactacaccggcctgatagcacgcgccgccgacgccggctacaagttcatcatcgtcgtcgccggcattcacaacaatttgcgcaagcagacgcagcagcgcatcgatgaggccttcatcggccggtccagcgatcccgagaatcgtcgcaacatcggcgtcggcctcgtgccgggctatccgcatccggccaccctcaccaacatcaacgaggacttcaacaagaacacggcggaaaagagcggctggaagatcaacgacttcagtaagccgatcattctggtcatcaagaagaatgtgacgacgctcacggctcttcacaaatggctgaaggagctgaacgccgagggcgatggccggatttccgacgtgccgatgctgctgattgacgacgaggccgacaacgcgtcgatcaacacgaacaaggaggatctggatccgacacgaacgaatgcgatgatccggcgcatcctcgggctgttcgcaaaatcgtgctatgtcggctacacggcgaccccattcgccaacatctttatcaaccccgacgcctatggcgatgatgtgcgtgaggagctgttccctcgcgacttcatctattgcctggacgcgccaacgacgtacttcggtgccgagaaggtgttcctcgacgaggcgaccagtcaatcgatcgtgaggccgatcgacgattgtgagaatctcattccgtacgcccacaagcgtgacgatgctgtccccgagttgccccccagcctctatcgcgcactcgacgaattcatcgtcgctcgcgccatccgcaacctgcgtgggcagacaggcaagcattgctcaatgatggtcaatgtgtcgcgcttcgtgcccgttcagaaggccgtgcgtgacttcctgagtctcagggagaagaagatcagggaagcggttctcgccaactacgcgatgccggaagaggtttccgcaagaaacgcgtacatgcagggcctgaagcacgccttcgatgcggagtatgccgatgctgggtttacttgggcggaggtgaaggcagccctcagcggcgtcttcgagcacctccacctctatgtcatcaacagcaagagtgacgaggtgctcgactacgcccgctacgcgaaggaaggagtcgggctgaccgcggtcgcggtcggtggtctgagcctctctcgaggcttgaccatcgagggattgaccgtcagctacatgtaccgcaatacgaagatgtacgacaccctcatgcagatggggcgctggttcggttaccggccgggcttccaggacctctgccgcgttcatctctctcgcgattcgattgattggtactctcatattgccgaagcagcagaagaacttgtccaacaggctaagcagatgagtcggaatggattgagtcctgattatttcggcttgtacgttcgctcacattcgaagagcctgttgattactgcggcgaataagatgcgcgcggcagaagaggttgtcattaatcaaaaccttacggggcagctcgttgagagcacctcgctgccatttgacaaggaaatcaacagtgcaaatgagcggctgatagaggatttatggaaaagactcagcagccgagctcagtcaacggacaaggggtggttcatacccaatgttggagttggcgatattgaggactttttggttgaattcaaaacacacaagaattcatccctgaagaagatgatggctctggattatttggaagccataagagatcagtatccgaatggcgatgttttactgatctctaagggggctagtgatgctgacagcttcaggcttggtccacaggatcggacggcagaaggggcgactatggatgaatggaaaatatccggatatcgagttgcgagtcgaggcgacgagaaatttgggttgagtgaagagcaaattcttgacgctcagcgcaaagcggcctccgatatcaagagtaaaacggggaagccgtcggattaccattatcgagtggtgcggaataagccgctattgatgcttcatgtgttgaccccaatggataacgaagagtttacagggtgtcgtatccctgctttcggcgtgagttatccagatggtctctatagaactgaggttaaggttgttgtcaatcgagtctggctgaagcagatgcagggccctgcggacaaccctgatgaagaggatgactacgatgcctga

SEQ ID NO: 503140 - DNA, 966 bp, Stenotrophomonas maltophilia
atgcctgattcctctccttgggatgacattgccgtcccgggatcggacttcaatgtccgccaagttgcggtgggaacggccgtgccctgtttctggggacgcgatgccgggggcgcctgcctgttcatcgtagagctccagggggatcatgcagcccagtaccggaagaatgcggtcacggtgaacggcatcgacgtcgatctccgtgccggagttcaggggcagcagcacttggtcctcgcccttgaaagacaggtcgatcgcgatctcttcgaaggactttgccgcacccttgcatcctcgctggagcacgccaccgattcggccagctctctcgccgtctcgctggcgcacatctgccgctggaagaccttcctgtcaggccgaagtcagcatctgtccatcgaggaggtccgcggcctcttcgccgaaatcgtgtttctgatggaactgatcgatcggcagatgtcgagcagggccgccgtcgaagcctggctcggtccggaacgatcgcatcaggatttcatcttcggcaacacagccgtcgagatcaaatcgctctcgggcgcggagcggagcagcgtccgcgtttcgtcggaagaccaactcgaatcactgaacgacgcgctgttcctccgcgtgtaccggctgagcgatctggccgataccgcaggagcccgctcgctcaacgagatcgttaccgcagtccaggcacgactcggcgaggcggatgccgtcgaggcctttgaccggaagctggtggcgcatggttatgcgccccttcttggctacgatgagccgcgctttgtcgtcagcgacgtgcgcagctatcgtgttggtgacggatttccgcgtttgatgcggtcgcaactgccgccagggattaccaacgtggcctatgacatcaggctggaaacgattgctccgtacgagtgtaacgaagcggccatcttcggggaggattga

SEQ ID NO: 503141 - DNA, 2103 bp, Stenotrophomonas maltophilia
atggagcagaccgaagaagagttcttccacgacttccgacaggaactgttggcgggcgccgaagccaatggcagcttccagctctccgagttcatggagaccatcgcgaacgaccttgtcgagaccggcttcacggagggttttgaactctgccatttccgggcgcagcgtggcatgcgcgtggatggctactggttcaatgacgaaggagttctggaccttttcattgcggacttcgattcccggaacgagctggcatcgctcaccagaacggaagtggccgcggcattcaagcgtgttgccaacttcctcgaagccagcgccaacaagggcctggccggcgaactggaggtcacatcgccggagtacggccttgctaggcagattgcggatcgcaaggacgccattcggcaggtcaacttggttctcttctccgaacgcacgctcagcgagaaaatccaggcccttcctgatgcggaagtggcaggagttccggctgctcaccacatatgggacatctcgaggcttcatcggcagcgaagctcccgcagccacaaggaaccactcgacctcgactttgaacagatgttcggtaagggcatcgcctgtcttccagcacatctggagaccgacgcctatcaatcctatctgatggtcatgcctgccgaagtgttggcagctctgtacgaaaaattcggagcgcgattgcttgagcagaacgtccgaactttcctgcaggctcgcggcaatgtgaaccagggaataagggcgacgatcctgaacgaaccagggatgttctttgcctacaacaacgggataacagccacagcacagagcgtcgaaacagggatgacggattccggtctggcaatcacgagggttgtcgacctccagatcgtgaatggtggccaggccactgcatcgctgttccacacacgcaagcgcgacaaggccgatctttcccagatattcgttcagttgaagctgtccgtcatcgacaatctaaagagcgaaacggtcgttccaaagatatcggaatatgcgaacacccagaatagggtgaatgccgccgatttcttctcgaaccacccgttccatgtgcggatggaaggattttcccgtcggatctgggcaccggcgcagaagggagccccgcgcgagacgcgctggttctacgagcgcgcgcgcggccagtatgccgatgcgcactcgaagctcactcctgcggagcagcgtcgcttcaaggcggagcatcccaagccacaaatgttcaccaagacggatcttgcgaagttcgagaatgtctgggatgaccaccccaggtgggttaatcttggttcccagaagaactttgcacgctatgccgcccgcatcggcagtgagtgggagaaatcatccgatgcgttcaacgagttctatttcaagagggctgtcgcacgtggcctgatcttccgcgcaacggagcgcatcgtttctgcacagccttggtacaacggcgggtaccgagcaaacatcgtcgcttacacgctggcagtactcggtgatatcacaaggcgtaggaaggagtgcatcgactttgtcggcacttggaatgcacagaaggtcgacccagtgctcgaaagtgccatcgctgtcgtgtcggcgggcgtgaacgacgacatcatcaggccaccgcaaggaatttccaacatttccgagtggtgcaaaagggaggcgtgctggactaggatacaggcccgtaccgacgccattgccaatcttctcccacccgagttctacgatcgacttgtcccgcaggacgatcaggcagcgatcgtgaagactgcgaaggagacgcagaggatcgacaacggtatcgaagcgcagcgaaaggtgctgacgattcccggcacggagtgggctcgcatctatcagtcactacttgagagggatctgctcacgccgaaggaagacggagtgctcaaggttgctatgcagattccctccaggcttccgactgaaaggcagagcgtggtgttgctagatattctcgagaaaggggttctggaaggcgtggttgtaaatgcggcacttagatcgtgcgacgcagatcgagcaccgtga

SEQ ID NO: 503142 - DNA, 873 bp, Stenotrophomonas maltophilia
atgcatcacgatcagcttttacagatagaacgagataggtcttcaaaagccttggagcttatgcgggaactacttcagcttaccaagccgattgcggtgcacccgagatggtctcacgaagagcggtctcttcttgcaatgctgctaacttcctctgcccgctctaccgaaagcgtcttcctgctctgctcttacgggcaattgtgggatgccgagatggtccttcgtgcagtggcggaggctacactgaagactgcatatatactgcagagtgaagatgaattcaaagcgagggttgctgaatactccaccgaccatttcaacatttctttactcaaggacgactcaaaactgagaagtacccttgcggcactgtctgaaccggattcacgcgagtggcttcctcttagggagaggcttcttagcgaagaagaattggatgagcttggccggctttacgacaagactaagcgtcgctcgatcgaatcgcgctggggagttggtggacttttgaactcactccgcaaagacgccccgcatcgagtccctagatatgatgccctgcttcacaattactctttgtcaagccatatccagcatgccgattacattggaatctctctcccatacgacagagagtcccgagacgaggagaggcgagatgctctagaactagcgcacctctcacgcctaatttcggactgcttctctcttatgtgcttacggatcgtgtctggctaccgattcttagatctggatctcaagcccatcttggatggacagaagcgagtcgacgaaatggaaaatggctttggaaatgcatttggagaatggatgaaagttgaatacggcgaagatgaaagttcagaatag

SEQ ID NO: 503143 - DNA, 633 bp, Stenotrophomonas maltophilia
atgggaactgaaaatacaccagtggaaggtgagttctatctcctccggccggacgtgcgcgggggcgggcgcggccacggagtggtgctggagaacgaaaatgagttgccacttccggagcatctaagcgaaccaccatcggcgggcggaattggctccatgaatgaaatccctcgattgcggtatgacagccggattggcgaaatgccggacgatttgcaggcgggcttcaagggctactggctggtgtcggaagcactgaaatctgccatgcagaccatggatgcagacggcttctctttcatgaaatgtgagttccggctcgaagacggctcagaggcggccccgcactacttgtgcgaagtggtcagagtgctggatgcgattgacgaggatgcgtcatcggtgaagatccttacggacgactatccgaatgggaagtactacagcatcggcggcggggccaagtttgcattccgcaagagtgcgattggtacggcacatgttttcagaacgccttatacgtcgaatgctttctgtgatcgggccatgagggacttcctgatagagagcgggttcggccggtatcctaatgcgcgcggggttcgtctgaccgacgcttctgacatttga

SEQ ID NO: 503144 - DNA, 3417 bp, Stenotrophomonas maltophilia
atgtcaactgccaagacaattctccagagccatcacatcctggagcaggcgctgttcaccagcagtcctttgctgaagaaactggatgaattcgacctgctgggcaaggatgcatcggccaatcggctgtatttgccggtgaagggtgacctcgccgatgatctggatacctcaccccacagggggcggacgcgtagctcctacacggatggagtgatggactacctcgaaagtctgagcgagactcgagacggccgcgctgccctagtgaacgacgttgaggcacttcaaagagtatcggcgagggttgagcgctttcgagacacactgaaagtggcactgataaacggcgatgcgtttgcaactacgccagacggaatgaccgatgcggaagcaaacgctgtcaataggaagctgtactcccacttcgctcagtacgatgtagatcatgcaggtcagatcaattcgttgaaacttatgggcggtgtcgagtccgagtgggcggcagtcacccgttctgattcgagggtttcgcgagttattgatgaaatctacggggcgccgggtaacttggtgcgcggatcaagcaaggtggatatgtcagctcgtgaagtcgcgggcagaatggaaatgcgcctagccatatctgacgcggtgagggctggtcgcttgaccatgtctgagtcaacgactgctcaggtacgtagggcgctgctggatgatctgcccgagatcgatggcgcggcacggggcttctacgatctgacatcgggaccgctcgggaactacaagcccgtctcgcagcgcggctttgtctctatggaggcgctcctcggcgaagcctccaccagccaactgatccgctccggcggcctgctcgcctctggcgcggacgctgtcatcaccgcccgccgcacctcccagctgctggaagaaggcaacggcaccgccgctcagtccgagctcacccacgctctggcgcgcaacggcggtggctggatcggtggcatggccaccgcatcggtgattggcacctccagcttcgtccctgcggccatcgtcgcgggcgatgcgctgctgatgagcaaggcgttcgacaagggcgccgatctgctcgacaaccgcgccgtctaccggcagaccgacaaggccgatgtcacatggcagttcgatggccgcaactggcagcgccaggcggttatggacagcacaggcgacggcctgggcaatccggctgagcgcagtgtgggcgccagttacgagaaggcccgcgagctgggcgcatacgcccatgtaaaagcggtagagctggcgctgggcaaggcgccgccaccgcaggatcctttcagcatcccggcgcgggacggcgagggccgtctggacaatcccaactggcaccgcgatgcgcagaccgaacagtggacgcggcaggtcaagatcggcgtgtccggcgccaacgaccggggtgtgtatgagacgcagaccgccagccccgaacgcgccagcgagttgaaccgcgaggcggtgcagcgcatcgagaacaacatcgccaacggcaaggccgcgattgccgccagctacctggagacccgtgctgctacacgcgcaagtgacttcgtgccgctggtgccggaagcagtggagcaggcccgtgccaagcccgacgccgtccagggctcggacaaccagctctaccagcgcgacgaagcagggcaatggcaccatgctggccagatcgcgcaggggaacatggcgctagagctggaactgacccgcaccatccagcagccgtcgctcgatcagttcaaccagaccatcgccgcattggacgcgcggccattgccgtcggcggcggaagtgaaccagaacgagctgcgccacagctactacgctgcgggcgttgcgctgtcaccggcatgggagcaggcgattgcgctggccacgacgcgcacgcgcgagcagcacggcattacgggtcccacgctgcaggaactggggcctgtagccgagggcaacgcgggcgcctctcggcccatcacccattaccaggtaggccaggatggcgtggcacgcgccgtcgcaacgaccagtacgcaggagctgcaggccgcatggaatgaggtgcgcgcgcgtgccaatgagcaggcgccggtgccggaatcacccgagctgcgcattgccgcgctgtcgacgggtgagcaggaggcgtaccggcaggcactgcaggaggccaatcggctgggcgctgcgcaggtggatgcaggacaggctgcccgagcggccgcgcaggtggcacatggcgacaagccatccgagcaggatgggaacgtggaagtgcggcctgaagagccggcaactgcgcaacccatcgcgcctgcgacggttgtggcggcgccgcccgcgaaggcggtcacgccaccgcctacgcccgccccacaggataagcccgagcctcagcggcacgccgagcagcgcgatccgccgcggcgtgaggaggagccccaacctcagccctatccaaacagcgaggcgcccaccgaaaaccgtaccgcctcacagacgccggagcccgctgggccgatgcaggcgcacccggtcgaatccaagcgtgcgacgccacatgccgccgcgcctttggatgcggcgacgcagatgatgcccacgcagcgcacagagcaggcagcggaagcggagaagatggtcccgatgcctgtgcttgctcccactccaaagcaggacatggcagggcaggaggtcgagccggtgccgttcaaggagccgctgcctgctgagccttcgcgcgatccatggcctttggagcaggaagcgccacaacacgtgccagagcccgaaccggctccgttgggtgaccaccagcccgtcactgcggctgtcactgttcccgccgagcccacgacagcgccaggccctgaaccggccgcgcccgcaccggatgaggcatcgggcccgaaccgggcgctgcaggaccccacgcagcccggccaccccgatcacgcgctgtatcagcagatccgcgagggcgtggaagcgctggacgccaagcacggccgcagcttcgatgaagtcagcgaacgcatgacggccagccttctggtactggccaaggacaacgacctggaacgggtggaccatgtgctggtgagcaacgctacgagtgaacatccggccgggcacacgctgttcgtggtgcagggcgaaccgagcaatccggcgcatcagcgcgctgcgatgccgaccgagctggcggcgcagacatcggtggaggaatcactgcagcagttcgactctgtcagccgcgaagcgcatcagcgtgcgcttgccaatcagatggaccagcagctggaggaccagcgcgtacaacatgagatccagattcgtgcggccagcggaggatga

SEQ ID NO: 503145 - DNA, 222 bp, Stenotrophomonas maltophilia
atggcagccgcccaccggagctgccgcgaacgcagcaccccatggctgagacctgagccgctcactcctccgcactgcgtcaaggcaggcggaggagcccaggctgggccgaacgttttgatgcttcgggcctattttggcctgcgtgagtacgccaccaacagttccggtcgatacggctgcaatgtcggcagcggtgcaagcagccgcacgctgagctga

SEQ ID NO: 503146 - DNA, 2046 bp, Stenotrophomonas maltophilia
atgtcatccactgctgtacgcgcggtgttcgcgcacatgctcggcctggccctgatcgggtgggccacgctggcacaggccgcgccacaggtggccagcgtcgaatcgccgggcaaggtactgaaggtcagtctgctgctggatggcggcaccgcccgctaccgtgtcgagcgcctgggcgacaccgtggtggaggattcgaagctcggctttgccctgcgcgacggccgcctggaccgcgatttcgccctgctgggccagcagcggcgcagcgtcgatgacacctgggaacagccatggggcgaacgccggctcacccgcaaccacttcaacgagctgaccgtacagctcgccgaaaccaccggcagcaagcggcggctggatgtggtgttccgcgtctacgatgatggccttggcttccgctatgtgttccccgaacaaccgaacctgcgcgaggccatcatcgatgacgaactgaccgagttcgccatcgcgcccgaatcaaccgcctggtggattcccgccggcgagccgatccactacgaatacctgtaccagcgcacgccgctgcgcgaagtgccgctggtgcatacgccgatgaccctgcgcagccgcgacggcctgcacgtggcgatccacgaagcggcgctggtggactatgccggcatgtggctgcgccggaccgagggacaacgcctgcgcgcgcagctttcgccctcggccgaaggctggaaggtacgccgcaccctgcccttcgccacgccctggcgcacgctgcagatcgccgaccgcgccggtggcctggtcgaatcggacctgatcctcaatctcaacgaacccaatgcgctgggtgatgtgagctgggtgaagccggccaagtacctcggcgtgtggtggtcgatgcacctggacaacgagagctgggcgaccgggccgaaacacgcggccaccaccgccaagacgaagaaggtgatcgacttcgcggccgcgcacggcttccgcggtgtgctggtggaaggctggaacccgggctgggatggcatgtgggtgggcaatggctacgacttcgatttcacccgcgccacgcctgatttcgacattgaagcgctgtcggcgtatggcctgaagaagggcgtgcacctgatcggccaccatgaaaccggctgcgccatcgagcactacgaggaccagctgggtgccgcgctggacctgtatgcacggctgggcgtggaccagttcaagaccggctatgtgtgcgacgacggccaggtcgatcgtcgcaatccggcagggggaccgctgtggcgcgagtggcacgacgggcagttcatggcacgccaccatctgaaggtggtgcaggaggccgcgcgccggcacctgtcggtgaacccgcatgaaccgatcaaggacaccggcctgcgccgcacctacccgaactggatctcgcgcgaaggcgcgcgcggcatggagtacaacgcctggggccagccgccgaacccgcccgagcacgaggtcaacctggtgttcacccgcatgctggccgggccgatggactacacccccggcatcctcagcctgaagggccgccacggccaggccatccccagcaccctggcgcggcagctggcgttgtacgtggtgctgtacagcccgatccagatggccgccgacctgcccgaacactacctgcagcaccgcgaggcgttccgtttcatcgaggacgtggcggtggactgggagcagagccgcgtgctcgatggcgaagtgggcgactacgtgacgatcgtgcgccgcgaccgcaacagccgcgactggttcctcggcagcatcacggatgaacacggccgcgtgctgccggtctcgctggccttcctggagccgggcgtgcgctatcgcgccgagatctaccgcgatggcgagggcgcggatttccgcagcaacccattcgcattcacccgcgaaacccgcgaggtgaccagcgccgacctgctgacggtggtactggcaccgggtggcgggcaggccattcgcttcacaccgctttga

SEQ ID NO: 503147 - DNA, 693 bp, Stenotrophomonas maltophilia
atgaggcgcgccgcgccggtcgccctggcccttcggatagtgtcgtttcacttcctccgctcggttccgatgctgccaaacgctcaggcttcgcctgtatcggtgggcaggcattccgcaagcttcccaatggctggtcgcaggtctcgtcgcctgctggtggctggcagcgctgccgggagcaatgattcggggtgtaggggcagcgcccctacgaaagcgcctcacacgcgctggcgaggcctcggccccggtactggcaggactgccgccaccggatcggcgtcagggccagccatcaccttggacaaccgtcgttggcgccgtgccatcaatgtggccacgtcgatcactccggcggaatccattgtgcttgaaggcttttcggcgggcgccgatcgcagctgcgccatcatccgtcgccattcctgcgcttggcaggcggtgagcgacagccaggccagatcttgcggctccagttcgcggccttcgggcgtgatcaggcgatcaccgaggaaagaaaaaccggcccaagggccggtcaagtcgatacggtggtgcgggtcgaactcaatcatgccgcgatctcatccttggccggggttccagggcgcaggcaagagccgagccagaggcccagccattgccaggcggagccgacgaaggaggaccagcgctgaccgaagcgcctga

SEQ ID NO: 503148 - DNA, 630 bp, Stenotrophomonas maltophilia
atgaccagcggcgggcgcgaattgttgaagtggcttgccctgatgctgatgaccggcgatcacgtgttgacagtattcgggcttggttacgtgccggtggtgtcagagcttggccgggttgcgttccccgtgttcgccctggtcatggcctacaatctcgcgcaggacggcgccgatgctgggaagtcagcacggcgcctggcggcttggggcctggtcgccactcccgcggctacgctggcattcggccaggtgctgccgcttaacgtactgcttacctttgccgccgcggctggctgcatatgggccttggaccgtcgtcagtgggcattggtcgccctactggcaatcgtcgttcccgtcgccctggattacgcctggccgggcgtgtggcttgttctggctgcctggtattggtatcgggggcagggtggccgcccttggctgatgtgggcttgcatgggcctggtgtgcgcttacaacggcaatgcctgggcgctgctggcgctgccggcgttgcgcctggctcacttcgactggtctatcccgaggtccggacgggccttctatgcctactacgtgggccacctggcacttttggtcgtgcttgccgctatagtcgcagcatga

SEQ ID NO: 503149 - DNA, 1197 bp, Stenotrophomonas maltophilia
atgatctattggtataccggccaacctggtcacggtaagacgctgcacggcattgaccggctattggagttcaaggatcagggcagggcggtgtatgcctgcaacatccgcgagttcgactatgccaaggcgggtgttttggagatgacgccagagcagttccgcgactggccgaactttctccctgatggtgcagtcgccctggtcgatgaggcgtacgagcacaacatgctgccgaagcgaccgccaggctctaaggtgccgaatcacgtcgaacagcttgcgaaacaccgtcatcgtggcttggactttattttcatcagccagtcgcccgacaagcagtgcgatcaatttgtgcacgaccttattgagcggcatgtccacgtgcgccgtcgctttggcacgaagttcgttcatctgcgtgagttcgaccggtttgaagcgcaggccgagaaggcaacgccgctggtggtgaagcgtaaggcgctaccgaagcgcccgatggggctttacaagtccaccgagctggacaccaccgagcgcaagattccctggtattacatcgcgctgccggttgcggtggttggtggccttgggctgatgtactacaccttcggcaacatgggcgagcggttaggaggtggcacggctacgcccccttcgccgagtgcacagagcgcgcatgcaccgcctgacggagcgtcagcgacggcgggcggtgcaggcggagcgagaggcacgaaaacgattcgggagtacgtcgatcaattcatgccgcgtatcccatccgagccgtggagtgcaccggcctacgacagcgctatcaaccttcccagcgaggctccgcgattgttctgcatgtcgtctctgggtgggcccaatgcccaaggcgacattgatgacccaagttgtacatgcgtcaccgaacagggaaccaggtatcagctggccgatgaaccgacgtgccgactgattgcacgtcacgggcaatacgagccattccgtgacgaacgcaatgatcgttacgtcgatggcccctcccagatggagcgcgctcgtggtgacattgcgaatagagggcaaggtggtggtgttgccctggagcatgtggagcgggccgtgggcagcttccctgagtccaagccgcatccgactactacctacatgaccactccacccggaccgaacaagctatga

SEQ ID NO: 503150 - DNA, 318 bp, Stenotrophomonas maltophilia
atgatggtttggacatggattcttaaggcggtcgtgctgctggtcggcacgctgaaggatgcggcagcggggattttcgctcgcatccttgcgacgttcggccttaccacagtgacgttcaatgcggtgttgccgaatctcaaggcgttcgtgctgcagtacatcggcggcatcagtgggccggcgcaagagcttctcggctatctgggcgtcgggactgccatgtcgatgattctttccgccttgacggttcggcttacctggaaggtgttcatcgtgccgaaggcagtggccgatcagctggggtccgggccatga

SEQ ID NO: 503151 - DNA, 1377 bp, Stenotrophomonas maltophilia
atggtcgttcgcagttccttgccggctagcatggtcgctctggtgctgggcgtcctgctgttggctgcgccttgcgttgtgcgcgcaatcgagtacccggatcagggggccgcttttgccggttgcagttccactggcgctagcgctggaggcgacaagtcacgtaaggccaccggtaattatcgttgctctcagagtccaggcagatacgcgtgtcaatacgaagttaagccttatgagaacgaggcgccgtacttcatcacctgtggcaactgggttcccgggggtggagagcatgattatcctgctgacaaggggtgcgattcgcgcccatccaaggtaacgccgttctttccacctgctggctcaacgcgctgcatggatggttgcgaggtctcttaccgtgataacggggacgacacgactacgtacagcccgaccggcaagctttgcgacaagaagcctgattgcaccgcaggcggtaaaaacatggtctggaacggaatgctcggcgtatgtcaacctgttgagcctgagtgcccagaagggaaggtcaaggtaggcaacacctgtgctaatgagaatccctgtccggatggcatggcactggtcgcgggttcttgcaagaagaaggatgaggaatgcccgtccggcatgatccgcagtccttcgggtcagtgcatccctggtgatggttcgtgtgcagcgggagaggttcgcgggcctgatggcacttgtaagcgtgacaaggataacgacggggaacccgatcctgccgggccggacgataaggattcgttctcaggtggtgatacgtgttcgtcgcccccgtcatgtagcggctcgcccatcatgtgcggccaggcgcgaattcagtggcgcattgattgcaacacgcggcgcaacaacaacatcagtggtggtcattgctcgcaagcaggtatgcccacctgcactggcgagaaatgcaacgcgatggagtacgccgggctgttgatgcagtggcgatcagcgtgcgcgttggagaagcttgctgcggggaaggcggagacgccgggcaacaacagcgatgccaacggcaatggagtgccggatgtgctggaaggtagcggcgatccggctccgattggcgatagtgcaaccgacgtccagggcgccaagaaatggggtattggggtatcaactggattgctcgatacgagcaacatgttcggcggtggatcgtgcccaacaccgccaacgttcaagctgatgggtcagacaatcagtggcgctgacttcccgtacttctgccaagcggcggcgattctgcgcgggctcattcagatatttgccgcgttcgttgcattgaaaatcctgatgggttgggggttctga

SEQ ID NO: 503152 - DNA, 240 bp, Stenotrophomonas maltophilia
atggaactgaagaacaacctgcgccgcttcggcgcttccgtcccggccaaggtcagtgccggtatcgccacgctgatggcatccggtgccgccctggcatcgggtggttcgggttcgccgggcgccgccattgcgggcgagctgtcgggtggtaaggccgatgtgatgctggtggttgccgctgcggcggtgatcctgggcgcgatcatcctgtggggctacgtcaagaaggcccgctaa

SEQ ID NO: 503153 - DNA, 183 bp, Stenotrophomonas maltophilia
atgaacacggcagctccaacttttattgaatttctggatgtgatgcgcgatgacactggcctacttgctgtcgccatcctcatcagcgttgttctcctgggcgcgctcctttcgatcctgattgagcatgtctggctcacgcttcggcactggttgcagcggcggaagggcaatgggtcatga

SEQ ID NO: 503154 - DNA, 240 bp, Stenotrophomonas maltophilia
atggacgcacttgtttcagccgtgctgctgggttgcatcgcagccgtctcgctggggttagccaaactcgtttcgtggagtgttgaccggcgtgtggattccgccggtcgcgctacacgcgaaagccaatacgttgcgcagtcggtcgctcatctgcgtcgcctggaaatcgaggccacgaagcgcggcaatctgctagccgctgccgagctcgccgacgaacaggagcgagtcgcatga

SEQ ID NO: 503155 - DNA, 177 bp, Stenotrophomonas maltophilia
atgaatttcctggaaacgttgtccaccttccaacagatgactctgttcgccgcaatcatcattgtgtgggcggtagcgatgaccgtgggcgctgtcattgttgcgcatcgacagaacttacgatttcaggggcgcaaacgtcagaaacgccggttctctaatgggcgcaattattga

SEQ ID NO: 503156 - DNA, 672 bp, Stenotrophomonas maltophilia
atggacatcttgaactcactgacactgttccagcaaatgtcgatagttgcattcatttttcttgccattatcgcgtctacgacagcgaccacgctttggatcgcgtaccgtcacaataggaaatttgacgagatagcgaggcgtcgccgggctctgcggacaactccaagtagcgttcgtcgggtgtgggatccttccggtctgcgggccacttggcaactagaccatgccaagcaattgccggaggaaacacctgcatctgctgcagcccgggctgccctgtcagcgagttggctggatgccaccgcgtttgcggatctgctgagattgcatgaccgcaatggtcaggcactttcccggctgatggcatctggcagagttatcggagtctggctcccagagaagggagcgtttttctatccagcatggcagttgacgccttctaatgagccagcaccagtgcttactgaactgctttcgcttcttcgcggtccatatggagtggcagaaggcgggcggacatcgggctgggaagaggtcgagtggttgatggcaccagattcactactgggcggtcgttcgccatcgacgatgctggccaccagcccagaccttgttcttgacgtcgccagacagcacttctcgtcttggagtgctagcgcacgttggtaa

SEQ ID NO: 503157 - DNA, 414 bp, Stenotrophomonas maltophilia
atggggcagtggaagagcccgactcactcccagatcagggcgaatgacaaacagctctttgcgaaggggtcatggggcggcacattccacccgtactttggtccgcaagaaggtgatctggtcgtcagcgagcatttctaccagagcgggttcgcaaacactgatctggcgatgcaactcaatcagcgaggtttgagcaacatcatcctgatcgggatgattgccaatacgtgtattgaaaccacaggcaagtacggtgcggagcaggggttcaatgtcaccctggtctccgatgcaatggcagcgtactcgctggaagcgcaacacaacgcgatcgcggtcaatggcccgacctatgctcatgcgatctactcgaccgaagagatcctggcaaggatcccgcagaaacgctag

SEQ ID NO: 503158 - DNA, 471 bp, Stenotrophomonas maltophilia
atgatgctgttggccatcaccttgcatgatgcggatcacatccgccaagctgcaaactggtgctacacgattaccgcgacgttgtggatcatcaacatcgcggtctatcttccaagcctggctgcattggcgctaagtctccgccatcaccgcttcgcgcccctcgcgacttcaaccagtgcactgctgatcgccttcctgtttgcgaaggtgcacctctggaagccgacattcaacgcctggggcatctggaacaagaccttctttgcgcttggggcggactggatctcctggtccgtgctgacgctgttggtccttgttggcgtgggtgtggcgatgacgggcatgggcaatggggctgagcagtgcggagcgccggactcactgaagtggcggcgctgcgctggatccaatgcagccatcggtcccgcaggatttagccatcttgcccgcaatggcgttccaaggtga

SEQ ID NO: 503159 - DNA, 321 bp, Stenotrophomonas maltophilia
gtgatctatcagccggccgccgaatttcacgacctccctgccagccacgcctggcgacacatgacctatgagccggaccgtgatccgccgatcgattttacctgggagcgcgaatggcgcctgcagacggagcagctgcacttcgatcagtcgtgcgcaggggtagtggtgccggaccgggcgtgggcggcgcgcatgcgggccgagcacgaggtcgagcaggactggcgcgttcttgcgtacagccagatcatggacgcgccgttggccgagcagctccgcgatgactaccgctggacgctgacctcgttgcgtcgttaa

SEQ ID NO: 503160 - DNA, 537 bp, Stenotrophomonas maltophilia
atggttgaaaacgtcgtcaatcgcgacttttcgcccgctgcaccaaacaaggtgtgggtcactgacataacatacatccgcacctacgagggctggactttcctggcagtgatcgtcgacctttactcacggcaagtggttggctgggcgatgcagtcccagatgaccaccgaccttgtgctgcaggcactggtatcggcggtgtggaagcgaaagcctgctgcgggcctgatcatccactctgaccaaggcagccagttcacgagcagcgactggctatcgttgctgaagcagaatggcatggttccaagcatgagtcggcgtggaaactgccatgacaatgcggtggctgagagcttcttcagtgcactgaagaaggagcggatcaagcgacggatctacccgacccgggacgaggcgcgctcggatgtattcaattacatcgagatgttttacaacccaatccgacgccacggttccgctggcaacctggcccctgtagagtttgaacggcgctacgcgcaaggcggctcatga

SEQ ID NO: 503161 - DNA, 408 bp, Stenotrophomonas maltophilia
atggtgaacgatccgcaaacactgaccatcggggctttcgccaaggccgctggggtcaacgtggagaccatccggttctatcagcgcaaggggttattgccagaaccaggtcggcccgtcggcagtattcgccgctacggatcggcggacgtggcgcgggtgcgtttcgtgaaatccgcccagcggctggggttcaacctggacgaagtcggccaactcctacagcttgaggacggcactcactgcagcgaagccgccgagctggctgcgctccagctcaccgacgtgcgcaccaagatggcgaacctgacgcgaatcgaagcggtgctgtcacggttggtcaacgagtgccatgcgcagcgaggcactgtgtcgtgcccgctgatcgattctctgcacgggagctag

SEQ ID NO: 503162 - DNA, 351 bp, Stenotrophomonas maltophilia
atggcagaccccagcaacggccgcggtgcactggccgccggtggcctcgccgccatcctcgcctcgacctgctgcctcggtccgctggtgctgatcacgctgggtttctccggcgcctggatcggcaacttgaccgcgctggaaccgtaccggccgatcttcattggcgtggcgctcgtggcgctgttcttcgcgtggcgtcgcatcttccggccggctcgcgcctgcgcgccggacgacgcatgcgccgtgccccaggtgcggacggcctacaaggtgatcttctggatcttcaccgccctggtgctgatcgcgctcgtgttcccctacctcatgcccctgttctactga

SEQ ID NO: 503163 - DNA, 279 bp, Stenotrophomonas maltophilia; identical to SEQ ID NO: 330815

SEQ ID NO: 503164 - DNA, 1695 bp, Stenotrophomonas maltophilia
atgaccgaggcgatcacgctgcacatcgatggcatgacctgcgggtcgtgcgccgagcacgtcaagcagaccttggaaaaggtgcccggcgtgcgttcggcctcagtgtcctacccacagcgccgggccgagattgaggccagcgtaggtaccgccgcggacgtgacctcgctggtcgcggcggtatccgcactcggttaccgagcgcagcttgccgatgcgccggggcaacccagcgacctgctgaacaatgcacaagagcggctgggcggcgaaccgaagcgcgaggacgatgaggctgcactgcacgtggccgtgatcggcagcggcggcgcggcgatggcggcggcgttgaaggccgtcgagcaaggggcgcgtgtgacgctgatcgagcgcagcactctcggcggcacctgcgtcaacgtcggatgtgtgccgtccaagatcatgatccgcgctgcccacattgcgcatctgcgtcgcgagagtccgttcgatgacggcattgccgccgcctcgccgaagattctgcgcaagcgcttgctggctcagcagcaggggcgcgtcgatgaactgcgccacgccaagtacgaaggcatcctgacgagcaccccgaccatcaccgtgctgcgcggcgatgcccgattcaaggatgcgcacacgctgaccgtggcaaccgctgacgacgggatgcgcgaggtgagtttcgaccgctgcctcatcgccaccggggccagtccggcgattccaccgatcccgggcttgaaagacacgcccttctggacgtcgaccgaagcgctggccagcgacacgatccccgatcggctggccgtgatcggctcgtcggtggtggccgtcgaactcgcgcaggcctttgcccggctgggcagcaaggtgaccatgctggcgcgcagcacactgttctttcgcgaagaccccgccattggcgaggccatcacggccgtgttccgcgccgaaggcatcgaagtgctggaccacacccaggccagccaggtcgcctatgaggatggggaattcgtgctcaccaccgaacgcggcgaactgcatgccgaccggctgttgttcgccaccggccgcaccccaaacacccgcacgctcaacctcgacgcggccggtgtggtggtcaatgcgcaaggcgccatcaccatcgaccacgcgatgcgcactgccgtgccgcacatctatgccgccggcgactgcactgaccagccgcagttcgtctacgtcgcggcggcggccggcacccgcgctgcaatcaacatgacgggtggcaacgcgacgctggatctgacggcgatgccggcggtggtgttcaccgacccgcaggtcgccaccgtgggctacagcgaagccgaagcgcaccacgacggtatcgagaccgacagccgcacgctgacgctcgacaacgtgccccgggcgctggtcaacttcgacacgcgcggtttcatcaagctggtttcggaggccggttcgggacgactgatcggcgtgcaagcggtagccccggaagcaggcgagctgatccaaaccgcagtactggcgattcgcaaccgcatgacggtgcgagagttggccgaccagttattcccctacctgacgatggtcgaggggctgaaactcgcggcacaaaccttcaccaaggacgtaaagcaactgtcctgttgcgcggggtag

SEQ ID NO: 503165 - DNA, 1341 bp, Stenotrophomonas maltophilia
gtgacggactttctccagctgcgaagcctgaagacgcttgaaatcctgaccagcgaggacagttacgtcgtcaaggccgaaggcgtcaatcagtgggtgacctgcccgctgtgcaagaccggatgcctgcatggtcacggctcacaggaacagtcgtttcaggacacaccgacgcacggcaaacccgtcgtgatcttcatccagcgccgtcgctatcgctgtacaagctgcaccaagaccttgtttgagcctgtggcggaccttgatggaaaacgccaagccacggcgcgtctggtgcgttatatccgcgaccagtccttctccaagacctttgcggcccttgcccgggaagtagccgtggaagaaaagacggtccgccacgtcttcgacgatttcatcgaggaggtcgaggccaagacccagttccggacgccgcgggtgctgggtatcgacgagctcaagatcatcggccagtaccgggccatgatcaccaacgtcgagcgcaagaccgtgttcgatatccgccccagccgggccaaagccgagttgatgccctatttccgcgacctgcgggacaaggactcggtcgagtgggtggcgatggacatgtaccacgtttatcggcaggtggtgcgcgccacgctgccacaggcccggatcgtggtcgatcgattccatatccagcgcatggcgaacgacgcgctggagaagctgcgcaagcgcattcgcaaggatttgtccacccggcagcgcctcaaactcaaggacgagcggttcccgctgctcaagcggcagcacgacctgacagggagagatatggaccggatgcgggaatggttccaacagttcccgctcctaagcgaagcccacgcgctcaaggaaggatttctgtcgatctgggatcagaagacccgcccagcagcagaagccgcctgcgcgaagtggcaggccaatattccgaccgaattggcggccacgttcaaggacctgaccaccgccgtgcacaactggcaagacgaaatcttcgcctacttcgagcagccgattaccaatgcctatactgagtcagtcaaccgagtggccaaagacatgaaccgcatgggcaggggttacagcttcgaggtgcttcgggcgcgcatgctctacgacaagaaggcgcgcaaggatggctcggttatcgaaaccgtgttggtcgatgacgacgacccaatgaccacggacttcgtgttccagcggatgaccacggcggcaacgcgcaagaagaagatcacgcgcgtggtcgagtacggcccctatctcccgacgctggcgcggctactcgaagaggggtatttcgaatag

SEQ ID NO: 503166 - DNA, 312 bp, Stenotrophomonas maltophilia
atggcaagcaaacagtacacggatgagttcaaggccgaggcggtcaagcaggttaccgaaagaggctttgcggtagccgaggttgccaagcggttgggggtctcgtcccacagcctttaccaatggctccgcaagtccaggagcgaggccttggcgggcacgcctgaagggtcgatgttgccgacgccgaaggactcagccgaggtgcggcgcctgaaggccgaggtgaaacgcctgactgaggagcgcgacatcctaaaaaaaggggtatccggaatctggtgtgggttctggctccttgggtctttgtag

SEQ ID NO: 503167 - DNA, 1047 bp, Stenotrophomonas maltophilia
atgaataagttgaatgtcgacgtcgtcgtgatcggggcagggcgggcaggcttggcgatgtcataccggctcaagaacgcaggcgtgtcgcacctgattctcgaacgacaaccggccgctggtggcagttggccgtcgtactacgacagcctgaccctgttctccccggcaggatattcctcgctgcctggcctcgagttccccggcggagccaagcgctatcccaagcgggacgaggtcaccgcgtatctgcgccagtatgcgtccgccttcgacctgccagtgcgcgccaacagcgaggttgtggaggtcatctccgaagcaagccaacatcgcgtcaaacttgccgatggagcggtcattaccgcccaggcagtagtggtggcaaccggtggcttcaacacacctcacctgccggggatccctggaaggcagctataccaagggacgattctgcacagttcggcctaccgaacacccaccggcttcgaaggcaaacgcgtcgtcgtcgtcggtgcggccaactcagcggtacagatcgcgcacgaactgcactccactgccaccgtggtgctggcaacccgcgagccagtgaagttcatgccacaacggttcctcggcttcgattttcatgactggctcaagtggaccggcctgggcaattcccgttggctgagcgatcagagcacgcccgttctggatgatggacgttatcgacacgccctgagtacgggtgccatttcccgtcgagagatgttcactgcgtttaccaacgatggggtggtgtggccgaatgcggaaatacaggcggtcgacgctgtgatcttcgcgacgggcttccggccgaacatgtcattcctgccacgggaagccttggatccggacaggcgggcactacacagccaaggggtttccaccacaatcaaggggctctactacctcgggctaccgctacagcgcaactttgcctctgccacgcttcgcggagttggtagtgactccttgggagtcctagcatcgatcatgagccacttgcggcccatgtaa

SEQ ID NO: 503168 - DNA, 348 bp, Stenotrophomonas maltophilia
atgagcaagggcacccccaaggcaaacgccattgagcaagcagtaagcgtgctggcagaccccatttttcgggcgctggctgagccgtcgcgcttggccgtgctcaagcgtgtgcttcaggtggaacgggcagatatcgcggagattgccgccggccttccacaggagcgatccgtggtctcacgtcatctgcagggactccacgatgctgggatcctacgcgcagagcgggtgagccggcaggtgtactaccaggtcgatggcctcgcgatggtcgcacgcttggagcagatcctgctgcaggtcagggcgctggcaccttactgctgccccggtgatttgaagtaa

SEQ ID NO: 503169 - DNA, 1224 bp, Stenotrophomonas maltophilia
atgcaaagcgcgtccaagcagccgcaaaagctgccccggctgatcgttgcgctaggagtgggccagatcattgcgtgggccagcagctattacctgttggccattctggcgcttcccatgtccagaagcactggctggtcgctggggctgttggtcggaggcctctccgctgggctggtcacagccggactagtcgctcctctggccggtcggaccatcgacaggcggggagggcggaccgtactggcggtcagctccgtagtgtttgccatgggcctcgcggcgctggccacgtcacactccccaactacctattaccttggctgggtggtactgggcgttgccatgtctgcgggcctgtatgacgctgcgttcacgacactgggacagctgctcggggcaaacgcgaagcaatccattgccggcctgaccttggtggccggctttgcaagcacgctcggctggccagcgctgacctaccttgacgaggccatgggatggcgcggcgcgttgtgggtggctgccgcattcaacctgctggtcgcattgcccatccatttgctcgctattccgaagcatcagccccgtattagcgcaagtccgcatccctcagcggtcgctgccgtccacaccagcactgcagcacccgtttcagctgcagcaccgcctgcacactggcttgtgctcattggcctgttgctgacctgccaggcagcgatcatggcgaccttatcggtgcatctgattgcgctgctcggtgccatcgggctggcgccatcggttgcgctgctcgctggcatggtgatcggccccgcgcaggtcatcgctcgtttgctggatatgtacttcgggcgaggcgtgcatccgacctggtccgcacgcgtgggaattgcagcgacattggcagcgctactgctgctactcactggatactcgtgggcagcgatcattgcattcgtcatctacggtgccggcaacgggatactcacggtggcccgcggcaccctcccgttggcgttgatcggatcggcggactacggcaagaccatgggccaacttgcccgtcccatgctactggcacaggcggcagcaccgccgcttgcagccattgcgctcgagcgaaccgagcctgtttggctgatctgcctattggcgctgcttgccactgtttccttggttggaagctgttggttgcctgcaaagacgcagggcgtgagcccttga

SEQ ID NO: 503170 - DNA, 741 bp, Stenotrophomonas maltophilia
atgcaacaccttcccaatgtcgtcccgggcgccttgaaccctccggtggccgaaaagctgagcgagcccaatgccgcgccgcaccggccccgcatcctgatcttgtacggttccctgcgcccgcagtcgttcagccgcaagctggctttggaggcgcagcggttgctggaacatctgggcgcagagacccgagtgtttgatccgcatgagctgccgatgctcgattcggtgcccgcctcccaccccaaggtgcaggagctgcgccaagcctcgttgtggtccgaggggcacgtgtgggtcagcccggagcggcatgggacgctgactgccgtgttcaagaaccagattgactggctaccgctggaagagggcagcgtacgcccgacccaaggtcgcacgctggcagtgatgcaggtctgcggtggctcccagtccttcaacgtggtcaacgcgttgcgcgttctcggccgctggatgcggatggtcacgattccgaaccagtcctcggtggccaaggcctggcaggagttcgatgacgaggggcgcatgaagccttccgcctactacgatcgcgtcgtggatgtgatggaagagctggtcaagttcaccctcctggtgcgtggacgcagtgactacctggttgatcgctacagcgaacgaaagggggctgtcgaagcggccgcgctgactgccgcggccggtgtcgtcgagaccgcattgaatgaaaaggagaacgcatga

SEQ ID NO: 503171 - DNA, 315 bp, Stenotrophomonas maltophilia
atggaacataaaaacgcaactcacgccctggccgccctgggtcacgccacccggctttccatcttccgcctgctggtccaagccggaagtggcggcaagctggccggcgatatcgcccagtccctctcccttcccggtgccaccctctccttccatctgaaggagttgctggccgctggcctgatcaccgccgagcagcgcggtcgcaccatctgctaccgcgccgagttcgaggcgatgagctcgctggttgcctacctgaccgaaaactgctgcgccgacgaacaggcctgcgaacgtcctgctggctgctga

SEQ ID NO: 503172 - DNA, 492 bp, Stenotrophomonas maltophilia
atgacccgtcgtgttctgttcttgtgtactggcaactccgcccgcagcgtgcttgccgaatcgacccttaaaaaatggggcgaaggccgctatctctccttcagtgcgggcagccagccggccggtcgcgtcaatccctttgccattgcccagctggagcgcgaaggcttccccgtcgagggcatgcgcagcaagttctgggacgaatttgccgaagccgatgccgctgccatggatctgatcgtcaccgtgtgtgacagcgcggccgccgaggcgtgcccggtggtgtttggtgacttcgttcgcgtgcattggggcctgttcgacccggccggcgtggaaggttcggatgcgcagaaggcagaagcctttgaccgtgcccatcagaccatcaagcgacgcctgcaggccttcctggagattcctgacagcgcctgggacgaccgcgcagcgctgaaggctcgcctcgacccgatcgcgcagatcgactaa

SEQ ID NO: 503173 - DNA, 1074 bp, Stenotrophomonas maltophilia
atggacagcatcgatgtggtggtaatcggaggtggccaatcgggtctttctgccggctatttcctgcgccgcagcgggctgtcctatgtaattctcgatgcggaagcgtcgcccggcggcgcatggcagcatgcctggcactcgctgcatctgttttccccggcgggctggagctccattcccggatggcccatgcccgccagccaaggcccctaccctgcgcgtgccgaagtgctcgcttatctggcgcagtacgaacaaaaatatgcgctgcccgttcttcgccctatccgcgtgcaacgagtcagccactttggcgagcatctgcgggtggtggccagggacggtcggcaatggttggcgcgggcggtgatcagcgccaccggaacatggggggaagcctacacgcctgagtaccaagggttggagtcatttgcggggatccagctgcactccgctcactacagcacccctgcgccgttcgccggaatgcgggtggccatcatcggtggtggcaattccggtgcgcagattctggccgaagtatcgacggtggcggaaaccacctggatcacacagcacgaaccggcgttcctggccgatgacgtcgacggccgcgtgctgttcgaacgcgcgactgagcgatggaaggcgcagcaggaaggccgggagcctgacctgccaccaggcggtttcggcgacatcgtcatggtgccgccggtgctcgacgcgcgggcgcgcggggtgctcgccgcagtcccaccgccggcccgcttctcccccaccggcatgcaatgggccgacggcaccgagcgggcgttcgatgcagtgatctggtgcaccggcttccgcccggcgttgtcgcacctgaagggcctggaccttgtaaccccgcagggccaggtggaggtcgacggcagcggcctgcgcgcgttggcggtgccctcggtttggttattgggatacggggattggaacggcatggcctctgccacgctgattggggtcacgcgttacgcccgcgaggcggtgaggcaggtcactgcctattgcgcagaccaccaggacaggtag

SEQ ID NO: 503174 - DNA, 507 bp, Stenotrophomonas maltophilia
atggcccagccccaacgcgtcttggattttgattacttcgaacggcgctcactcagcgcatcgatgtcgatcgaccatgcgctggatgcactgtcggcactgagcaacggcgcacgtcttgtgatcttccgcacgctggtgaaccacgagccggaaggactgaccgccggtgtcctgaccgacatgatgggaatgcggcacaacaccttgtccaaccatctggccgtgctgagccgaggcggattgatctgcggcacccgcgaaggccgcttcgtgcgctatcgcgcctgcctggacggcatgcatggtttgctggccttcctgctggacgattgctgcggcggtcgttccgagctctgtctgcagcctcatcccaccgatcccgcctgcgattgcgtggcggaggtccctgccccaccgcggccgctcccacgcccaggtggtcgtcgatctgggcagtggcgtggtcaaggtcgagggcctgcttgccgtagaacaggcggttga

SEQ ID NO: 503175 - DNA, 339 bp, Stenotrophomonas maltophilia
gtgcgtgatcggaacctcaccggcccttgggccggtttttcgtttaaggctggccgactggtcacccccgaaggccgtgagctggaaccgcaggatctggcctggctgtcgctcaccgctgcacaggcacaggaatggcgccggatgatggagagcggccgcgcgatcggcaagccccggaaacccttgtccttcaacgccgccagcgttgtgaacctatccgatgccttggcgcagcgccggaaaaagcggtcatcagtggcgatggctggccccgacgccgagcctcccgcagcagtcctgccagtaccggggccgaaacgccgccagcgcgtgtga

SEQ ID NO: 503176 - DNA, 1425 bp, Stenotrophomonas maltophilia
atgcgcattggtcgcgtcttctgctggttgcacagcgggatggcggtgtgtttttcccgtcgatttcagttgctgctggcacttactgcggtcgcgctcgttgtcgcgccgtctgcgcacgccaagagctacccgtcacaggggctggcttccgcaggctgcaatgcggaagcaaacgctgctgcatctggcgacaaggggcgtaaagcgacgggcaatgtccagtgcacccatcagccggggcgttatacgtgcacctatgaagtgaagccgtacgagaattcagcggcattcttcatcacatgcaacaacttctccccatacgagacgtatcacgattacccccctgagaagtcctgcagtgcacagggggagtacacgggccaaggcccatggtcaaacctcggtggctccgcgcgcagtggcagcctgggctgccgcgagggttgcgatggcttctggaataggaacgcagattcctcctcgacctggacaccgacaggcgatgtctgcccggatgatgagaagaagaactgcgagtccccggctaacgcgaacgcgggttattactggaacgtggcactcaacgtctgcgagccgcctaagcccgtatgtgagggtggcaagaatccaaattcacttggtcagtgtgcacctgagccgtgccctgatggcatggcgcagcaggccgatggcacctgcaagaagaaggacaacgagtgtccggcaggccaggtgcgatcgccggatggcaaatgcttgcccggcgacggccaatgcgctagcggtgaagttcgcggaccggacggcacctgcaagaaagacagcgatggcgatggcaaccccgatgagcccggcgagaaggacacgttttccggtggcgatgattgcagctccccgcctgcatgcagcggctcgcccattatgtgcggtcaagcgcgaatccagtggcgcatcgactgcaacacccgtaagaaccgcaacgttaccggtggactttgcggcgcgatgcctgtttgcacgggagagaagtgcgatgcgatggagtacgccagcctgctgatgctgtggcgctcaacctgtgcgctggagaagatggcaagcggcccgagcggtggcggcgatagtgcggatgtgaaggcgattcgtgacgccctgacgggagccggcggttctgtaacgacccccgcagatcgaccggcctccgacgtttggacgcccagcagcgggcagcctacccgtcccaatgcgtccggctacggttggggcagagggtgcccgcagcctccagcgatcgaggtcatgggtcaaaccatcgcgttcgacattacgcctctatgtcggtggctgggccttggcagctacttcgttgtgggcctcgccgcgcttttctgcctccgaatcattgccagtaaggatgcctaa

SEQ ID NO: 503177 - DNA, 1056 bp, Stenotrophomonas maltophilia
atggccgttgatcgcgcgcgcttccgcatggccgtcagcgacggggcagggggcttttccccgctttcgcccggtgaaaaggggcagcgggcggcggcggagattggcccggggagtaacacgggccaaaagggtcagcaggacgcaatcatcgactacctgaccattgtggtcccgctctccgcccttgaggaagtgaactgcaagaagctggacctcttgctgttccgcatcttcggcttccgtggcgaagttgtcgccggcgcgatccgtgagaagagctggaacttctacgagcagtcggcggtgctgatcgatcgggagaacgaggttgttggccgtgtcggcatcgggggcaagaaaagcaccgtgtgcctgagcctgaccggcatgggttgcaagtggattcgtgactgggcccgcgtctacaagcagtgcgccatgctcgatgccaagatcacccgccttgactgcgcgcacgacgactacgaaggcgaacgcctggacgtgcatgcgctccgcgaggttgccgcgcagggcggctttaccgagggcggttgccctccgcgtcaccgcttcatttccgatgagggccacaacaccggctgcacgctgtatgtcggtggcaaaggccacaaggaattgtgtgtgtacgagaagggtaaggccgagggcctgccgtcctcgcgctgggttcgcgccgaagtgcgcctgtacggcaagcatatggaaatcccactggatgcgctgttgaacccgggtgcctacctgcgcggttcgtacagcgcgttgcaagacctcatcaagggcgtgtgcacccggctgcgcacgatccgcaagcacgtcgaagtttctgccgaggcaatggtgctctggatggagcgtcaggtaggcccggctctcagtgttctgcgcggagcgttcggagattcatggtccgacttctgcgaggcccgcatcgtccgtgacggtcaccccggacgctttcgcggtattgccaagggtgacgcactccatcgttatgtgagggaagaactatgcccatctgtcgcgtaa

SEQ ID NO: 503178 - DNA, 609 bp, Stenotrophomonas maltophilia
atgcataagcccatgcgcgcgctcgtcgcctgcgagtattccggccgtgtccgcgacgccctgcgtagccgcggtgtcgatgccatgtcctgcgatctgctgcccaccgaagtggccgggccgcattaccagggcgacgtgcgtgacgtactgcatgacggctgggatctgctgattgcccacccgccgtgcacccatctggcggtgtccggtgctcgctggttcaagcacaagcagaaggaacaagctgaagcgctggatttcgtccgcatgctgctcaacgcgccgattcagcggattgccctggagcagcccgtttccatcgtggcgagccggattgctcccacgtcgcaggtgattcacccatggcagtttggtcatggtgagcgcaagaccacttgtctgtggctgatcaacctgccgcacttggtgccaacgaacgtcgttgccggccgcgaagagcgtgtgcatcgcatggcgccggggccggaccgttggaaggagcgttcccgcacgttccagggcattgccgatgcaatggccgaccagtggagcaacgtggatcagttgccgctgatgcttcccctgggggtggccaatggccgttga

SEQ ID NO: 503179 - DNA, 282 bp, Stenotrophomonas maltophilia
atgatcgatccgctaattaccttcgtgctgctggcggctattgctgccgtctccatcggtgccgcgcgcatcgtgtcgtggctgttggaccggcgtgatcgtgccgccgtccagcgtgccaaggaagcggccatcgtcgcccaggcacgcgccgaactggccgcaaccggctggaccccgagccacgaggcgctctatcaggccgaaatcgcggccaccaagcgcggtgatcttctggccgctgctcgctactccgagcagcaggaggccgtcaatgcataa

SEQ ID NO: 503180 - DNA, 834 bp, Stenotrophomonas maltophilia
atgttgaaagagtttcctaagccgctcgcgataacagttggtgacgttgtgggctcttactattacagtcatcggcgcctggagaccatgttgtatgaggcgggcgcgtccggggacattccggaaggcaactgcgtcgataaggtgacgaactggctggtcagagaaggcagggatgacgtatctaggtccttctccattctgggcaatctcatcgaagacatcatggatggcgaggtcccgtcttgggagccagagaagaagctcaacgctcgtaagcggatcactgaggcccttgcacgctaccagctgtcttacggtttcggtggccgcattctgggggcgcactcggtcactgctccgagcaaggcgttcggcgaagcgctaaaggagttctctgtctcggaagttgaagaagagttcgagcgcgccgtcaggttcattgaatccgacccagccgcagcggttacggcggcatgtgcgattgttgaggcgttgtgcaagcactacatcgcgacggaaggccttgagctaccttcaaatcagaccgtcaagccgctttgggtagtggtcgccaagcacctcaaactgtcgcctgagcagctggaagatgatgacctcaagcgagttctcgcggggcttagctcgatcattgatggcatcggcgccttccggactcatgcgggtagtgcccacgggcagcacaagcgcacgtataaggtcgctccgcgccatgctcgactagttgtccactccgcgcactcactgtgcttgtttgttgtggagacctggaaggaacgcaagaagagcggtacaagtaggctgaaggcttag

SEQ ID NO: 503181 - DNA, 306 bp, Stenotrophomonas maltophilia
gtgcagctcacaaagatcacaatgcgcactagagtgctgcacggactggctcttcttgtcgtcgggccgtggcttgcatggctgtcgttcggtctgctggttcggttcgagcagtcaccagcatctctaggcacgatcccctttacttgggcctactacctgggaatcacagcgatcccgatgctcttcgggctgattcttatcggcttcgtgcggcccttgttcggctggatcatctacgcgctggggagtgtattcatgctctacggacaggcggcgttgtcttcgacgccaaccgcctactga

SEQ ID NO: 503182 - DNA, 879 bp, Stenotrophomonas maltophilia
atgcaggcgacgaacgatcaaattgccaacgcgatgcgtcggtggttcttgcaacgctactgcgatcccgccatggagaccccgtatagcagcgacatgggggactacttctatgtgaatggaggcccttatgatgctcacgacgagttatacgaccgcttccaggggctagtggaagaaggcctcattgaggcagtcgccgatgatctagtatcggaccaggggttgtactgggcacctacccagctcacctactacaggccagatgaggatgttttcgttgatgatcggaacgagccgaccgtcagattggaaggccgcttaggtgctatcaatgcggtcttaggattaggtggtgatgcgttcgcagaggtgactgcgagaaatttggtgttcgcctcggtcatcagttctctggagacatttctgtgggagacccttgtctactgggtggaccatgatgaaggcgtggtgaggcgattgataactgatcatcctcacttccgaaatgaagacgtgaagctccataccattttggatatcagcgatccaattgggtttgcaagaacgaaaattcgctcccacatgcagacgactgtgtggcatcgctgggacaaggtcacctcgctataccagtttgccttcagaattcgtatccctagcgtggaggggttcaccgaggcaatcaagatccgtcacgacatagttcatagaagcggccagacggtcgagggcgttgagcacgctgtaacagttgaggcgatctccaatctctcggctcaggttctggacttcgcgaacgagatggaccgcaagattgccgatgcgacggcacccacagctgaggaagaagaaccgtctgcggaagaggagttctga

SEQ ID NO: 503183 - DNA, 432 bp, Stenotrophomonas maltophilia
atgcgtaacccagtgctggcgctctgcgcggtggttctcgttgcttcagccgtttccgcttgctcaaccgttccggtcaccgataccacggcaagagcggtccctgcagaccggatctacgaaaacgcctatctatcgccctcgccggagcgcacggcgaccatttacgtcgcccgcgacaagggatttctgggatcgggctgcagccacgacatctcgctgaacaacgtgaagatcatcgccctgcggcagtccgaggctgcgaccctttatgtcgctccaggctcatacttcctgaagctgtcgaccggtggtgggctctgcgcgaacatttccacttcgcagaaccttacgctggctgccggtgatcgacagtcctaccgctcgactaccccgtcagacggaaacctccggctcacgcgggagcaatga

SEQ ID NO: 503184 - DNA, 360 bp, Stenotrophomonas maltophilia
atggcgtttccggtgctggtgccggcggcagtggcagccacgggcgtggcgctgaatctgctgccgaagctggcgttccgccgcgccggtaccacggtcaatcctctgcggccgcaggcggccagcgcactggtcacgcacggcgtgtaccggcatacgcgcaatcccatgtacctggggcaggcgctggtcctgctcggcgccatgctctacctgcaggatctgcgcgcgctgttggcggtacccctgtttgtcgtatacatcacacgccttcagatcctgcccgaggaacgcatgttgtcggcgcgcttccccgacgcttatgcagccttctgcaggcgtgtacggcgctggctctag

SEQ ID NO: 503185 - DNA, 5331 bp, Stenotrophomonas maltophilia
atgcagtctggcctcatttctcatccgcgcgccgcaatggctgccaagcatctgcttctgggtgtcgttggcctgtgcgtgctggcaccggtcgccgtttcagcccagatcgttcccacctggcggcaggagtacgacaagcggctgaagtacggggaccttgtcgaaccgctgaagggcgagatcttcggcgagcaggtcaatctctatgacggctcgatcagtttcaaggctacggatatttcgattccgggcaacagtgggctcgcggtatcgctcagccgcagttacggggatgtcagcggcagtgcaaatgacaaggaatatggaaactgggatctcgacattccatcgctttcaggcacctacggagaccagcccgaaaccgcgatcggcgggcattggacgccaagcgcccgttgctcgacagtttccgcacccccgtcgctggatgtctggaattacaagcagacccagaccatcagttttgctccgcacacctattgggagggggtgaggctttcattgccgggcggaggcggtgaaaccgtcctggcgggcagcggggacgcgcgccagccaacgccccaggttggcacgccaaccccctggaacacaaaagggggatggttcttctcccgcctcagtgcgctcaagagcggccagccgggcgagggtttcctagggcacgcgccagacggaaccaagtactacttcgactggatggtggcgcgcgagaacgagtctgccgttctccagccctacgacaccatcacccatgccacgttgaaacggaaaaaggtcttcctctatccatcacaggttgtcgatcgtttcggcaattgggtccggtacgaatggagcggcgggcggctggatcgaatcgttgccaacgatgggcgcagcatcacccttgcctatgactcccaggggcgcatcgcaacggcaaccgcagcaggccgaacctggtcctatggctacaccccggccggtgtgttgcagtcggtgacgctgccggacgggacggcgtggagctacaacctgccgcctgtcaatgtgacgaagaagtaccaggagtacaccgggcaggacgtttgggcctatatggaggtcccggctctttgcgcgaagacgaacaagattgtgcagaccgaggttgcagcctccatcacgcacccatcaggcgcggtaggaaccttcgtgttccgacctttccggcatggccgcaagaatgttccgttcaactgccagacttccggcgacgaccagttgctggccgacggatggaatctcacgcctatctatcgggacgcgatgtcgctggtggcaaagcggataagtggcccggggatgcccacggcggagtggagctatcagtacacgaatctggggtgggagtacgacaggagagtcgaccaggctgggtggccggcaatcccggtggggcaggcagagcccaagataacgattgaaaccctgccggatggcacgatccggacatacgaattcggaaaggaagttggctataacgacggtctgctgctgtcgacgacaaccagctctggtggcgcggtggttcgaaccgagcgcagtaactactacccggacgcgcagcttgccagcgcaccgttcccgcgcgaggcgggtcggaatctcaagtacggggccacggagctgggagagcatctgaaccgcccagtgcagagcacgatcatcaatcaggacggcgtgcagttcacccgtacggtgcaggcctttgatgccttcgtccgcgaagtttccgtcgtcgaagcgaattccgctggacagagtcgcaccagcagtaccagctactacgacaatcccgcgctatgggtgaacggccagacggcgcgcagtgtgctcaacggcatcgagcagtcccgcaccgaattcgatacgaccaaagcgctgccgctgcgcgcctacgcatttggccgcctggcccagcaggtgacctacgcagccgacggcacggttgcatcggtggccgatggccttggaaataccagccatctgtcgggatggaagcgtggtgttccgcagcagctccgcctgccggccacgcccgaagcgcccaatggtgcggtgcgcacggttgtcgtcgacgacaacggttggatcacctcgctgaccgacgaaaccggcgcaaccaccagcttcagctacggcagcatgggcaggctgcgcagccagcagttccctggcggcgacagcgtgaactggaatggcgtaaccatggacctgcagcgactgggtagcgcgcagctgggggttcccgccggtgcatggaagcactcccgcacgcagggcgggcggcgcaccgatacctacctggatgcgatgttccgcccggtgctggtgaccgaaaacgccaacaacgtgctggacagtgccgtggtgacccgctacgacaccagcggcaagaccgtgtttgcctcgtatcccacgcggcagctctccgatatcaatgccgccctggccggcaccacgacgcagtacgacgcgttgggccgccccaccgtggtcagtcaatcgtccgagctgggggcactggttacccgcaccgagtacgtgggcaacctgtcggtgaaagtgaccaacccgcgcggccaggccacgacgacacgtcaccttgcctacgaccagcccagctacgagatgccgctgacgctgcagcacccggaaggcgtggtgaccgagatccagcgagacacgttgggcaagccgctggcgatcacccgccgcagtgcagacggcagccagtcgctgacccgccgctacgtctatgacggctaccagcagctgtgcaagaccatcgaaccggaaaccggtgcgaccgtgcaggactacgacgcggcaggcaacgtgctgtggtcggcggccggcacgggtttgaccagtaccaccgactgcaatcgcaatgaagcgctggccagtggacgtgcggtgaagcgtagttacgacgccgccaaccgcttgtcgaccctgatcttcccggatgggcgtggaaatcagaactggtcctacgcacctgatggtctgcctgccgagatcagtacgcagaacgacccggcccggccgatggtcgtcaaccgctaccagtacaaccgccgccgcctgctcagcggcgaaaccctgcagcatccggatctgggaagcctgagcctggcctatggctacgatgccaacggcacgctggccagcaatacctatccgggtgggcgtgtcgtcagctatgcgccggatgcactgggtcgggcgacgacggtcggcggctatgcaaaggaggccagttacttcgccaacggcgcgctggcccgcttcgtctatggcaacgggatcgtgcacacgttgacccagaatgcccgcgggctgcccgaccgcagccgcgatgccaccgcagcggccgcagtgctggatgacagctacgactacgatgctgggggcaacgtgatggccatttccgatggcctgcccggggcgcccggcaaccgggacatgacctatgacggcctggaccggttgcggacggtcactgcgccgggcttcggcaacgcgctgtatgagtacgacgcgctggacaacctgcgtcgtgccaaggtcggcagtcgcgatcgtacgcactatttcgatccgaccaatcggctggtcaatgtgatcgaaaccggaaccggggcgacagtgaccggtcttggctatgacgtgcagggcaatctttcggtgcgcaatggtcaagctttcgcgtttgactacggcaaccggctgcgcgcggcggggacagcagagagttacgagtacgacgcccacgggcgccgggtgaaggccagcgccagtggcaagggggcgatctattcgttctacgacaacggcggtgtgctgcgattccagcgcaacgaacgtaccggcaaacagaccgaatatctctacctgtcaggcagcctggtgtcccaggtgcatggcgaagccgcacccggcgttcccgcgctgagtgcgccgggctacatcacccaaggcagcgtgaacctgacctggagcccggccggtggtgccaaccgctatgagctgcagcgtgcccttgcgggcacctggagcacggtcttcgatggcgcggcgcaatcgttcaccagcaccggcctggtcacgggaacctatcagttccgggtgcgcggctgccgggcggtgtgcggcggatggagcaatgtcgcatcagtggccgtggcactggcgccatccatcgtgccgaccttgaacgtgcctgccacagctttcaatggcagttacagcgttgcatggcctgcggcatccggtgccgagcgctatgagctggaggaaagcgccaatggtggcgcctgggtccaggtacataacgccatcggtcagtccaaggccttcagtggcaaggcagcgggaggctacaactaccgggttcgcgcatgtaacccggtggggtgcacgggatacagcgccacggctgcggtgacggtggtgtatccgcctgccactgcgccaggtctctctgcgccagcacgcgctgcgccgggcagtatcggcattggctggaacggggtggctggtgccacgggctacaccctgcaggaaagcagcaatggtggcggatgggtcacgctgttcgacggcgacgcaggttcctatgccaccgctgcccgcggcgtgggcaactatggctatcgggttgctgcctgcaatggcgcgggctgcgggccgtggtcggccacggcggcggtagcagtgatcgggccgccgacgatcgagccggtgatcagcgcgccgggcctggtgaacgtgccgcagtacagcctgagctggtcggtgccggccaacagcgagagcttcgtgctggaggagagtgccaacggtggtggctggacggtggtgcataacggcggcgggaacagctttggtgccagccgtggtaagggtagctatgcgtatcgggtaagggcgtgcaatttcgccggatgtagcccctattcaggcattgcgacggttgtggtcgcacttccgcctggcacgcccagcttctaccttgccgaatggttgaccacccgcaaggcaccgtatcaggtgcagtgctcggtaggctggagccaagtggccgatgcgaccgagtaccagcttgagagtggtggcggtggaaagcgcctgtataccgggccgaacgcttatgtgagtgcggacggcaatgcctactgtgctggtgactatcgcgtgcgtgcctgcaatgccggtggttgctcgccgtggtcggccgaccatcccgtcacccgcggcgtactgagctgggactaa

SEQ ID NO: 503186 - DNA, 771 bp, Stenotrophomonas maltophilia
atggacaacaacacgcccctgcccgccggcgacgtgccggccccccgcgatgaccgctcgcgcatcctgcgggcgttcaatgtcagcctggcggccgtgctggtgctggtggccgtgttcgccctgcagggcacgttcgactggcgaccgtgggcggtcgcgccgctggaagccaagggcctgctcggcctgatcggcggcccgatgctgcatgcctcggtcgagcatatcgccgccaacagcatcgcgatcctgatcctcggcaccctcgccggcagcgtgtatccgaaagccaccgtgcgtgccctgcccctgctgtggctgggttcgggcctcggcgcgtggatgctgggcaatccgggcagcgtgcacctgggcgccagtggcgtcacccatggcctgatgttcctgctggccagcctcggcctgctgcgccgcgaccgcgcggcgatcgccaccggcctgatcggcatgctgttctatggcggcatgctgatgaccatcctgccgcatgccgatggcgtgtcctggcagtcgcacatgggcggcgccttcgccggcatcatcgccgcgctgctgttccgcaacgccgacccgttgctgccgcggcagcgttacagctgggaagacgaagaagaagacgtcgagcctttgcccgacgacgagctggagccgccgtcgccgcagcgcgtgccggtgttgtggcagccgcgcgagggccaggaccacgtggtgattccattccgccgcccggatgaaccgcgcggttga

SEQ ID NO: 503187 - DNA, 438 bp, Stenotrophomonas maltophilia
atgccccatctgcaggactatcccgaagacatcgattgcacatggctgggcgtggaccgcaccggtgcggttgccgcgttcgtcactgcgggcaaaggcaagatcccgaccgtgcttctggcagacgccgtcgtggacatcctccagattgagacgatgctgatggaccttcccgtggttggggacgccgtgatgcacgtgactctgccccggcctgacgactatctggccatggcctcgcgcggcatccacgtctacgattggaacggccatggctacacgcgctttgccacccccgccacagccatcccgtactccgcactgcgcgaagaactgcaggtcatggcatgtcttgcggcattcatttccgtggacttctggcaatgcccgtcgctgtcggtcggtgaggtgatcgaggcagctcagtcgcgcagctga

SEQ ID NO: 503188 - DNA, 681 bp, Stenotrophomonas maltophilia
gtgttctacgtcagggggctgaatggacaccatgcggtcagaacttggaaagtggcgatcgccgcatggctgctgctgtcctctgccgctgcggcgcaggacgctgttcatgcctacgacatcccggcgcagccgctggaacaggcggtcgagcgcttcagtgtcatcagcggttggtcggtgatgtacccgggcgaccttgccgccgcgcgcagcagctatccgctgcacgccaacctgccgccgctgccggcactgcgggtgctgctgcaggactccggtatcgaggccgaggtgatcggcgagcagcgtgtggtgctgcgccggggcacgcccttggcgaccggccccgaagttggtgctgaactccctgaggccgagcgtcggcgtcgctacggtggcctgcagcagcgcctgcgtgcggcgttctgtgacgacccggagatcgcgcccggccgctacgccgccacgctgcgcttccgcatcgaccgcgaaggccacgtgcgcgaacccgcgttgctgtccggcagtggcagtgatcgccgcgatgcacgcctgctgcaggcgatgcagggcctgcagctggcgaccggggccgcggccctgccccaaccggtgacgctgcagatccgtccttccggcaccggccacgattgtggcggtcgctcgccccttccatga

SEQ ID NO: 503189 - DNA, 675 bp, Stenotrophomonas maltophilia
atgggccaccagttcgtcatgggccgcaccatcagcgaagccctggcgcacggccaggcgcaccaccggctcgccgacgcgaccgaccaggcgcttgaacgcgctgggcgcgtcggcgcgggtggcgtcgttcatctgcaccagcttgccggtcagcatcaggccccaggtggaggcgttgaccagcaccgagtcgctgccgccgaggtgtttttcccagtcggcatcagccagcttgtcgcggatcagcttgtcggcggtgtcctggtccggaatgcgcagcagcgcctcggccacgcacatcagcagcacgccttcctcgctgcccaggtcgtactggcgcatgaaggcttcgatggcgccctggtccttggcgcgcacgcgcacgcggccgacaaggtcggcggccagcgcctgcacccgggcctgctcctcggcgggcaggcgggcctgcgccagcaggtcgcggacgtggctggcctcgtccttcaaccaagcgtcggtgatggcctggcggaacgggttgggggacgccggcagttccggcgacagcagcgcgcccggacgcggagcgtcgctggcggcaggggaggaggaaggtgcgttcatgccggtccggccaatggaaaacttggcgattttaatcatttttgcgggttccggaagtgcccctag

SEQ ID NO: 503190 - DNA, 201 bp, Stenotrophomonas maltophilia
atgccccgctgggacctgacgcgtgagctgattcatttcacccaaggtgacactccggacgcggcctgcagcaggctgcgcagcatcctaggcgacggctatctacggggcagcgatcaccggatcacagggggctatcgctgcgtctgcttcaccgaggcgcctcgggcggcgttggcggcagggctggtcaaccgctag

SEQ ID NO: 503191 - DNA, 396 bp, Stenotrophomonas maltophilia
atgtattgtgcgcgcaagtaccgcgacgccgtcgacagcggctggcgctgcccctgctgtggtcggaccgcgcagcagctgatccgctggacggagatccgtgggccctcgtggcgcgccaggttcggcgatgcgtatggcatgggattcagcattaccatggcggagcatcattgccatggtgacgggcgctttccggatacgttgatctgtggtgattgcaacagcgccgatggggctgctaaacgaaagttgcgtctccccgagagctggtcgttctcgccgcaagaactggcactgttcgtcaaggtcgcaccctacagcgggcagacctgtatcaactatgagcttgcactgcggatattccagcagcagaccgcaggccgctggctctag

SEQ ID NO: 503192 - DNA, 1911 bp, Stenotrophomonas maltophilia
gtgagtagtgcagagacctcctcggccgccgatcacgccgacccgcctccgggtcctgcgccgccggcggcgcggcggcggtcgctgctgcagatgcccttctgcgccgactggctggccgacggcgcctgggagcagctcatcgccgacgtagactggagcagcgatggatggcgcttggcacagaccctggcggccatcgcgcaccagcaggaatccaccggcgaccgcaccacggcggcgctgctgcggctgcttgcgtgcctggcgtccatgcacctgcaggtgggcggcgatgagctgctgaccccgcgctacatcaccccggagcgctggagcgctggactgcgcgacatggacgccaacgactgcgccgccgtgatggcaatcgcccggaccacccagctgacctggatccgggcgcgctgtgcggaggtggtgttggcctcgcctcatgcccaagggcgcgaacgtcacgcgttggccgcgcttggggctgacgcctacctgcagctggtgcgcgaggctgaggcgacgaccgcggacgtggaaatccacaccgtcacccacctgcgccgggccttggccctgggctggccggcaaagaagaaggatgtcgcgttccagcagcaagtctggcgctccttcatggccctgttccgtcgcactttgcgcggccccttcccgggcatggccgatggttacgtgaccgagctgctcgaccgtccgtccgatcatgcgcgggaagcggccgaactgctggagacgacggcgcgtgcgaccgcgccaaccgaggacattgatagcgagatccaacaccggctgttcagcctggcgcggcggttgtgggagtcggagcgcgaactcgcacgcgctcgcgccgcaggccgacacgctgcggaagcgctcgttgcacgcgccggcaacgtcgcaagtgccgccgtgaaggcggcctggcttgcccaggccatcgccgagctgaggcgctaccacggcgatgccgagcgggtgcagcggctgcaaagcgagctcgctgatgtccggctgcgtatcgccgacgaggtgggcgagatccagctacaggtcgatgtcaggcacattcacgaatgggcgcaagaacacgtggcctcggccgattaccaactggctctgctgaagattgccttcgcggcactggaccatccggaccccgaacgggagcgccagcgcgccatcgcggagaagcgcggggagttcttcggatccttctttggcagcacccacctggatgcggagggagcccccatccgatcccaagggcccttcgacgcaaacgacccagtacatgtggaggcggccgccatcgagcgcttgtgcgacgagcgctaccctcgcgtgctggcgccattgatcgacatcgccctgcggacgctgtccgagcggttcagcagcgcgttcgatgacgtgctttctctcgttcggtacagtccggcgaccccgcacggccacgcctggcagattgcccgcgggctgtacgccggactacagttccgctggattgatgcggcaatcaatctcattccgatggtcgaggccttcgtccgcgccgacctcaagcgccacggcatcgacacgcgggtcgcgaacgagcttgacggggagaacgagcggtcattgaccctgctgctggagttggatgctcagcgcggcattctgcccgccggcatgaacttcgagttgaaagccctgatgacgcatcccgccggtgccaatctgcgcaatcggtatgctcatggcttgatgtcggatagagagctgagcagccctgcggccatggccgtgtggtggctcatgctacggatcgtgctcaggccattttgtgagctagctgagcccaagcaggcaatggacggcgaggcgggcgccacctag

SEQ ID NO: 503193 - DNA, 897 bp, Stenotrophomonas maltophilia
atgaccccggccggcaccgtccagctggacctgccccggatcaccgcgacgctccaacgcggagtccgacgggtcgcggccttcatgtcgttgggcttgaatgccgcccgcagcgccacgccggcgtcactggagctggccccggccgacacccgctaccatttcatccccaccaacttgagccacgaggccgtcgcccacattgccgacgagttccagctgtggatcctgaccaacggggtgcgcgaactgtgtgcgttcctggagcgctacctgcacgatctctacctggccgcggcgctgatcagcctcagtcagggcggccgcctgccgccggacgccccggtgcccacggtccccacggcgttcgaacacacggggattgggcgcaagctggaattgctgcgggagaccttcggtatcgatgccccccatagcgattgcctgtccaccttctgggatgcacgcaactgcctggtccaccggctggggctggtcggccctaaagatctcgttggcggacgtgagcacctgttggtgaaatggattggcctcgatctgtggctgcaccccgtgggcggggagccccagctgatgccgctggatctgggggagggtatcttcctcagggacggcggcgaggtgcaggcgcggaccgtcgagcgtctcctgaccttcgagctggggcaccaggtgggcttcactgcccaccagctatcggagatgctggtcaccgccctggggcaatgcgaggcactgatgcagagcctgcacgcattggccgcatccaaaggcttgctggacaacccaccaccagccacgtccgcgtcatccgactccggcagccccgccccgcgcgccggtaccacgatccatgagggagagcaacgtgagtag

SEQ ID NO: 503194 - DNA, 945 bp, Stenotrophomonas maltophilia
atggcccgcggcctgaccgaactggatgtccataacgccgccgatgacctcgtcgccggcggcgagcgccccacggtggagcgcatccgcgcccacctgggcaccggctcgcccaataccgtgacccgtcacttggacacctggtggtcaagcgtgggaacacgcctgcgccaacgcgcccgcgaggcggcccaacccgacgtgccggccgcggtgctgaccctggcccagcgctgctgggccgccgccctggaaggggcgggggagcatgcccgagcggcgctgagcacggagcaggcggcgctcgaagacgagcgcgatcgcctggcggcggagcgcgcgagccgtgcgcaggagcagcaggacatgcgggtagcgctcgcggccgcgacggcagcgcagaccagcatcgacctgctgcgcacccagctcgccgaggccgccgcgcaggcgcaggagctgcgcgcccagcgcgatggcgcccatgcccgccaggaacggctggaagcgcagctggccgagctgcaccaggagaaggaccaactgcaagtgacccatcagcgcgaacggcaggagtggactgagcacgcccgcagcaccgaagatcgcctcaacgcggaagtcgaccgcctgcggatcaaggcacgccagctgacccagcaggtgcacaagcacacgcaactggcccagcacctccgcgagcgcgagcaagtgcaagagcaggagcgtcggcaggagcagcaggcggccgccgcggcgctcaccgcccagacattgcgcgccgagcagtcggccgcccaactggcaccactgcgggagctggtggctaccctccagcaggcggcacggcgccccgcgacgaccggccgcacgcgcaagcccagggaaaccggcgctgtcgccgccaccgcgcggccggctcgccgcgcgaggccccggccatga

SEQ ID NO: 503195 - DNA, 1080 bp, Stenotrophomonas maltophilia
atgaaagtcgtcacttcattgaccgtcgatcagctccccaccctgcccgacccgtcccggttgtcggctcaggccgccaccgccgctgagcagattttggctgctgcgcgcagcgccaacaccacccgcagctaccgcaccgcgctgcgctactgggccggttggtgccagggtcgttacggccggccgctgcagctgccgctgccggcggcaacggtggtgcaattcatcgtcgaccacgtggcccgcgacaccgctgagggcgtgcgctgggagttgccggccgcactggacaaggcgctggtggcggcccgattgaagagccgccccggaccctggcgattggccaccctcacccatcgcgtctcggtgctgagcaaggtccaccaactgcagcaactggccaatcccatcgacagcgccgaggtgcgtcagctgctggccagcgcccgccgcagcgcgcacaagcgtggcgaacgcccgcagaagaaggcggccattacccggatcgagttgcaggcgctgctggccacctgcggaaacgacctggccggccagcgtgaccgcgccctgctctgctttgcctttgccagcggcggccgccgtcgcagcgaagtcgccgcggcgacgttggcgcacctgcgcccgctgcccgagggcggattcgtctatcggctggatcagggcaagacgctgcaggatggccccaaggtcggcggcagccccgataagccgctcgtgggcgcggccgccgtggcattgcaggcctggctggaggcggccaagctcaccgaaggggcgctgttccgtcgcgtgtgggggacgcgggtgggtccggcactgagtgatcgcgccattgcactgatcatccagcgccgcgctaagcaggccggtctagacggagacttcggcgggcatagcctgcgctcgggcttcgttaccgagggcgccaggcagggcgtggcactgcctgcgctgatggccatgaccgatcatcgctccgttgcgagcgtaaccggctactaccaatcgggtggagcgcaatgcaatccagcggcacgcctgttggacgacgtttaa

SEQ ID NO: 503196 - DNA, 330 bp, Stenotrophomonas maltophilia; identical to SEQ ID NO: 495239

SEQ ID NO: 503197 - DNA, 987 bp, Stenotrophomonas maltophilia
atgtcaagtttgaacgaacgactcgctgcaattgctgtagagctcaacaaaggagtgactgctccgtcagacaccgttcggaccatcctttcctggctcggggctgagcgtcgcggcacttgggtagtaaaacagatcaactccgccctggaggcaaatggtctcgtcaccagtccgagcttcgagtctacgtggctggatggaaccgtcacctttggcctaaaacctagcgtcgcggcaggagagactcagcttgacccgacgtttcgtcttggacgcttggaagcagccaacaaacctgttatctccgttgcaccgaatgatagcctcgccaaagcagttacgcttatgcttacgtatgatttctcgcagctgcccgtgatggttggcgcgcgcgacgttaaagggaccgtgagttggaagacaatcggcgctcggctggcaatggataagagctgccaggaatgccaggagttcatggagactgcccagattgtttcggagaacgtttcgctacttgaagcggtggacgtcatcgcaaagcatgattacgtgcttgtgcagagagttgataagacgatcgccgggttggttactgcaagtgacttcagctcacagttccgtctgatgtcggagccattcctgcttgttggggagatcgagaacggaattcggcaccttcttcatggtcgattcagtgcgggggagcttcaaggagctcgcgcggatggtgacacgacgagagtgattgaacgtccgagtgacctcacatttggcgagtacgttcgtcttcttcaagaagagtccaactggaataagttggaggtcaaaatggatcgacgagagttcgtcagacaactcgaccgggttagaggcatccgaaatgatgtcatgcacttcgacccagatggcttagatccggacgacaaggccttcctcgttgagttcgcgcagtttctaaagcgcgtgcgcgagatctgccgttga

SEQ ID NO: 503198 - DNA, 1488 bp, Stenotrophomonas maltophilia
atgatcagtgtctcagcgctaccgctgttggcctacaaggtcggaccgaacctctttgacctgtcgagcaatttgcatcacgtcagcatacgcgatcagatccatcgcgccgtggcgcttgcggaagcacttgtggcgggcaaccagttccagcctggccaacaggcgctgatcgtcggtgccggggttgctggcgtcgtggcgggcatggtgcttgcgcgccaccgtgtggaggtccaaatcgtcgatgcctcggtagatgcgcctttccggttgcagcgcggtgttgccacgcgatacgtgggtccatacatgtacgaatggccactggcgatacatggctgccaagaaatgcctccgccagtgaatgagacgctgtttccttgggctgctggcaaaccgacggcattgccattcagcaccagcttcccggccaatccagacgatctcgtcaaggattgggagccgatcctcaagcaggccatcgccaattcgggcggccgactcaggctacaggtagggatcaacagcctcgcaaccaatcgagacgtcaagcgttggctccataccgaacggtgtatcgcggaaaagcgacatccaagcaaccgaacgcgtgcggtcaccatttatggcggcactccttggggtggaagccagaagccatacaccccgctgataccacgtttcgtgctactggctgcgggcatgggagcggagaacaacatcgtcactgactgcagcggtaacgtcttgctccagggaaacgacttctgggcgaatgacgacattcgcaaaccttattgtggcctgtcctcgccgccgcgagtggtagtgatcggcggtggcgatggtggcctgcaagatgcgcttcgagtggcgacaattgacgaccatcctctcgccacttgggatcggctcttggccaaggacacgaacaaggtattgcccgaggcgctggctgatatccaagccatggaggcgcagcatgggctcaacgctatctggacggcgacggatcctttccgtaaccaggagctacccatcctcgacgccgcctatcaaaagctggccacatcgctcgcgggagatcagtacgtcaagttggctgtgctttccagcctgcgcaaggacgtgagcagcgtgcacctgtgcatcaaggatgcgtgcttttccaaggcttatgcgctcaaccgcttcctggtgcacctgctcgagcaatgcgcgaagaatgcagtcggtgcgggcgtatccccctttctggaggtaacccggaacgtgacgctcacttccgctaagaataacagtgccacgcagacgctgactttttcgaatcgcatgacattgcatgccgagatcgtgatcgtgcgattcggcccggatcgtagcgctcttccggcacagtggctcgggcttaccaccaaggacacggtaaatcggcaagagctagccgccgtgcccctgcctctgtacctgccaccaagttgttga

SEQ ID NO: 503199 - DNA, 633 bp, Stenotrophomonas maltophilia
atgcgaagtagaatcattgttcgcggcgcctgcattgatggtggcttgagggggacgggtgacgcaggcaggacacgccgcaagtacgtccctgtaggctcgatggcgccatccatggcgccaacggtcctgcctccgtcacccgtccccctcctgatggtttcccgcgcgcgcggaacgagagcggaaattcaaagtcaaaagaagaaagcaaagtcaaaagcggttgccaaccaatgttggcagctaccaaaggcgaggcaccgcgcatgtacgcaccgcgctcgcggtgatgtatccagaggcggagggcatggccgtgcaggaccgttggcgccatggatggcgccatcgagcccccatggatgggtttacggcgtgtcctgcacggccatgccctccgcctcccgacgtatcagattggcgctgcttgaggctttggccttgggcttcaaaatgcgggccggcgggccgcaggcccgccagcgaacacctcaccccgccacgatgtactgctggagctggtccagctcccgccgctgcgcatcgatcaccgacttcaccaggtcgccgatggagatcacccccagcacctgcgcgccctccaccaccggcaggtggcggatgcggtag

SEQ ID NO: 503200 - DNA, 495 bp, Stenotrophomonas maltophilia
atggacgcaatgccccccgtgtcgcccgcccccgcacccgtgccgccgccgctggcgacggtaccggcgttcagcgtccaggatgccgaccacctgcgcatgctggccatcgcgcactacgtggtcggtggcctgatcgtgctgttctcgatgatcttcatcgtccacatcgtgatcggcatcgctgcgttgagcggcgcgctgccgttcgagtccgacgggcagaccgcctcgcagcaggagcagcgtctggtcggctgggtgttcacgctgatgggctgcgccatcgtgttcggcggcataaccctggggacattcgtgatctatgccggccgctgcctggcccgccgtcgccgtcacctgctgtgcctgatcgcggccggtctggcctgcctgttcacgccggtcggcacggtgctgggggtgttcagcctgatcaccctgctgcgcccgcaggtcaaggccgcgttcgacgctccggccacggccgcatga

SEQ ID NO: 503201 - DNA, 255 bp, Stenotrophomonas maltophilia
atggatttcccgtccccgcctgttccggcgaagctccgggaaatgcttaaggactatccggagcacatcgaacagctacagaaggctctcatttcagtcagccatgggcgacagagttacgccccgccctttgagggcgcagtatggttgttggaggactgtctcactagctttgtcgccgaagcgcgagctgaactagcaaccgccgaggcttcaggcaacccgaaggcaattgcacagtctcaaaaaaagtaa

SEQ ID NO: 503202 - DNA, 840 bp, Stenotrophomonas maltophilia
atgaacccgatgacccggctggccgcagcgctggccctgaccctggccgcgaccggcgcgcatgccgccaacgtgctggtggtgctgtccgacgaaaaccacctggacctgaaggacggcaaggtgctgtccaccggcttctatctcaacgagttgatgcagccggtcaagctgttgctggacgcgggccacgcggtgaccttcgccacgccgcagggacgggcgccgacggtggatgcgtcctcggtgacgccggcgtacttcggcaacgatgccgcacaactgacgctgcacaaggagctgctggagaaactggcgctgacctcgccgacggcttcgccggtggtcagcctggcgcgcatcgagcagcagggttacgcgcgtttcgatgcggtctacattcccggtggccacgcgccgatgcaggacctgctgaagagcccggcgctgggcaagttgctggccgacttccaccagcgcagcaagaccacagcgctggtctgccatgggccgatcgcgctgctgtccacgctgccggatgcggcgggtttcgtggcgaagctggaagcgggtgcgatgccggctacgccgaagtggatctacagcggctaccagatgacggtgatcagcaaccaggaagaagagcaggccaagccgatgctgggcggcggtgagatgaagttctacccgcagactgcgttggtgcgagcgggtgcacggttcagcagcaacaccacgccgtggaccgggcatgtggtggtggaccgcgagctgattaccgggcagaacccggcttcggcgctggaggtggggcagcggttggtggagcggttgaagtag

SEQ ID NO: 503203 - DNA, 876 bp, Stenotrophomonas maltophilia
atgatcgagagatggcctgcgcccgcatgtttttgttgcctggccagcaccatcggggttatttgctgggtcgagatctggcgattaccttctcactgtggcctaaccgctacagcagcccactcagccaacccccggcaagccagaaacaaaccatcaacaaccccctcatccaaatgccgctctggctccgctgctacccggcagcggtctgccgcatgcagcacctccagcaccgtcagtagaccaactaacgcccgctccgttctggccaggctcacgcgacgcccgggcgacacatcggtttctggccaagggtgcccatccgctccctcgcagccgcgcatgcgcttgaggattccgatcagtgagttcaggtcgggcaggggagtgtcatcgttgatgggctcaacaacggtgtacgaagagaaagtgtcggattcgttcatggcgtcggcttccgtggctgtgcttaacagcgccaccgcgagaacgggtggcggacggtgcgtggctgcaaaccggacgtcagttgtcagtacccggcgggcccgaagacccccacgcaccgcccgccagaaaggccgacggattacccgccggcaccggttaaggacggtgccgacgggtaagcgtaaacaactaacagttcgggtttgcagacccggccacccgttgtcggtggcacgtcatgttggttacgccgccgctccgaatgccaatagaaattcgcgaaggaatcgcggaatccgagagcgaagaactattgttgcacgcaccattcgtgcaacacgcgacgccatcagacgcattcgcgcagctgctctgtcaattgcgattcaaagtggcgcaatcgtccatgccacaggcgaatag

SEQ ID NO: 503204 - DNA, 867 bp, Stenotrophomonas maltophilia
atggcccgagcaaaaattcccgatcgaaggactgcgaacctcaccgctgagcagatgcggtctggtctgaagaagattgagagacgcattgcagacttggaggcgttcgacgttaacttggttgagcggcgatgggatccagcgattgaagctctggagaagagggtaaatagtactctccaagatgtgctagggcacgacactgttgaatatcaagagtattccattggaacgctggacacgcttccattaattatgggtgggggacccgatcctctttccaaggttcatgcgggataccgtgagggaatcaagagggagctgtttaagcttggggcgcttcgcgatatttttcaggagcgactcgaagactctggcgaggtgtcagtagttgctaaggccgctgttgctgaccgtgaaagtacccggcgtgtcttcgtcgtgcatggtcacgacgacggcctgaaagaaacggttgcacgatacttgtcgaggcttgaattggcgccagtcattcttcatgaggagccaaatcaaggtaggacaataattgagaaatttgagcggcacgctgacgttgattttgctgtggttctattcacacctgatgacgttgggtatccagcaaatagagtggagaaatctcgacctaggccgcgtcaaaacgttgttcttgaattggggttcttcatggggacgctggggcgacagcgcgtctgcgtcctctactcaggagatgttgaacttccttcggactatgcgggagtcctctatcttccattagacgccgctggggcttggcgatttcttcttgcgaaagagatgaaggctagcgggattgatattgatttaaatcgcgcaggttag

SEQ ID NO: 503205 - DNA, 1818 bp, Stenotrophomonas maltophilia
atgattgacgaacttcaagccagcaaatcctgctacttctaccgactgaaatccccgatcacaaagggcacgatcactgctttgttccgggcgattaggggtgcccacccgtctcgctcgaacaaccttttctctttcttacggcagcctcacgggacttcggtctggtctgctctgtgcttccaattcgacaagacgccagcgttcctgcctgaagctactaccgtgattgatcgggtaaccggatatttgctgatcgtcgagtacaacgattacgtcgccattttcaaatcccagatcgacgtcccctctgatttcacgaagcggcatctgcaacgcatcggcgcccaggacgttgatagtgggctcaccagcaaggattcaatatttgcccgggtaaggctacgtcatatgacgttgtctcgctttgctttgcgcagtaagacgcttgagggagagaacctccaaaacaatgtgggcatggcatcctctgcgcgatttgccccgctgggttacagcttcactgaggcagacgagcacttttcaacaacaccgcgaaccgggcgaatttcgcttcgggcggatcgggctgggcatctggaactggttgaatacgcctgcagtatcattgaccgtctgcgccctcgtcctgggaggccgtcgtcgtccccttttctggcagctttcgcgcgaccgctggagctatccgatctaacggctagtcctacccaatttgcggtagataccgccatccttggacaggccatctttgacgacaaatctatacgattggtcaagcaggacggacgggggtatcgagaactgccaaaggcagaggtcgacccgatacttgcagagctgacagacgtcttgggagttgccaaaagcaccgacggaaaactgctcgtgtcccagcttgcaacgggcgtcgaagtcggagaaatagcgatcaacaaaacacgaatcgccctaaaacgcctagcgttacctctgctcgccgatgtctacgttgaggacacccaattcgctctagggacggacgaagatcgggttctgcttaagcagttcatcgacaaagaagacacattcatcgtcctgtttaaccagctccggttcgcttacctagacggcaacctttaccaagacgactccttggtcaacggtggcagtcaattcctgggctacctctttggcaatgcagagctggctactgtcacggatgaaaaaggtgcctttaccgctacccatcacacgttcgatcctgactccacgtttggcgcagtactatcaacgatcgctcccgaagacgacgtcatggtctgcgatgatctcggtgacgaatgggctgattttatcggcttccgaaccgatccagcatccccaagaatcaccttctaccatgctaagcatggggagctgactctcggcgcaggcgcgttccacgtttctgtcagccaggccatcaaaaacctgggcaatctcaatttgcccgcaccagccatggccacgaaacttgtgcgatgggacggattttatactaacaacagggtgaatacacgtatccatcgcacatgccgaggaacgcccgctgattcccgagccgctgcagatttctgcagaaatgcccctcacaccttcaaacgggtggccattgtgacctcatctctgagcaaggccgcagttaagcaagcattagaagacatcgcggcgggccggactgccagcccctacttcgtccagctctattggctattgtcgtccttctttgcagcctgtacggaggttggagctttcggctgtgtgatatgtcaagaatga

SEQ ID NO: 503206 - DNA, 747 bp, Stenotrophomonas maltophilia
atgcaagttgataaccctgccgggcgtctcttgagtattgtggagagagggcatcggataaagcatcaggattcatgtcgtgaatcatgggcaattcttcttgacgttcctgcgaacgaccaaagtctgctaatgcaacgtgtgtcactagtaatggcgctgcccgcgcgaatttcagatgtcctcaaggcagactttcccatgctgtatgaatccaacgcccatcagcatgtagtttcgtgcttaaacaaggcttttataaatcagcatatggccggaaactgggcatctttcatcggccacgttgacggtcacgtggcgtcgaacttgaaattcatgtcccaactttttgagactagtcgcccatcaaaggcaatgagttccgaagaaattctggatatacgggcacggacggaagctcttatcaatattgtcatcagtggagactttcctcccgcgatgaaaaaatctctggtagacaagctaaaagccgtaattgatgcgctggacagctattatgtctttggcgcggaaccagttttgaatgctgttgccgccaccattggtgctgcttatctgagcccggattatcgcgctgccgcaaataccgaggctggaaaggaattcgcaagcagtcttgctaatctcgccaacgcagtgaccgtggctactgcggtagttcagctcggcatcagtagtgtccccttgcttgaattcgcagtgaaaaccatcgtcggcaacccgtag

SEQ ID NO: 503207 - DNA, 906 bp, Stenotrophomonas maltophilia
atgactcgctaccgcaaaccgcccctgtcgattcaggaacagttggatctgctccagcagcgcgggcttgccattggcgataccgccaatgccaatcgatacctgcagcgtgtcggctactatcgtcttatgggctatctctacacacagcgtatgcccggtagcgacaatttccgcgatcaagcgacattcgaagaagcgataagcctctatgagttcgatagagcgcttagagacctggtgatggaggccgtcggccatatcgaggttgcaacgcggaccgtgctcacgtaccactttgcgcatgcgagcggcgccttcggccatctggaagcgtgtaatctgaccttcgctggacaggagcatgcagattggctggatggcgtcgaaagtgaagtggtgcgctccagggagacgttcattcggcactaccgggacaagtacacctcaccggcgtttcccaaagtaccggtttggatggcaacggaagtcatgtcgctggggtcgctctcccgcctctacaaagcgcttcgtacccgtgagcagaaagctgttgcgggtgagatgggcctggcagcccccgtcttcgcgaactggctgcatgtcaccagcgtggcgcgaaacgtcgttgcacaccacagcaggctttggaacaaggagctcggtgtttcggcggttcgtcctcggtcggcgggatggtctgaacatgaggcaccgtatgcgccgaaccgctccttctttctgttgctcctgcttcgcaaacttctggaagcgacaaccgctgattccaaggattggcgtgaacgtgtcgatgcccacctcgcggctggcctgacgaacgaagttcgagtgaagagcctcggggctgcggcaggatggcaggggcaccgcctgtggcgcgggtga

SEQ ID NO: 503208 - DNA, 582 bp, Stenotrophomonas maltophilia
atgagcgtgtcgacaatgttctccgatttcctggagaatctttcggttaacaatgctgagatcattagccttcgctacggcgagctgacagctgctttgaacaaggaattccgagataccgagtccaagtctgcaaatacgctgcaggtaggttcattcggccgccgaaccggcattagagggatctcagatctcgacatgctgtacatcatgcccaagggtaaatgggaaacctataacgtcgatggcggacagtccaagctgctcgaggacgcacgcaaagccatcaaggtgcgctacccgactaccaaagtaagggttgatcgtcttgttgtaacagtgacttaccaaaactttcatgtcgaagtgcagccagtctttgagcaagaggacggtgcgtacaagtaccctgacacgaagaacggcggatcgtggaagacgactaagccgcgacttgagatggaagctattgcaacgctcgactcaacgaagaactgcaatatgcgccgactttgcaagatggtccgagcgtggagaaacaagcacggtgggctgctgccggttccgttgacaccgacctaa

SEQ ID NO: 503209 - DNA, 942 bp, Stenotrophomonas maltophilia
atggatttccctggacctgagcttgaacattctctcttgcatcaacggggctggttgccagccgctggatgcagtgcagtccattgcatatccgacaggtatgcaatcttcaattccatcaggccggtttccgcagcgttgcgggcgaggggcatttccatgaaaacgtcaatgcaaaaatacatgcggcccgccgcgatcccggttctgatcagtctggctctcgcagcacttctccttgccacacccgcagtctctaccgcatcgcctgcagaagcgttgctgttcaagtccgcaaatctcatcaagtactccactggggagtccatccccacgttcagtggcagtttgcgtctctatcaaaatggtgaccagacggcctggattggagaaagggggattgtggccatcgtgctttgcgggcaagagccttggttcaacccggttaggacggggttgcccagtaggggcgacgacccggaggctttggctgccgtaacatggatgtacgctgagctgagccgcagaatctcgatggtagccagcgcagccgctgaagtgcggggtgataacggcgttggcaaggcgcgtaaagccgaagtcgaggtgccatgggcgtacggcttcgaaagatacgaggtctccagcgatcggacccctgaaggtcatgagcgtatccgactctggaaactgggcaccatccactcgaccccttcagcaggaagcggccccactgaggtaacgtctgcggagaagaaggcgcgcgaagcctccctggaaagtaatggcacatggcatgaactggtgatcattccgggttggcgacccttctggcttcctcctggggtgtcctttcaaggctggcgttcagccagtggctccggttttcgcactgtgtccgctgcgcggaaggcaggtcatggttgcggcctccagcgatga

SEQ ID NO: 503210 - DNA, 390 bp, Stenotrophomonas maltophilia
atgttgctgggtcatcctgtcggcatggcacagcacaccccgccaacccgtttactcggcatcggcggcccacgacggccccggcaggcgctgtccgtggcgcctgcaatcgacctgcgggccgagtaccagttctggcaggtctacgaacgcgtggtccgcccgctgcccggcggtgggctgcgccgggcctggctggtgtgccagaaggtgtaccgggaccgctggcagcacccggaggacagcgacgcggtcggactgtcgcgggtgctgttcggcggcaacatgacggctggccgggcgtcggagctggcggagctgcacgcgctggtcagccgtcgggtggcgctgctggcgaagcgaggtgtaatgttcagacgcggccgctga

SEQ ID NO: 503211 - DNA, 297 bp, Stenotrophomonas maltophilia
atgattcttcttccggggcagtaccgcatcctcgcgtatcgcggattccatgacctgccgcggatgatgctggtagccgatagcgcatcaaagcgttgggtgctcgattgtccgttcgaagacgaacgggatgactacgcgccggtgtatcgcatttatgccgtggatgctgacatcgcggtgccttcggaggtatgggagcgtcacattcgtgggctattgcctgacattggcgtcctttcagtaaatagcatgcagtttgacgagacgcggcgcgccttcttcatcctgatgtga

SEQ ID NO: 503212 - DNA, 1746 bp, Stenotrophomonas maltophilia
gtgcttgcggaaccggtaggtgccaccctggtagtaggagtgggccggatacaacgtcatgtccgccgggtaggtgaacatcgcgtcgggctcgtcgctgaccacgacctcggcggcatcgccgaacagggcctgctgaaagccgtccttcagtgcttcgaccttggcgagctggagctgctcactcagcttgcgtcggaggacgaactggccattgagcagttgcgacagggagaagccccggtcctgggacagaccgctgatggcccggcgcacccactcccgcaatacgggttgcttcacggccgggtcgcggatcttctggtccagccacccgaccaggtctgcgtcggtccggtccttggcaaagcccggaaggtaggtgttcacgtcgtcgtcgatcttggtgtaggtgaccttttcatccaccagatcgacttcgaaggtctggctgtcggcgttgaacttgaggctggacagatccggcgggtaagccagcagatcccaggtgaacccgagcggcaccgcgccgctttcgatgaactccagctcgccctgctccatgacacagaggcgaggcacgctgaagaccacgccgttctgactgggagctttgaccgccttggaagcgatctggtgacgctcgatggtggccgcaacgtcctggcgttcctttgcgggcgcggcaagggtgatcgcctccaccgtggaatcgtccacctcacccgtgatctcgaccgtgccgcctttgccttcctcgttgggcacgaaaaccacgttaccctggtcgcgctcgggcacgttggtcaggtccggtggcttgctaaccgccaccgtggtcttgggcggtgtggggacaggattcgctccgccttgcaggcccaagctaggcccaagtgtcggttcacgctggacggcgcccatggcctccaacggattgaagccaatatcgatgagcgacttggtcagctcagccgccgccaagttgaagtgggtggtggtgacgtgggcataggccttgttcatggcctcttgcttgcggcgggttgcatatggcatccgcagcacacggcccagcagctgctggatatccttgtcgcttttgacctgggccaccgagcagaagacgtaggcgaacgaacagtcccagccctccttgagggcctgcttggtgatgatgacctcgatggggcagtccttggcgaacaggtcgacgccgtcgatttcccgttggtcgccggtggcgatcgcaatggccttctccggcaccttctcgttgtcgatgagatgccgcttgacctcttccaccgtggccgtgcccttggcgttctccgcctggatcagcaggatgggacggatgtagtccggttcattgagcgcggtctttcccagctcgttgcgacgggccacagcgctacccactgccatctcccactgccccacgtgctccttcagcacgacggggaacttgatcatgtcggccaccttcagctcaaaggcgctgacgctgaccaagacattgctcttgctcgcttcgggcgtggcggtcagttcaacgaccaccttcgctcccaggcgtttgtagacctcgtaagacaacggggtgttggcattgtgcgcctcgtcggtgatgaccaatggcccgtggagcttgagcaggttggcaaacgaggcaatggccttgccatgcgagttctgttccagataaggcagatcagccacgctgccagcgaagtgcgcctctag

SEQ ID NO: 503213 - DNA, 1521 bp, Stenotrophomonas maltophilia
atgccactgctttcttggttcaatcgcgacgcggacctcacacgcgccgctctggctccttaccgattgttggagcccgtcgccaagctgtcccacggggaggaagactcccccaacatgctcatcgagggggacaaccttgaggcgctgaaggccttgctcccgtattacggcgggcaggtcaaatgcattttcatcgatccgccatacaacacaaagagtgcgttcgaacaatacgacgacaacttggaacattcgcaatggttgtcgatgatatatccgcgactggagttgctccgctcgcttctttcggacgatggttccatttggattaccatcgatgacaacgaggggcattatctgaaggtgctctgtgacgagatctttggcagaagcaactttgtttctaacgtcgtatggcaaaagctctacacggttaagaactctgcgaaatacatttcggacatgcatgagcatgtcttggtctatgccaagaacaaagattcttgggcaaggaatctacttccaagatccgatgagctcaacgacagctacaccaacgaagacgacgatccaagggggccgtggacgacaaacgccatccaggcaaggaactattattcactagggtcctacgaaatagtgggcccgactggtaaggtttttcgtccccctgccggaacttattggcgcatctcggaagagaacttccgtgcattgaatgcggatgggcgtatttggtggggtaagtctggtggcaacgcgccccgcgtcaagaaatacctttccgaagtgaaggatggtgttgttcctgcgagcctttggcttcaccaagatgcaggcacaaatgctctcgcgaaagcagaggtaaggactgttttctcatccgaagagcttgttttcgatacgcctaagcccgaagaactcatcaagctgattctggaggtggctacgtctccatgggacttggttcttgacagcttcttgggatcagggactaccgctgctgttgcccacaagatgggccgccggtggattggcatagaaatgggggagcatgctcgcactcattgccaaccgcgccttgtaaaagtcttagagggagagcagggaggaatctcggaggcggttaactggaaaggcggcggggggtttcgcttctacaagctgggcgtgcctgtgttcgatgagaacggtcacatccgggaaagcatccgcttcgagcatctggccgcacacgtatggttcgccgaaaccggcactgctcggtccactcgggcaatcaagaagcccttcttgggagagcaccaaggggtgggctactacctgctgttcaacggaattctgggcgacgagagcaaaaccggtggcaacgtgctgaccaagcgagtgttgcgaggactggagccgtttgacggacctaaggtgatttacggtgagtcctgcgacttgccgaaggagaggctggaagaactccggatcaccttcaaacagaccccctacgacatcaaggcgcgctga

SEQ ID NO: 503214 - DNA, 1269 bp, Stenotrophomonas maltophilia
gtgcgccaaggagagagcgattacgggacgttgggcgcgaccgggtcggtggcttggggcctcaacgaccggtggaccctgcgcggcaccgctcaaacctcaccgaacggtaaggccaacgtggcgttgggggccaccacggtgcttgtcacctacggcacgctggatctggaagtgggcacgtccacccaaggcggccaacggcaggccgtggcctacgactaccgcggcccgaggtttggcgtgcgcctggagcacgagcgccaacaggactactggcgcctgcgcgcccccagtgcagtggaggtggagcagcgcacccgaggttcggtgttctggcggcccacgccccagtggtcccttcgggccagctattcggacgtgcgcacgccacgctttcgcaccgcttacgccgacgccgggctgacttggcgtggctacgggcacaccgtggccgtctccgccttgcgcgatctggagcgcaaggaaacccgggtggaggtgggctacagctacgatttcggccggggcaagggcgtgagcgttagggcccggcaagccccggatgccacggcctgggccgtccaaggacgcgcccgccccacggtctttggaaccccggtgggcttgtccttgtcggtagacgagggagcggctggccagacggcccgggccaacgccaactggaccacccgggcagggtgggctcagatcaacgccgagcacgggcccagcagcacttggacttccggttcgatggccggtgccgtccacctggatcgccagggcgtgacgttcctgggtccggccgaatccttcgccgtggtggacgtgcccggccaagccggggtgccggtgagggtgggcggcagattggtggggaagaccaacgcccagggccgcctggtggtgggcgaggtgaccccgatggtgcccaccgaggtccgcgtagacgatcgggcgctgccactgggcacccagttggccgagatcgagcaaaccgccaccgctggccgccaagccggcatgcacctcaccttcccggtcctgaccgagaccgcacgcaccttccgcctcacgggcccggccatcgaagcgggcactgtggccaagacggcgaacgagaccacccaggtgggcttcgatggggcgctctacctgcagcaccccgagccgggacagacagttgaggtgacgggggtctgcaaggcccaactgccggcggacgtcgggtctgcgcaaacggtggtgtcgctggcttgtcagtga

SEQ ID NO: 503215 - DNA, 399 bp, Stenotrophomonas maltophilia
atgaaccttccacgtgctgccctgctgttgaccatcctgctggccgcggtaccggccatggcccagcacggcccatcgacccctgcgcagagccagccgctgggcccaaccggcggtgccatccgccagcaaccgctggatgccgggcgggtgaccggcagcgtcgagattgcacagccggccggcgaggcccaggtgaccgtgcgctcgctggagcccagcagcgtggtcggccaataccgcatccgcttcagcgacctcgacgtgaatggcgatggtttcatcagccgcgaggaagcacaggccaacccagcgctggccgacgaattcaactcgctggaccgcagacatcgcggcaagctggaccgcaccgacctggccggatggctggttgactga

SEQ ID NO: 503216 - DNA, 861 bp, Stenotrophomonas maltophilia
atgcgctcttcgcccaggccgcgctcgcgatcccccagcgcacgttccagcgcttcgacgatatcggtcggcgaaacaccttccagcacatgcacgcggcaacgcgacagcagcgccgagttcagctcgaacgacggattctcggtggtggcgccgacgaacaggatcgtgccgcgctcaatgtgcggcaggaatgcgtcctgctgcgccttgttgaagcgatgcacctcgtccacgaacagcacggtgcgccggccctccgcgaagcgttgcgcagcttcggccagcacctggcgcacctccggcagcccggacagcacggcagagatggcacggaattccgcatcggcgtactcggccagcagcagcgctagcgtggtcttgccgcagcccggcggcccccacaggatcatcgaatgcacgcgaccggattcgaccgcgcggcgcagcgcgctgtccggcgccagcaggcgcttctgcccgaccatttcgtcgagggtgcgcgggcgcatgcgctcggccagcgggcgcaggtgctcccgatcaacgctcagcagatcgggaccggggaaggaagtggagcgatgtcttggcacccgcttattgtaccgcgagagcgtgccagcaattccggtagtgccggccgctggccggcaaaccaaatgcgtatcaaccaaggtgacacctcccaaaggaggcggcgccgggccatgtaggcgggaaaccgtggatttgcgctcttaccaaggtcgtcaaaggcctgacaaaactctggctgcattgtggcgagttcggcttagccgggcagcgtggcctgagttgtgcccggcgctaaaacacgtggaagcgcgcgggaactga

SEQ ID NO: 503217 - DNA, 939 bp, Stenotrophomonas maltophilia
atgccgtgccgagagtggagcgagaaccgaacgatcaactgcccagtgggccaggtgggccaggtgttccaacaccgccgtcaccactgcggaaccgacccgagtgtttacgaggcgtgggctgggtccacgacggccggcagttggaccacgaccagcagcacctgcactccgtgccctgctcccgagacccgcaacgtgggatgccctgcaggtcagtttggctcgatcggccagcggcggaccttctcatgcacgggcaccggttcgtgggacgcttggacgcaaaccaacaccacctgcgcggcttgcccagcacctttcccacaagccgaaacccagtgggtcgccgcgagtgccgcttgcccggcaggccaaagtggatcgcacacgtggcaggccgagcagcggcggaccaggatggggtcttacaactgcccggccaccacgtggtcgctgcccagcccgacgttcaccacttggacaaattgggcggagacgggggttcgtcgcaacgaggccaatacatgcacacccaacgcaccacccccgacgtttcccgaatacaccgggcgatcttggcattcgtggggagacggagggcactacggctgggcgatcttctgcaacgctccccggaccctggccgagcttcaagccacctcgttggcatgcacctggcaatacgaaacgaacgacacccccacgtttacgccagagccacctggcgtgacccgcccaacaccggctttggaagcctgtgtctacgcgctgcgcgccaacttaactccgatgccaggttacggcttcgtcaaccacccaggcaccgcggtttggccggcggcttgctcgtgcagcgtcgtgggtccaggcgcgcggttctactggcaagacctgggagcgagcgactgggtgggctttgaattcaaatgcccctga

SEQ ID NO: 503218 - DNA, 858 bp, Stenotrophomonas maltophilia
gtgaagttcggcttcgtggcgaaacaccgaggggcctggccggtcaatctgatgtgcgaggcgctcggtgtctcgcgggggggcttctacgcgtggctcacacggcccaggagccagcgcagcctcagcgatgaagtgctgggcgcgcaggtccaccagagcttcgtgcgcagcgaccgcacctacggcgcgcgccgtgtgtggcacgacgtgctggagcaaggtcaagcctgtggtctgcaccgcatcgagcgactcatgcgagagcaggcactacgagccaggccccgacgacgtggactgcccaaggaccggggcacgcgcagcgcggtggccgacaacgtgctggaccgccagttccgggccgatggcccgaaccagaagtgggtagccgacttcacctacatctggacagccgagggctggctgtacgtggcggcggtgctggatctgtactcgcggcgcatcgtgggctggtcgatgcaggagagcatgacctcgcagctcgtggtggatgcgctgatgatggcagtgtggcgtcgaggcaagccggtggccttgttgcatcactcggaccagggcagccagtacaccagcgagcacttccagaagctgctggatgaacaaggcattacttgcagcatgagccgggccggtgaggtctgggacaactcggccatggagagcttcttcagctccctcaagaccgagcgcacggccaggaaggtgtaccgcacacgagggcaggcccgttcagatgtgttcgactacatcgagtgcttctacaacccgacgcgccggcattcgacgctcggctatctcagtcccgtacagttcgagaaagctcaagaagcttag

SEQ ID NO: 503219 - DNA, 150 bp, Stenotrophomonas maltophilia
atgaaattgcagtatccggtcacactgcaattaaacgtcaaaaacctgtttgataaaacgtattacacctcttccatcgccacaaataatctggggaatcagattggcgatccgcgtgaagtgcaattcacggtgaaaatggaattttga

SEQ ID NO: 503220 - DNA, 351 bp, Stenotrophomonas maltophilia
atgaagcccgtgattatcggtatcatgtcacaagagaaaatccgtgaaagggtcatggctatcgcgcggggtgaatacaagcctaaggcaaatgaaccaaagatttggtttacctccatgaagtctctgtctgaagttcttagtgatgacaatagggcacttttgcggactattttttctgataggccctcctccatttcggagctggccttggctactggtcggcagcctagcaatctctctaggacattgaagaccatggccaactatggattggttgatttacagcgggaaaataaagttgtgaggcctgtggtgacgtcaagcgagttcactatttttgctgattga

SEQ ID NO: 503221 - DNA, 504 bp, Stenotrophomonas maltophilia
atggtcatagcagcgcaagcttttacggagaaggccgtcagtgagctcaagccaggcagccttttcctcttccggcagcaatgggccttcatgggggagcggcaggctcaagatctcgaaggcgagcgtaaagaaaaagtcctagtgcttcttcagggcgagcatgcaggctcgattgttagggcgccagaaggcgtgtccacctacctgacttttgcggaaccatttggttggttcgcagcaatcgaacctggcgttctgccgcaggcagatgggcagttgcctggctcattggtcatctcgcccggtggtctagtgattgttggtggcgagaaggaccactggggcgatatcgatcacttcgcttttctttttaagggcggagaacaagttcagccgccaagcaacaggtttaagcgttttccgaactggagcgtggagctgtgccacgcagagaggccgtatgtcagtctgggccggattctggatgtcgcggcttcttag

SEQ ID NO: 503222 - DNA, 1191 bp, Stenotrophomonas maltophilia
atgtctacggaggcgatcctggatcggcaagcctataggcactatgcccctagcgagttgcatgatcactttgctgcttttgacaagctgctcgcttcagcggttcgacgggatcgcagcacggccacgctggtggccaacccgttgcatctgttttctgcgaaaaggcgatacccggtcatccatcttgtcgcgatgaaagacagagaacgatggcgttatttccagcttccctttgaaacctacgcgatcaaggaggggcatcgctttgtcagcgaggatggggcttcaacgaaggcgatagctcaaccccaattttgttttgaagttgtagctgacccttctctcaacgtctttgaaacgatgaggggtcggtcctatgcctcggtagatgagtttcgcgccgacgctgaacttatgcgaaagtttaacgaaggcgggaaagatgttgcgatgccctcagtgttgctcacagcccctattgcactgcttaggcgaggagtcgccgggcgcttcttgcaacaaaaatacacgctctatcaacatatcttcggctctggggcggaataccccaatgatggaccgttctatataggcatcacatcacgagactggaagaagcgttggagggagcactgggccgctatacagcgtggttcaggccacaagtttcacagggtttaccgggaaaggatggcggagcgcgccttgacctatgtccatcacaaggtgatgggggtggcgcctagccttgaccagatacaagacctggaggagaccttcgtacaaggccactgggacgacgagcgcctgctgaacatgatccctggcggcaaagcaggtatcgcctatcttcatcggcaccgtatgctcgatgagcaggttacacctactccagacaaggtcgaaggggccttggaagattggacgaaagaacattctcgaaagggagctcccgcaccatggatcgctgaggcctggcagagccccgaatacgcgtcgcaggtgatctgcggtcgggatgacaggttgaatgttgaccaggtgcttcagatcaggcttctggcctcaggcggtgtttcggctgacgatattgctaaacgaataggagccagccgcgagaaaatccaaaaagtcgttgaaggaaagacctatgtgagagttgtagatcgagccttgcctgaagtatag

SEQ ID NO: 503223 - DNA, 480 bp, Stenotrophomonas maltophilia
atggatatgaagtgctgggcattgatgggtctcttggcgttcgccgcttctgctggggctgcgcccagcctgtcatgtcagttgcagagcggtcagttcaaggcggctggggtggtgcatcccaaggtctccgagttcatctgggccacgggtcatggctccgcaacgcctactggccccatccgaaccagcatcggccgcatcgaccctgtggaaggccgggactacaagcgcgctatcaagttgaatggcaagtccattctgctgcctccggaagcgcatagcgtggtgggcttcggcaaggtctacgacttcaggagtgctgtggcgttggcgtatctgggagagcgcgatgaagactcgtccgcccggcccagccagattgtcatcgtaatcaacaaagccgggtcagtgattgatagcgaagtccttcctggtgctgcaacgaatccgggcagtcactgcttactcatcgactga

SEQ ID NO: 503224 - DNA, 300 bp, Stenotrophomonas maltophilia
atgaagaagctttggatggtttccctctctgcgctgctggtcgcttgttctggcgggcctggcaatggcgatgttgagaaagcgctgaccgcatatttcaaggaagcgacaggaacgacgatgacctttgagcgtctcaaggtgggcgagtgcgtccgaggtgacagcccgggctatgcgtgcagtgtgaccggaatcgcgcgatatcagttgggcactcgcattgagcaacagcagcttgtcggcactttcgtcatcgacaaggtcgatggcacttggaccgtcgtagatcgtcgctga

SEQ ID NO: 503225 - DNA, 537 bp, Stenotrophomonas maltophilia
atgtggaccttgttcaaggtaatccgctggatcatcaccggtctcgcgctgtggtggctgtgcggtgtggtgttcgaagagggcacgacggctgacggggcagtcttcgggctgatgctgttcgggcagctggtcttctggccccttgcgctgttgtggggtttgccgtggctgttccgtcgccgaacgcccaaactgaagaagcataggcctgaagagttcgaacccacggtatcccatgatcacattgccttggacctgggcagggatgccatctgggttcgggaccctgggaagggagagcgctatctgcggcgatctgaagtgctcgccatccgcactggggaatacaactacaagggagtggtcacccatcgcctggaagtccaggtgcgtgacgttgttcatccgctctggctggtccccttcgtgcgtcactctgaccgttggctcaagagcacagctgtcaatgagactgagagggatgaatggttcgctaggatgaaagcttggcttactgaaacgcgcagcatctaa

SEQ ID NO: 503226 - DNA, 1287 bp, Stenotrophomonas maltophilia
gtggatttgttcgcggggtgcggtgggttcgggctcggccttgagcaggcaggctttacgcccattttcgtcaatgagttgaatgatgatgcgcgcggcacctacatcgctaaccggaaagatcgtcacgagcacttcgcgcgcggccttgacgagagcaagtggctgaatgatttcagtacttccgatgcgcggaaaatagtgagcaagaagggctatcttgatggcctccaaaggctgttcaagtccgaattcgggatttcacatggcgagatcgacctggtggtgggcgggcctccatgccaggggttttccgggatagggcaccggagatcctatgcggtggataaaaaaaatctcctgtcgaaccacctctacaaggacatggccaagatcattggccatctacgcccgcgcgcattcgttttcgagaacgtacgaggattgctgaccgggcgctggacggaggacggtagaagcggggagatatggcgagacgtcaagaaagagttcgcggggattggtgagtacacgcttgccgccgagttggtttacgcaaagaactacggtgtggcgcagaaccgaccgcgcatcattcttgttggcataaggtgcgatgtcatcggcagggaagccaccacgaaggcagagattgagcatattgacggaaccggtatctccggtgggttcttgccgcagggtgagccgggaaaagcgccaaacatgattgatgtcctcggtgacctcgttgatccgtattatgaaaacgggggaagcacgaccgagtatccgtccaaggtaatgtgcgaaatccaacgtcggttcagggtctcgcctgatggttcgcacgtagcgcccaagggctccccggtcaccgagcatgattacagcaagcaccatccgaacgtgatcaagaagttcaaggccatgatccgtggtggcgagttcgaagccacgaagaagtttgcccagcgcgtacttccggaagagtgggggccgacgggcccgtcgataacggcgacatcgctgccggacgactatgtgcatttcgagcagccgcgcacgttgacggtgcgggaatgggcacggttgcaggggttccccgattggtatgaattcaagggcaagcgaaccacgggtggcttgcgccgtgctggtaatccgcttgaagggatccatttccgcgaattgcctaagtacacccagatcgggaatgcagtgccagttcccatggctagggccattggggaacatttagcgagtattctccggaaggggaagaagtag

SEQ ID NO: 503227 - DNA, 1980 bp, Stenotrophomonas maltophilia
atgagtagcgatccagggagttcggaagccgagatccatgcggggctaccggcggatgccacgcacgaaacaagtttccagaaactccaaaagcgggcttttggcggggaagatgttgctgctcgcccaggagccgaggatgacgagtggtggcccaagggccccttgcttcccggtgttcaggaattgatcagggacttcgtcgctggcacggaatcccccgagggcctgcatatcgtcttcttgcttggcggcgcgggcaacggcaagtcatttgccgcccgatcactcgggaaggagctcggcctctccgcatctgcgaatgatgcgcttgcgcatcgcatttacagagcagctagaaatggggtgagcattgagcttctcaatgacgcgacaattgcgccaagcgcggactaccaatcgcaccagccggttgcgcttgcctttgacatacagcgctggtggaaagagtcggtagccggtcccgtagcagctttttgctgcgtcaatcgtggaatcgtcattgatgagctgcgttcgctatccgagcatagtcatgaaatcgaagtcctcgcgcgtgccgtcctcgcttggctcgcttcccgggaacaggatgtcgcaggccaactaggcacttcgctggaggaacccaagctggctcttggcgaccactaccacgagcttcgattcaatctaagtgggcgtacagtgcgaatctcggccatgtccgtggatgcctgctcgctgatggaccttgatggccaccaatcccgcgctggaacattgttccaacaaatcgtggagcgatgccgtgatgacgccatggccaggccggaggattgtcctatcagggccaatgtccagcagtggcttcctcccaacaccatcctgggctgggagaatatcctctcacacgcagagatagcgtcggggagattgcacagttatcgcgatatctgggggctagctgcactaagcatccttgggccccgattcgcggccattgatggttcgcgctccttgctggatcacgtggatcgctgcctgcataccgcgcgtgatggatcttcgctgaaggagaggctggacgccttgcttgagttgtcccatttccgcatgcataacgccctgtttcgggctcccatacctacgggtgatgatgcactgcctttctatccgccgaccacgccagcacacctcgggctgtcgctcgtagatccttcggcttgggaggcaaaggatagccaagccgtagaagcggcaatgcagagcgttacgctcggtgggatgccgagtgaatcattgctcgggagcgggttgctcgaaaatgcctggtgtggtttcgatagatgcctggagcaagcaatcgtcgagtacgttggcagcaatgactgtccggataacgtgcgtcgcaggcttgtttcctggttcggtggctatctcacccgccttgttggcgtgtcgaccgggcatctgggcaaccgtgtcgttgtaaagctatgggagcaatgccgggagaagtgcgtcaacggcatagggcaactgccgttggagtttgagaaggccatcaggtcgctgattttcccgcaacatgatgacgcgccacagcacagcatcctcgtgcccgcatttgctgcgagagtcgagccgttgcaggcgtcacgggaaggaacgaccccgaggctcgccgaagtcattccccacaacttcatcaaccttcaggtgaggcaacagggtgggcgtctcgtgctcgaatgcactcttacggggcgtgccgaagtcatagggcagcttgtgctcgatttttcgctggtacgggaggccttggcttgccgtggaagccgggccgggcaaacggaatcaaccgcccatgtcgagccgcgaatcgaacgctgtcgcgcatcgagcctttctgcggttccagccaaccagcgacggcttgtcgtgctttccggtggaagcctggtggagttgagctaa

SEQ ID NO: 503228 - DNA, 1446 bp, Stenotrophomonas maltophilia
atggcctttgcgttccctgacctaaagcgtccgcagtacccgtcgagtccggaagtgctcctgtcggccttggcatggtcggtaatccccagagtgcccgagtacaccgccaccgggttgatataccaaaggaaagaaagtcgggcaaaacgtggcgtggtcattgagcaaaccatgccacgcgacaaggggctcgaggattttcgcgctagcctgcaatcgaatggctgggccactgctgccgcaggggacttgcccagggtggtcgccgaggcggcagcggatgccatgctgggcgtcaagcctccgaaaggtgttggctatgcatcatcggcaatcggtctggctggcgcactcctgcaggatcctgtaggcagcctggcgaccaagaacccgccgaacttcgccagcctgctgaatacgatgtatgcgctcggtggaggtgtcgatgagcaaacggccgcaagccgttggtttgatgttgcccgccactactcggcgacggggaaattgaaagccctggaagatgcattggcggggacaaccctcaagcgcttcctgcctgaaggcgcttggccgccgactgcaccacaagttgcgagggcgtccgtaccggagcccctgccgtcatggtggcaagaggacgtcgcttcagcaggggtgggaacaccattctcttggttccattcaagttggaaccggctttgttcacgggagtggtacaagattcttccgccgcggagatgggcgggctgggctgtttgcgtgcttcgaaatgccattgggttcaccttcctctgggaagccaatttctttctggaacttgcgctcgggatcgcagaccacgagcgcgacccggccacggtcgcccgctgggcattgattccgaagaggccactcgttccctaccagcgaggtggaattgcacagatggatgtaatgccgtcgattcggcggttgctaacgcaggggctgacatgtcgcaaggcaatcatcgaggcggccagcaagcttagtgaggagccaaataacctcgcgagcttggtcgaggcacttcgtgctactaaccctaaatcgatcaacgctgcactcggcggtggtggtgacaaggggggcttgcccaacttgattgaaacggtccgctattccttgctggcgcgaagcgctccggatgcaccggaccaccatgccctgttgaaggttgtcagcaggaactacacgcatgtggctcccgcgcccgagtggatagtagtgatgtccgcaatggctgcgaccgggccttcggatgtcgttcgattgggggacgtacagcgttcgctggaggacattgggttcaagcccaggatcgacttcctgcttggtgaattggagcgggctgggctgtgcgcgagcgcctcggatggcgacgaaggcattgagatcaaccttggatttggacggaagtga

SEQ ID NO: 503229 - DNA, 5247 bp, Stenotrophomonas maltophilia
atgtaccggcagggatcgcatatggcagtggcctttgcgagcgacaaccggggcatgtcgacgtactccagcgtctatccactgctgctctccaatggatttccatctgccaatactgcaagcgggggaactggtgttgcaggcctacacgagtttgctgcatgtctcgccgaagtgctggccgaaaaaatcgggacccatggtttgtctttggaagaattcgagaaaacgacacaaagcatcctcggcttcctagcagccgcctatgaggtggttgggaatggccaatctagctttgctgcggactggtggctgcacgtacatcaatgggtggaatcgctagccttggtgccagacgctacgtttgagccgaagggtattgccagactttatggctgtgctggattgccggtgccgtctcgcggacatgccttgtccaccaggccaaaggattatatcaaggcactgcaagaccgttggtcgaatccgtcaacgatcatgacggaagtcgccaggctcgaaggtttggcgtcggcgaccaaggcagcacaatctctagcaaagcttgattgggaaaaatcccacacgaaaacaagtctccggagcgattccgtcgttgcattggtggctacggcgaatggcgccgatcccttggataggatcaggggatggggccatctggacgaagttgtgttcaaggagagttttgtcgaagcaaagggcaggcttggcgttcgccgggaaggggccgacctgccactgccttggaaaaatgcactgccggtcttggtggccaagatcgacgagtcaagggacgcatatggcaacagcttgctgcttggagaagtcgagctggtagtgccgtacaagcctgatggcgtgggttcctccacgaacatggaagcagacaagctactcgctcaggtccaagtttccggtattcgtggatgtgcggcggtgttcgaggccgaatcaggcctgcttcttgcggatggcctccacctgaaaggaacgcttgcactcacgccagccaagaaggctcgtaaccttgcatggattgaggcctcaacttctggcgaggcagcccagcttctggttgatcggtgtaatgcctctttcaccttgctgaggtcggacgaggtcgcactctgggcgaagtcccagggccgcaccacgaaggcgtcaatgcgtggcccagtcatatggtcgcgaagggatagtgatgccgcttccgtcgaagtgccagcactaggggcctacgaccttgcgattgcctggggtagttccgcggggtttgatgggaaagcggccacggtgcgagctacgtcattctcccttgcatggactggcatggaggatgctggcgcgaaggctgccgtggagatcacggaaggcgtggatgttgggtccgtcggccaggtgattttccatattgacctgttttcgactgaagagcggcctctttcgccaatcattgcggctgcgcatggattgcatccagatgcttccttccttgccggtgaagatgcgttcaattgcttcgaagggcaaatcggggaatgcctggccaatctagagagaggccaggcccttggatgcatcctggccacgagttcgcgaaagaaaagcgactttgtcgcgaacggggatggggttcgttgcaccccggatctcctcgcgcgtaccggaaatgacctttcccctgggttccccagccagcagctccgttcacacccgtcgtacgtcaggttgcttgaagcttatgtgtcacttgggattcccaaggtggtttccgatcttgagaaggaggaggaaagcgcggggctaactatttcccgcatagcgcttgatttcatcccgagggaggccatggatgagttgctcaaggcctatcacggattaatcgaagctacctccggattgtctccatctgatcgtttctgggcgcgaaaccccttttcccttgtggtttacgaggaagggagcggataccaatcggcacaagccgtcttgttgagccctttgcatccgattcggcttgcctgggcgtggggcctccagatcgggctacgcgaggcgcatgacgatggggccaggcccgcggaatcgttggcgcttttggatgggaccaattttccttcgtcggtcgtcttcagcgaccagttcgacagcccatcggcactgatgcccgtgccggtcgatcccagacccaatgacctttacctcggttggcacgccagcgttgcaatcgtcaggaggcaagcagcaattccggaatggattgcggggcgtcgcttcccggtggatgggttgtcggccctttctgcttcgtcggtcagtgctgcaatcgatgatttcttgcgggtttcgccgcatgtccaatccctgcacattgatttggcaactaccattccttcgcggcgctcctcgtcgatagacgatggcgtccttgtcaagcttggtgaacttgccttcggcagttcagggttggacggtgtcgcgggcgtccgggtaacggattccgaaacccgtctggggccgatcccgcgcttctcggggattgacgacgccattgcaactgcaaggcctggattcaacgttcaatgggtaagtacgccttctggccagtcaccgaatagccacgtgaccttccttgaaggcaatgcggccatgttggccatggagccatttactggccgaggcgagggatggctcccgactctgccgctacggcgcacgcccatccgttcacgcgaggctacattcacatcgctggactacacgcttgccgaacctgatgtcgccgcgagcgagttcacgaaggctctatatgcctacgagtcggccgcgactggttcgcactcccttaaggtaatcccaaatccggttggcgttgccgggcggccgggctggctggttgcaggcgattttggtgtcgatccccaggccatctctcgtgcagcaagggaccaatcgaacagcgattacatcctttgggattggcgtccggcgaccacgatcaagccaaacagggaaacgagcagtcgcgcgcagccctatttcgtcctggcctcggtgccccctgcgcttaacaatgccatccacacccgtttgaagcagctcaataaccaactggcttctggggacgtggaaaagcgcgcaagattcgttgtttcgaccctggccgagcgtgcagttgggttaaatacgctgcttgccattggacaccatcaagcaactggcgcacttggattcttctttgccctgcgttcgatcggtacgtggctggacagtgctccctccggcgaagtccgcttggtaatccctgtggacgcagttgacccgttcctccgggcgagcattaacaacgctggtgatggaagcaggaggcgagctgacttgcttgcggtgcgggcatttgttggtgttggacaacgtccttgcgtggtcctcgttccagtagagatcaagcactacggcctcgggaatggcgagctggaccaggctttcccgttggccggggaaccgcgattgaatgagcatgccgagcaactggcgagctatcagggccaactacaatccttgtgtgaaacctaccgcaatgcagcgggtagccaggcttcgttgctaggccagcggctggcagccgtcttggacgcagcaatccaactcggctgtggcaccccggaattggctggcggcctgcttgccagcgttgcctccggtcaagcagatgtcgaacttggaaaaggtgtcttgctttggtatcaggctagggcgagcggtatcgatggcagcaaggccagttgggatgaaattagcggtgctgcagcaagccctcgcaacgatgtcagggtggatcctgcggccttcgatgcatgcttctgggatggagaggacgggctagcgcacaaggtcgtacgcgaggcgctcaatgacgctagtagcgcagaagtcgggaagcctgctgcggaggcgaatgccgttcccggttcaaaggatgcgcaacaaggacggcatgagcgggacatcgagaacacatcggcttcatcttcccccgctaattctatccccccggatagcgaaggcggagctattcccgggcccgctcaggtagtttcgcttggtgatgggagtgggaaggaaggcgcaggcgaggagctgctttcacccgcgcctgcccccaagccgtcacgcaacaagatggctgacgcggaacttgaaaagcgttacgcggggcttctggcggcgctaagcgaattcaacgtcaaggtcgagcgcccgcgcggtgaggttccttaccaggaaggacctgcattcatcgagtatgcggttttcccgtcctacggagtttcagttaataagatcgaatctcagctggaaaacctcaagcttcgactgaagctgtcttcagatgcggagattggttgttcgacgcacaagggcaacgtgctgttgaccgtgccgaaggcggacgacgagcgctatttcgtggatgctgcagacctttggtcaaggtgggtgcgcccgtcgtccgggttcaaggttccactcggtgaagatgcttccggcaacattgtcgaactcgatttttctaattcaaattctccacatttgttgattgccggcgttacgggcagtggcaagtcagaggcgctacttacaattttgcatggggctgttaggtactactcgaaggacgagcttcgtcttcggctgatcgaccccaagcaaactgaactcaatacgcttgcacggttgccacatacggatggccagataggctggacggctgaagaggccatcatcttgcttgagcaagccgtggaggaaatggaacgccgatacgaaatatttcggctgaagggcgtcaggaacatttcagagtaccaatctcctgaatcgcccttgccgagatggatcgttgttcttgatgaatacgctgatcttgtcagcgatgacgacgagcgcaaggcaattgagaaactcctgcagcgcctttctcagaaggctcgggcagccgggattcacgtgattgtttcaacgcaaaagccggtggtcaaggtgatcaataccgtggtcaagggaaacttgcctggcaagatcgcgctgcgcgtaaatactgcaatggaaagtagggtgattttggatgaaccgggggccgagaagttggctggtaagggggatgccatcgtcctcgccggaaatggcagggtgcggatccagtttgcgcgctacgcaatctag

SEQ ID NO: 503230 - DNA, 138 bp, Stenotrophomonas maltophilia
atgaaggcgatgaagagcaaggtcgagctgatctattgcgtgatggttgtggctacggccgtgctggcaggcgtcatgagatgcacggcgagcgcggcctgcagcagatgcggtggcatgttcgatccgttcgactga

SEQ ID NO: 503231 - DNA, 957 bp, Stenotrophomonas maltophilia
atgcatatggtcgaaatgatggcttatgccggcgagaggccgtggcatggcctgggcaaccggctggcgccgcaacagcccatcgaagtgtggaagcggcaggcgggcatggactggaagatcgaggaagcggaggtgcgctatgtcaccggcaaccacaaccttggcgtcattcatgtctttccggagcataaagtgctgtactggtccgacaaccgcaaaccgctgtcggtggtgtccaagcgctttcaggtcgtgcagcccggccagattctggagttctaccgggacctgactgccagcagtggtttcgagctggaaaccgcgggtgtgctgcgcgaaggccgaaagttctgggcgttggcccggaccgggcaaagcacgacgctgaaggggcgggacaaggtcgatggttacctgctgttggccactgcctgcgacggcacgctggcgaccacggcgcagttcacctcggtccgggtggtctgcaacaacaccctgtctatcgccctgggcaatgccagcggggcgatcaaggtgccgcatcggagccagttcgatccggaagtggtgaaacgtcagttgggcatcaccgtctcgtcctgggatggattcgtggcccggatgaaggcactggtggatcgcccggtggatccggactcggtggaagggctgctgcgccgggttctgacctacgccggtcccgacggcaaggccgaggtggtcaacgagcaggctatggccaccgtccgcttgatgtatgagggcgacggcaagggcgcgctgatggcctccagccgggggacggcctggggcctgctcaacagcgtgacggagttcgtcgaccaccaccgacgcgcgcgcagcgatgaccaccgccgggatgcggcctggttcgggccgggcgcccagatcaagcagcgggcctgggatgaagtgatgaagctggtggcctga

SEQ ID NO: 503232 - DNA, 507 bp, Stenotrophomonas maltophilia
atgggtgcccggtcaccacgcgtgcgtgagttggcccgggtgacctcccccgaggaggctgcccgggtccgggaggaccgggccattagccgggccttggacatcctctcgcgtaggctctctgagcctggtccgccgctcggggacctcgccacctgcgggaggttcttccggctgcggctgggcagcgaatcccgtgagcacttcgaggtggcgttcctgaataccaagcatcggctcatcgcggtggagcgtctgttctccggctcggtggacggggcggaggtccatccgcgcatcgtggtccagcgggcgttggccctgaacgccgcggcggtcctgatggcccacaaccaccccagtggcagtaccgagccgtcagctgccgatcgggcggtaacggcgcggctgaagagtgcgttggggctggtagatgtgcggctgctggatcacttcgtagtcactgccagcgaggcggtctcgatggcttcccggggatgggtatag

SEQ ID NO: 503233 - DNA, 588 bp, Stenotrophomonas maltophilia
atggccaagcgactgattccccaaggcggtcctctgcgtgtccgccacacggggcgcgaccactacagcatgtcgatcgacctgccgaaggatgccgagggccgttgcgcacgtgagtgcccggacccgcagtgctcacccggctacttcaaggtcaaactgggcaccggcatcgtcggcgaccagcagcatgcctattgcccctactgcaggcacatcgcagcgcccgcggactacaccacgcgtgagcaacgccggtacgcgaaggatcttgccatgcgcgaagtccacaagggccttgagggcatgatcaaggacaccctgggcttcggctcgtccaaccggcggaaactgggtggcgggctggtgtcgatcgagatgagctacaagcccgggagattgccacacgtcgcccggcccttcgaagatgaggtgcggcgcgatgtcgtgtgcccgcactgcacgctggaccagacggtgttcgggctggccacctggtgtgcggactgcggacaggacatcttcatggcgcatgtcggcgccgaactgcaggtcgtccggcagatggtcggcgacgtcgcgtcgtag

SEQ ID NO: 503234 - DNA, 285 bp, Stenotrophomonas maltophilia
atgcacgagcaagacctcggccagatcctctccaccaccaagcgattggtaaatcagctgcgactgctccaggttccgctggatgtcgacgcgctggagcgcgatgggatccttgaacgtcagggcagcgcattcgtgttgctggcaccgcattcactgcctgaccatgtcgcagccaagatcacgtcgttcgtgcgccgcggtggcaagaccttcgtgacgttcgagccgcgtaaccatgagctcgacaagctggtgcgacaattcgagaagcgcgggctctag

SEQ ID NO: 503235 - DNA, 411 bp, Stenotrophomonas maltophilia
gtgtccgattcctcgccacgtgctctgtttgccgcccgcctggtccaggcgcggcagctgcgtggcctgagccaacgcgcgctgggggaccgcatggggctgggtaaggacaagggctcctcgcggatcaaccgctacgagcaccaggtcaccgcgatcgggttcgacaacctgggcacgctggcgcaggtgctggaggtgccggtggcctacctgctggccgacgatgcggccatggccgatgccatcctggccttatcccaggcggatgaatcccagcgcgatgtgctggccacgctgatcccggccttggtcgaggacccaaccctgctgaccaagctggtgaagctgctacagctacccaagcgagagcagtccaaggcgttaagggcgctggcagaaaaggcctga

SEQ ID NO: 503236 - DNA, 948 bp, Stenotrophomonas maltophilia
atgaaaaggatcaatcattgggccgccttggtggcgaccctgcttgtgtccggctgcagccagcaggtgctggactggcgcaatgccgaagtgagcaacggaaagatctacgaagcgggtgagaacaagcccttcgacggtctcgttaccgatgtgccccacggcaaactggagccgcatttgggggcgctcaggacggtgctgagcaatctcaacaccttccagcccgcaagcatgccggcgctgttggggggcatgcagtatctgtgcgatgtagacgtcaaggacggtctggttgcaggccactttgtgtgccggtaccgcgattcccaggtcgtggcctacgaggggcggctcaccgagggtggactggaaggcgagactgttttccacaacggagccggcgcaaaggtggttgtcctgccgatggcgagcgggaaggtgaatggtcggatcaggatctacttcgcggacaaccccgagcagctttccctggaagcggatgtcgtcgacaacggattcaatggcgagctggtcggctaccacttgaatgggcaggtcaggacgaaggggcagtatgccagcagcgtgccgaccggggtctgggagggataccgggaagacggcactgtctccgaacgcatctcgtacgaggatggcaaggtcgcttcgcacacctactaccatccggacggcaaggagtatctgacggaggagcagatgtgggcactccatcgctccatcgcggaaagcgatgctttcgtgctgacgccggagcaggacctgctgctgtccgaggctgaggcccggtacggcgcggtgcgcctgctgtcgccttcccagcgggaagccaaggccgaggctgaagaagcgcagaggcgcgcggacaagatcgccctcggccttgatcccgattgtttcgtgtgtgatgggtcgggcaatcagtag

SEQ ID NO: 503237 - DNA, 234 bp, Stenotrophomonas maltophilia
atgagcctggagcaggtggtcgaggagtgcagggagctggcccggcggcggcacgagagcggttacgaccaggtcgcgctggacgaggccgcccggcagggctttgccaatggcgccttcgaggaactggatgaggatgtgccggcggtggtggaggagttctacccggaagtggcgggagaaatggctggcgatgtgccaccgggcaagatgagcttgggcagcaggttgtag

SEQ ID NO: 503238 - DNA, 1326 bp, Stenotrophomonas maltophilia
atgaaaggcgtgggcgaagaaggtcggatggtgcagttttcggaggtcaagtggagtgagctcctgcctgaagggggagggcagattccttaccttctggaaaaggacgtgccggtctatttccgcgtcgatccggtgtgtcacctcgtatatcgccgccgccattacgcggttcctcctgtcggtgagacagaaaaaaggcgagccgaggatttcgcccgcgcgaatggaggtgggatgccggatgtgtcggaagccactctgcttccagtcgagggcttcctggactgtgatcttgccttcctacggttggatggaagttcgcttgagcagattcacatctccaggtcctgtccgacacctcgttttacccggggtgggttggtcacaaagccggcttatagggtcatcgggaatgattcgagagggcggccgatcagggtggtggacgagccgacgggaattcgggagctggtaggcgtcgagttcggcgaggccgtggttgtcggcaagagcgattggaatcaggcaattcggagtggtgaacagttggctcgcactgatccgctggactatgtccttcagggcgaggtcaagagggaagaactgttcttggatgcggttgatatcgaaagattgaaacgggagaagacggcgataatcgagagggtggcatatccattccggcatgaggagcgcatgcccggcctgtactggatgttccaagcggcgtatgcgctgaatgagcttgcgaacttggatgggggcaaggatggtgttggcaaatggctgatggaaagcgcccctgagaagacctatagatacaagagcgtgcggaccgcggaaaagtttgtctggcccaaagttgatcgcaagcaaggcagtgaaggacgcgatgattttgacctcgagaacatcaaccacctccatggtgtcggatcaagatcgaaatataagctcagcttcaccagcgatggattggccatgattcttgcaatagccgattattggcatgaccttgccgaggatgagccaaagtccattgcgaccggtcttgcgaaaacgttgatggtgaatggctttgccgggcttgaggttggtgatctggtttatcttatttccggaaagcgcgtggatcttgagattgagctggatctcagggcatgggtggccaagcaggatgaaatggcgaggatggcgggtagggaggagatgggctggcgggatgtgatcgaacaggaggagcgcgagagactgctcaagaaaagggctcgcgatgaaacagggcgcgaaaggaaggagcgtgagagaagaggcgccagctag

SEQ ID NO: 503239 - DNA, 1347 bp, Stenotrophomonas maltophilia
atgcaagcccattccaagctccccaacaacaacgcatcgcgcgctcacatcagcctcaaacgatcgatcgctggcgtaatcgagcgcgaaaaacgctaccaggacatcgtcgacacgcacgtcaaataccatctacccgacggagaccggtgggtcgccgggctggacgaccaccgcttcaagaagcactgtgaaagcctgttggaacttcatgccgcccttaccgacagcgagggcgatccgtgcatagacatccgggccccgttccgcacaggcggaccgtcgttgcccgcggtcaagctcaagcccttgggcaagcgcatcctcgagtgctgccgggtccatgctgacaacccccattggagtgccgcatgggcgaaccatgtcttccatccgaccatcacggtgttgctgcgttcaatgaagaactacgccatgcggattgcccggtgccatgtcaacggcagtggcatcagtcatgaccttgagctcggcatcctgacgggccatctggcgcgctttgtgcgccgtgcgagcctctcttggaagtacatcaatgccgtgaaggcccacacgcgcaaggagaacgacaatttcaagagcgcgcgacatttcatctaccacctcgccggcaagcacgcccgcctgtgcttccttcgcatcgacctgactttccgtaccggctggaaggacttcagccattccgaagccgccgacaaggcagtgaaggacttcctccgctccttgcgtagcaaggcctgcaagcgcaacctgctcccgggctacctgggcttcatcatcaagcgcgagaacggcatctctcgtggtacgcatttccaccttcttgtggtgttgaacggcggccttcagggcaagaccagccgcagcgtcgactatatctccgatgccctgtgccagatgtggctccagcgcatcggccacgatcgcggaagcgcccacaacagctacaaggaccgccactcctggccattcaatggccttgggctgcaggacttccagaggatcgaatcgctcgtgggcctgcgctacgcgctgtactaccttaccaagcaggactgcgtcctgaagaccagcaacgacaagatcaagaacttctggggcacgccgactcctcgtcggatgcgcagcaaacgtggcccaaagcgcaagcaccagaaccacctggcactactgtatcgtgcgctcgatggggatcgtggcccctatccggcgggctttgaccctaccccctacgtacttgcccataagcgcaagcaatcctccctgaagccgcgctacggcgcctgggacatcgcacccgccgcgggcggccaccactcggcatag

SEQ ID NO: 503240 - DNA, 249 bp, Stenotrophomonas maltophilia
atgtcaagcgcttccgccaacaagagggcgctgcaccgctacccgaccgacgacatctgcatctacccacccgacaccctgatgcgcctcggccaggtgtgtgagatcaccggcaagaagaagagctcgctctacaaagccatcgcggatggcgagttccctgagccgaaaaagatcggcaagcgtgccgtggcctggagcgcgaaagccgtgttccagtgggtagccgagcgtccgtctgcacgctaa

SEQ ID NO: 503241 - DNA, 312 bp, Stenotrophomonas maltophilia
atgtcgtcgaacaacgcgctggatcccgagctgctcgccgaactggtgagcgatgtcgaggggctcggcatcgagattctgtacctgcgtgcggccaaggcctccatccggaaggccgtgaccgaacgcaacgtgtccctggatgcgatctgtgccttggtgaaccagcgcctgaaatcgctgggccggtgggtcgagccccatcatgtccaggcaatcctggacgagcagcagatggatgccgacgcgcaggacagcgtcttcgcggcgtcgttccaaggtcgggcgccacctacgtccgcgcagacttga

SEQ ID NO: 503242 - DNA, 1449 bp, Stenotrophomonas maltophilia
atgctttatccatatcccgacatgtcccgggaatgcccgatcgatgctcttcctgatctgcttttcagcgcggcctgcgaagtccgccagctcgaagatgatgtaccggccgagtgcctactgatggatgctgtttccgcttgcgcggtgcctgtgcagcgcttgtacaacgtacaggggctggatgacaggaacatgccgacgtcgatcttcatgcttgcgattgcacccagtgggcggggcaaggggacttcgtaccgcgagttcttcaaatccttgatcgaacacaaccggcgggctgggttggctgcccgggagatccgcgccaggatgcgttcgcttgagaaggcgggcttgccgatcgatggccccgagttccggcagccagacgggcgaatgctgaccatgatcagctatcgtgctctgatggagtgcctggatggcgaggcacgctcggtcaacatcaacgacgaagacggaggaagcttccttgagagtgatctattcaccaggatgggcggcagcctgaccaagctttatagcggccacgacctggatcacgtcgtcaagggcgcggatttgactgctgctgatggtcgttgttcgctcgggatccgtttgcagggcgacgtgttttatccggagatgaaacgcaccaacaacaagagcttccaccaggggatttgggggcgggccgtcgtggcttgccatgaccccaagcgctttggatcttgcaggatccacatgccggcgaactggcccgggggcgggctgaaggcgcttcatcgtcacctgaaggacctgatggacaaggccgacaagaagcaggcgatgggcgaattggtgcgggacaagatcgttcttgacgatgaggctagggctttcatggtcgagctgaagttccgcctgaaggggtggcgtgagacctgctacgacgagaagatcgagccggccgtcaatcgcgcatgggagaacgcgctgcggatagcagcggtgttccagatcgtgtgcggaaagggcacgatgattagcttgcagatggttcggcgtgcctgggcgatcgtgcaatggtcgttgacccagcaccagatgatcttcgtggaggcactcaagcccgagcctaagcacttggtcgtgcgagcggatggtcccttcatcaagccgtggccggccaagatcaaggtacccaagcctcccaaaccgccgcgcccgattcaggacgccaaatggctactggagtgcttcgggctagtaagcgtagggcgcggtcaggccttgcttgccgacgtcatcaagttggctggactgcgcggaccgcgtctggaaacagccctggcatggctcaagctcaacggggctgtcgagatcgttggtcgcggtgtggatgcggcaatgcgtattccgaccatggtggctagcagctcgccgcggatgccttcgcacctgtag

SEQ ID NO: 503243 - DNA, 756 bp, Stenotrophomonas maltophilia
atggtaaagagggcgacgcacggggcaccggattgggagatctatgagcgactggtcgcccatatgcttgccaaagagtcggaaaccgatctgtgcgtcacgccaaacgcacacgtcgttggcaggatcactggtgttcgtaggcagattgacgtcctgatcgaagctcggcacgatactgacaatagccgccgaatcatcgtggacgctaagaagaggtcgaggaaggtcgatgtcaaggaagtagaaagcttccggggactcatggaggacgttggtgcaacccatggctatctggtgagtccagtcggttatacgagggcggcggagaggagggctcagtcagccgtctctattcgcatcgtgacactggaccgcttggaaggtttcgatccttcgacttggcctcaatgccgaagaaaaggttgcgaacacggtcgtgtattctgggatggatatccggagctttccgtattgctccatccagtcgatgggtcggcaccagttaccgtctcgtccctgcactatgtcgggaagtgcgaccgctgcggaaggttccatgtttggtgccttgcttgtaatgacatcttggcaccaaccgaagacgaagatgactgcggacaccattgcagctgcaagcctctttggttctggcttgcttcgatcgaagaagatgaagatgggtataggtcggccgagttgcacgtctgccttgcaacaggtcaagtggggactgtcgataggcggtcgctttga

SEQ ID NO: 503244 - DNA, 336 bp, Stenotrophomonas maltophilia
gtgggcgatgcgccggagctgcaccaggcgctgctggcttacgcctccgacttccacctgctgggcacggcgaccttcccgcacggtatcagctactaccacccgcacgtgcagatggcctcgctcgaccacgcgatctggttccaccgcccgttccgcgccgacgactggctgctgtattcgctggacagccccagcgcgcaggattcgcgcggcctggcccgcggccagttcttcacccgcaatggcgtgctggtggccagcaccgcgcaggaaggcctgatccgcgtcgttcccgaccaggccgcggccgctgccgtgccagccaaggagtaa

SEQ ID NO: 503245 - DNA, 1248 bp, Stenotrophomonas maltophilia
gtgaaccgggcgctggacgctctcgggctcgacgccagcgccgacgaacgggcgatcaagcgcgcctacgcgcagagactgcgcgcggcgcgcccggacgaagacccggtggcattccagacgctgcacgaggcttatcaggaagcgctgcggtggatacgcaaccgtgcgcagtggcaggaggaaagcagtgcagaagcgctcgcgaccacgcctgcggacaacagcccgcccgagccactggcgccgtacgacagccattcgccgatggaccacatgccggagctgcatcatccatgcacgctcgacaccgacatgccggacgatgtggtggagccatcattgaacctgccccggtttgcgcgcctgctgatcaacaccgccggcgacaccgacccggccagcttcgagcactggctggccgggcgtccggagctgtggtcattggccgacaggccacgtatcggtgacgtggtcctgcagcagctgctgcaccagggcggcccgctgtgcgagtccaatttcgatctgctcggtcgatacttctgctggaatgagatccgggctgatatcgatccctaccgggtccgtgcacgacgcagccaactgcatcgccactggcagctgcagccgcgcaaccatgcggccctcaccacagcactggaccgaccgcaggatcgggtgtccccccatgaagcccgtgcccgcgtggaacgcttgacccggccgtggcactggctgcaatcgctgctgtcgtcctgcgtgcccgggcgcgcaggcaccatgcggcgcacgatgcagcatctgggggtgcataccgtccgcgacacgctggcgccactggacgcggatcaggtcgccttctggctggcgatatcgcagcccaggcgcttcaacatcccgaagttgcaggtcgcgattgtccgctgcctgctgggcgcgctgatcgtactggcggttctggcggtgctggcactactgggtgatgccgtgcgaccacgtgcgctcaacacgtccggcatgaaacgcgcggcaatccatgcctcggtggtcatcgtgtccggcgccctcatgctggcgcacttcgtggggtggactccatcgcgaacggcgtccgcgccaacaccggccgaaccaccgtcgccgctcgatgggcaaggcgtgctcacgcacgggcctcgtccgcgcaggcctgctccctcattcgcagtcgtgagccagctggaccctggcaccggcaacggttga

SEQ ID NO: 503246 - DNA, 1458 bp, Stenotrophomonas maltophilia
atgagctgggcacttcacgtcctggagctggacgaagccgctgacgagcgcgcgatcaagcgcgcctatgcaaatcgcctgcgggtgactcgacccgacgaggatcccatcgccttccagcacctgcatgaggcctatcaggcggcattggactgggtccgccaggaagcgctggccaataccgcagacgaagacgaaccggcggagcatgcaaccgacatcgcaccctggccgcccgacgcagacgtggcatgggcgccgcccgaaacgcgttcgtactcgcctccatggccacctcgcggcacgcctgtgctgctgcgcacggcacaagtggcggaactggagggagcggtccacgtatcgggccatgcgcacacgatcctgcgcatggcccatctgtcttcccctgaagacttcggcccctggctggaggccacgccggtgctgtggtcgctgcgctacaagccattggtgggcgacgcgctgctggatgaactggcacgcagtcacaacagcgtcagcgcagccaacatgggtctgctggcacgctgctttggctgggatgatgtacacgatggcgtggatccggacaggctggcatcgatccagtcgcgcggtcatcgacgctgggccgccgagaccgggaatgcggcagagctgtcggcactgcttgaacaagagggcagcctgcggttggggaggatcacagtcagtcgttgcctgcgctacctgtcgcagccatggaacctgcggcgatccctctggcaggcgcagctgcccgagcacatcagtgaagtcaacgcgctgctggatgccatcgagtcggggggaagcgagcagttgcccgaggcatggcatccgcagcagatcctgttctggcgaagtcttgccgacgtctcccggcccaggcggtggcgctggcaggtgaacgcgctgcgtggcgtgctgctgggcgtctgcagcctgttgttcttcggtggaatcgcaggtgtctcgttggtccagggaaaggcgggcgaagcctcgatattcgtccagatgggggcgctcctgggcctgctgctggcggtgatgggagtactgtgggtgcctgttcgctgggcgctgcgccaacttacgcttgacctcactcatcggcgtgcagggctgctgctggccctacctgcgccgttgatggcgatcggcagcctggttcttgtccatggcctgggccaccgcatggagggtacgctgctgatcttcatggcactgcccttggcgactgcgcgcctgtggcgacgcgtcggtgcccggatgcgattcggagtccgccacggcgtgttcatggtacttgccatgctgatcgccgaagcaggcatcgttctcaccctgctgcagtggggcgccgagttcgtgcaccgcgcgcgtcgtcacgcgccgattgaccggcttccgccggcctctggaaacactgcgtga

SEQ ID NO: 503247 - DNA, 1707 bp, Stenotrophomonas maltophilia
atgtcgtccccggcagcgctgctgcatgctgcgcgcgtgctggaaatgcatcgtctggctctactgctgtcatgcttccaggagccgcgcgccagtgggttccgggtgctgctgcaggcgcttgcggtgctgtggtgctggctctggatcgatggccctcagcctgttctggccgatgaggcagcgcgggtgctgccggccgccgttgtacttctggcggtatctgtagcgtgggcactctttgtaaaccttcgcagggcgcgtcacgacacgtggtacgacgcggcgggtcttctgctcagtctggcgatggtggccatccaggtgcacgcggccttcatcctgttgatggcactcaatgcaatcctgccgttcctcgtcatcgccgcgacggtggcttacggacgcaaggccatggcgccggcaatcgcggtaacggccgtggcgctgctttgggcagcccccgaaggctactggttctcgcggcccgcctatctggcctatgcgctggcgctgaccatcctgttgccgctggtcgtggcgtcactggtggcagcgatgcgcgaaatcgcgttgcgtgccattgcgtcgcgtgaggcgcaggggcgattcgtcggcaccatgagtcatgagcttcgcacgccgctcaatgccatcatcagcggcatccagcttctggaggtcaatacggcaagtgctgcccagcgacacgcactggccaccgttgcagggcaggcccaggcgctccgacgtcgcattgatgatgtacttgatgttgccagcattgatggtggcaagctgaaactgcggccacatccttgttcgctgcgttccatcatcgaggcggcgcaggcgagctgcatgcctgcggctgcagacaaaggcgtggtactgcaggtggatgtggggagagcagacgtatggctgttggcagatggcggtcgcatcgaacaggtggtgaccaatcttctctgcaatgccatcaagttcagtcccatggcgggcgaggcgagggtctcggttggcgccgttcgagcggtggatgactggcaggtgcggatctcggtctgcgactccgggacgggcatcgacgaagcgcagagagacatgattttctcgcctttcgtgcaggtcagtcagggcgaagcacgttgcgaacagggcgtcgggctcgggctgtacatcgttcggctgatttccgatgccatgggcggaacgatcagcgtcggccgcagcgatgtcggcggcgcctcattcgtgtggtgcttcgctgctgccgtggccgatgaggctgagccgcttccttccctgggtgagcttttccagttgcacgcggcggtggttcgtccgctgcactgcctgctgttcgaagacgtggagaccaaccgcgaggtggtgcagcacctgctgcagtgtgcaggccatcgcctcagcttccggaaagatggtcacgatgctcaggccgtcatcaaggcgctggcgcccgacgtagttctgctggatctgcacatgccaggttgcagtggatgggacgtactggaggcgctggtcagggaccctgcggcgcctcccgttctggtgatgagcgcagacacccgggtagaggtgattgacagggcgcaggcgctgggcgcggctgggtttctgtgcaagccactggacatcgagagcgtcctggatatgttgcgcggtgttgccgagcgctga

SEQ ID NO: 503248 - DNA, 927 bp, Stenotrophomonas maltophilia
atgagccaggacgcgatcgcgcgtgaagccgcacgctggtggctggatggacacgatggcacccgcgacgagaacgcgttcgaccagtggtgccaggccgattcgcgccatgttgcgcagtaccagcatctgcagcacctgtggcaggcaggcgcgacgctccccagcctgcagcggcaacagcagcgcaggcaacgccgtcgcctgcgcgaagccggcattgcggttctgttgctgtgtgcgctgggtttctacagccgccatgcctcgccgccggtggcgcaggtactgcgtacggccgctggcgagatccgcgaggagacccttccggatggttcgcatgtcctgctgtcacccggcagcgaagtgaaggtgcgcatcgatgggcagcgccgccagctccagttgcagcgtggccaggcctggttccaggtcgccgccgatgccgaccggcccttccaggtgcacaccccgcagggcaccgtcactgcactggggaccgcattcgatcttgccgtgcagggcaacagcagcgtggtcaccgttaccgagcatcgcgtgcgcgtggacagcggcaacgccagcatgctggccaacgacggcgagcagctgcgcttcgatgggcagtcaacagcccatgcaacaaccaacgcccccggaacactggcctggcgcgaacggcgcctgcactgggtctcggccccgctggccgacgtcacgcagggcctggaccgctggcacggcgggcacacgtgggtcgtcggcgagcagctgcgccagcagccggtcaccctgcttggcagtgccgacggtgcagccagcaaccgcgaccagttggccactcagttgcaggtgcgcgtgctgcgcctcggcgacggcatacaggtgtggctgccgccacgcagggaacagcgtgatgggccctga

SEQ ID NO: 503249 - DNA, 2403 bp, Stenotrophomonas maltophilia
atgcgcattatgcagttcacgccgaagtttccttccaactttgcccgttcgcggttgggtctggccgtagccagctcattgatgctcgccgccatgggcaccgcaaatgctgtcgacgtcggcccaggccagaccgtcaccattaccccaggaagtgccttcgagggacagaatctctccgtccatggaggaaccgccaatgttctgggcgcccgcatgggcgcactggactcgttctctgcaggcggcacacaccagacaatcatcaacgcagatggtgctggcttcacgtcaaccacaggcaatttcgtacggagctcaacagcggtcttccgcaattcggtgctgagcgccacaaccggcccggcccttggtttggcacgatcaggcgctgtcgatggcaatggacgcccctaccccagagtgtcgttgatcgacagctcgctcacttccacacgcatcggactgcaggtgctcgccggcggctacgctgatgtagacggttcgaccatttccggcggtacgtatggggtctctgtcggtgcgggctccgtttcgctgcgcaatggctcgacggtcaacggagccacagctggaatcctgatcatctcgagcccaaccatcgaagagaatctcgccgactggggcgtgatggttgatggttcacacgtcgaagcaagcaacggcagcgccattctgttcggcgctcatctgccttctgtatcccgcccggatacgctgttgatacagaatgatgcgactctggtggggagcaacggcgtcatcatctctacccgcgacaacgcccacttcgacctcaccgcccgcacctccacgctcaagggcgacatcaccattgccgataccgccagcggcacgctgcgcttccttgacggcctcgacctcaccggccgcatccttggcccggccgacgtcatcgtcgaccagggcggtcgctggacgctgtccggcgacagcaacaccggcaacctcaccctgggtgcgggaagtgacattttccttggtactgcaaacactgcggcctatccgcagctgaccgtcaacggcaactacaccggcaatggcggcgccctgcacttcaacaccgtgttggccggcgacgacgcagcaagctcccgcatgcacgtgaccggcgataccagcggtaccacccaggtcaccgtcaacaacattgccggtgctggcgcgcagaccgtcaacggtattccgctggtgcaggtggacggtgccagcaatggcaagttcactctgcagggccgtgccatcggcggcatgcacgagtacttcctgcacaaaggctcgccgggcgccgccaacggcaactggtacctgacctcggtctacaccggcaatccgtgcgatatcaatccgtcgctgccggagtgcacgccggtggatcccgtggacccggtcgaccccgtggacccggtcgatcccaccgatcccaccgatccggtccccgtgctgcgtccggagccgggcgcgtacctggccaaccaggccgcggccgtgcagatgttccagctgcgccgccatgatcgcggcgagcccggtttcgaccgcgcccgcaccggcacctgggtgcgcgccgggcgtgaccagctgcaagccaacgtggccggccaggtcgatgcccgtacccacatcaacaccctgcagctgggcagcgatgtctggcgctggggcgatggccgtggccaggtcggcgtcatgctcggcaccggcgatgcgaccacacaggcggtgtcgacgctgagcggttatggcacccgcggcaaggtcaagggcaagtcggccggtgtctacctgggctgggttcaggatgcacagagcagtgccggcctgtatgtggacggctggctgcaggcggcgcgcttcgacaacgaggtgcagggcgaaggcatcgcccgtgagacctacgactccaggacccgcagtgcatcgttggaagccggttatgcctgggccatccgcagcactgaggccagcacgctgtaccttcagccgcaggcgcagctgacctggaccgactacgacggcgacagtctggttgaaaacaatggcaccacggtcgaagacggtcgcggcggcggcctcaacagccgcctcggcctgcgcctgtttggccagagcacgctgcagggcaaccgcgtgcagccgttcctggcagcgaactggctgcgtggccagcgcgatgaggccatgcgcttcaacagcgagtcgttgagcgcgaagacgccggagaaccgctacgaagtgcaggccggtgcccagctgcagctgggccagcgttggagcgcatggggtgacctgcgtgtgcagcgcggcgacagcggctaccgcaaccatggagcccaggtgggtctgcgcgccgcctggtaa

SEQ ID NO: 503250 - DNA, 1281 bp, Stenotrophomonas maltophilia
atgcacgtgaccggtgataccagcggcaccacccaggtcaccgtcaacaacattgccggtgctggcgcacagaccgtcaacggcattccgctgatgcaggtggacggtgccagcaatggccacctcgcactgcagggccgcgccatcggtggcatgtacgagtatttcctgcgcaagggcactccgggcgccaacaacggcaactggtacctgacctcggcctacaccggcaatccgtgcgatatcaatccgtcgctgccggagtgcacgccggtggacccggtggatccggtcgaccctgtggacccggtcgatcccaccgatccggtcgatccggtcgatccggtcgatccggtccccgtgctgcgtccggagccgggcgcgtacctggccaaccaggccgcggccgtgcagatgttccagctgcgccgccatgaccgcggcgagcccggcttcgaccgcgcccgcatcggcacctgggtgcgcgccgggcgtgaccagctgcaggcgaacgtggccggccaggtcgatgcccgtacccacatcaacaccctgcagctgggcagcgatgtctggcgctggggcgatggccgtggccaggtcggcgtgatgctgggcaccggcgaggcgaccacgcaggcggtgtcgacgctgagcggttatggcacccgcggcaaggtcaagggcaagtcggccggtgtctacctgggttgggtgcaggatgcacagagcagtgccggcctgtatgtggacggctggctgcaggcggcacgcttcgacaacgaggtgcagggcgaaggcatcgcccgcgagacctacgattccaggactcggagcgcatcgctggaagccggttatgcctgggccatccgcagcagtgaggccagcacgctgtacctgcagccgcaggcgcagctgacctggaccgactacgacggcgacagcctggtcgaaaacaatggcaccacggtcgaggatggtcgcggcggcggcctcaacagccgcctcggcctgcgcctgtttggccagagcgcgctgcagggcaaccgcgtgcagccgttcctggcggcgaactggctgcgtggccagcgcgacgcgtcgatgcgcttcaacagcgagtcgctgagcgcgaagacgccggagaaccgttacgaagtgcaggccggtgcccagctgcagctgggccagcgttggagcgcatggggtgacctgcgtgtgcagcgcggcgacagcggctaccgcaaccatggtgcccaggtgggtctgcgcgccgcctggtaa

SEQ ID NO: 503251 - DNA, 1959 bp, Stenotrophomonas maltophilia
atgctgctgctcgtcaccgccggcgagcaggacgcagcggagtatgcgcgcgccttccacgccaccttcgccgccctcgacgacgttgccgcggtgcaggccggtgccgcactctcggttgagccagccccggtgcgcgcccagctggagcaggccgtcgcggcacaggcgggggcgacgaccattgccgaggctgtcgccttggaactgctgcgtctgcgggcagtactgcgtgcgcagaccctggccgctgccctggcccctccgctggtcgcggaggaagagcagcgccgcttcgccatcgacgacgcattgcgcatccccgttggcgatggcgtcgtgctgtcggcgcagctggcccgccctcgcgccgcatcggcgcccctgcctgcggccatgctgttcaccatctacaccgatccacccaagaaccggcagaagatgctgctggccgccgcgcatggctgcgccggcatcgtggtcgatgcgcgcggcaagggccagggcagcggcaccatcgccccctacgagcatgacggcgcggacgccaacgcggccatcgactggatcagccgccagccatggagcgatggccgggtggccatgtatggcggcagctacgagggctttactgcctgggcggcggcgcgccatcaccatcccgcattgaagaccatcgtgccctacgttgccgccatccccggccagggcctgccgatggagaacaacgtgttcctgagtgccaactacggttgggcgttctatgtggccaatggcccgatgctggacaacgacacctacaaccagaacgaacgctggtcacagctgccccgccgctggtatgcctccggccacccttaccggcagatcgaccagatcgacggcacgcccaacccctggctgcagcgctggctcgatcacccgacgtacgacgcctactggcagtcgatggttccctatggcgaccagttcgacgacatccgcatcccggtgctgaccatcaccgggtactacgacgacggccagatctcggcactgcagtacttcaaggaccacctgcggcaccgccccgatgccgaccatgccctgctgatcggcccctacgaccaccgcggtgcgcagtcggcgctcaagccgatgcagctacgtggccatgagctggatcctgtcgcgcagttcgacacgcccgcactgaccttccagtggctggaccatgtgctgcgcggcgcccctcgcccggcgctggtgcccgaccgcgtgaactaccagctgatgggcgccaatcgctgggggcatgcggcaacactggacgccgccgcgggcgctcaccaccgctaccacctgtcggccgcacccgcttccgccgatggctaccaccgcctgcaggaacagccgccagcgccgggccagctggggcagaccgtggacatggccgaccgcaacgaaatgcggcacggctactacccgttccccatcgtcgcagcacaggatgaagccgacaccgcgctggcctatgtctcggaacccttcaccggcccgatggatctggtgggcagcttctccggcgacctgaaggtgcggatcaacaagcgcgacttcgatttcaccgtcaccctgtacgagctgctcgccgatggacgccggatgcagctgtcctattacatgggccgggccagccacgtgcgtgacccgagcacgcgccagttgctgcagcccggccaatggacccacctgcccttcgatcgcacgcgcatggtcgcccgccgcctggctgcaggcagccgcctgctggtgaaggtggatgtgctgaaggacgccatgcaccaggtcaaccacggcaccggccgcgatgtcagcgacgaatccgccgccgatgcgggcgtccccctgcacgtggagtggcacggcgacagtgttctgacgattcccctgcaacccaccagcgacaccccccagtag

SEQ ID NO: 503252 - DNA, 2250 bp, Stenotrophomonas maltophilia
atgaagtggttccaagatctgcccatcgcccgcaagctggccgtggggttcaccctcaccaccttgatgaccgtcgtactgggcgccttcgccctggtccgcctgtccgaggccaacgcgcagttgagcgcgatggcctccaacgatattccgtccgtgcagtacctcggcgaagtgcgctcgcagctgggtgagttccgcacctatgagctggcccagctgagcatgctggaccagcccgagaaggtggccgactacaacaagcgcatggatgacaccgccgccgtcgtgcgcgaacagctggccgcatacgccaagctgccggccggcgccaaggaacgcgagctctaccgcgccgtgcaggccgacgtcgatggctacttcgcagccaatgccaagctgcgcgaagcggccaccgccggcgatggcgtcgtcgcacggcagatctccgacgaccagtcgcgcccgctgcgccgcaaggcctttgaagacctcaaggcactgggcgcgtacagcagctcgctgatgcagggcaagatcgacaacgccaatgccacccaccgcaacagcatgctggcgatcattgccgccgtcgtattgctggttgtggtcgccgcaacactggcggtggtcatctcgcgcgccgtggtcggccccctcggcaaggccgtgaacgccatccaggccgtcgcacgcggcgacctcagcgtcaccacccagagcaccggcaaggacgaggctggccgcatgctggcggccaccgccgacatgaccgcgatgctgcgccgcttcagcgaacagacccagctgatggcacagatgcatgccggcccggacatcagccaccgtattccggaagacttcccgggcgtctacggccagctggccagcggcatcaacacggtgatcttcgaacacctcgatgcgatcgtcgatgccattgaagtgctcaaccagtacgccatcggcaacctcgccccggacgcccgccgtctgcccggcagccgcgcgatcctgcacgagtcgatggacgcggccaaggccagcctgctggccatcaacacgcagatccagcagctggcctcggccgccgccgccggcgacttcagccagcgcggtgatgcgcagcgtttcgatcacgatttccgcgtgatgatcgagcagctcaacagcatgatgcaggtggccgacggcaacctcggccaactctcgcagctgctgcagtcgatcgccgccggcgacctgaccgcacgcatggacggccagttcaacggcgtgttcgcgcgcatgcgtgacgacgccaacaccaccgttacgcagctgacccagatcgtgagccagatccaggccagtgcctccagcatcaccctcgccgctggcgagatcgcgtccggcaacagcgacctgtcgcgccgtaccgagcagcaggccgccaacctcgaagaaaccgctgcctcgatggaggaactgacctccaccgtgcgccagaacgccgagcacgcccggcaggccaaccagctcgccatcggcgcgcacggtgtcgcttcgcagggcggcgaggtggtcggccaggtggtcaccaccatgtcggccatcgaagcctcgtcgaagaagatcgccgagatcatcagcgtcatcgatggcatcgcgttccagaccaacatcctggcgctgaacgccgcagtggaagccgcgcgtgccggtgaacagggccgtggtttcgccgtggtcgccagcgaagtgcgtaccctcgcccagcgttcggctgcggcggccaaggagatcaagggcctgatcgacgattcggtcggcaaggtcaacgacggctcggcgctggtgcacaaggccggcgcgaccatgggcgagatcgtagcctcggtgcagcgcgtgaccgacatcatggccgagatctccgccgcttcgcaggaacagtcggccggcatcgagcaggtcaaccagaccgtggtgcagatggacgagaccacccagcagaatgctgcactggtggaagaggccaccgccgccgcacgtgcgatggaagaccaggccgcgcagctggccgacgccgtggcgatcttccgcctcgacaaccaggtctcggccgcggtgaaggctgtcgccgaacgcgtcgaaccggcgcgcatcaccaccgtggcacgtccgcagccgaccagcacgcccacgccggtacgtcgcagcagcaacgccagcaccttcgccgccagcgacagcgactggcaggaattctga

SEQ ID NO: 503253 - DNA, 1944 bp, Stenotrophomonas maltophilia
atggccgacgcgctgctggaactgcatggcgtatcgcgcgcctaccgctcggccgccggcgaggtggtggtgttgaaggacgtgtcgctgcgcatcgcggcgggcgagttcatcgccatcatcggcccgtccggttcgggaaaatccacgctgatgaacatcctgggctgcctggaccggccaaccgaaggcagctaccgcgtgcacggcgccgcaaccgagcagatgtcgcccgatgaactggcgcacctgcgtcgcgatcatttcggcttcatcttccagcgctacaacctgatggagaacctgagcgccaccgagaacgtggccttgcccgccgtctatgccggggtggaggccgatgcgcgcaccacgcgtgcccgcctgctgctggaaacgcttggcctgggcgagcgcaccacgaaccggcccagccagctgtccggcggccagcagcagcgcgtttccattgcgcgttcgctgatgaacggcggcgccatcgtgctggccgacgagccgaccggcgcgctggatcatgccagcggcagtcaggtgatggtcgaactcaagcgcctgcatgcgcagggccataccgtgatcctggtgacccatgatgcggcgattgccgcgcacgcttcacgcgtgatcgagatcgcggacggccgggtcgtatccgaccgtggtacgggtgatcctgcggttgcacgcaaggccgtcgcgcccgagcgcagcacggaaccgggcgccgagcgccgcgcgcgcctggatgcgaccagggaagcggcacggatggcggtacgttcgatgctggcccatcgcctgcgcaccttgctgaccatgctgggcatcatcatcggcgtggctgcggtggtgaccgtggtcgcgttgggcaagggcgcacaggcgcaggtcgagtcacagatcaacgaactgggtgccagtacgctggagatcttcccgggtgcggatttcggcgacccgcgctcggccgagatcgaaacgctggtcgtggacgatgccgatcacctggccgcattgagttacgtagacagcgtaagccccaacctgagcagctcggtggccgctctgcagggcaaccggcgcgccaacacacaggtgcttggcgtgggcgctgatctaccccgtgtgcgcgggctgcgcctgaaggcgggccggttcttcaccgatgccgaggtggaggcgcatcgcgcggtggccgtgctcgaccagaaggcggccaaagcactgttcaacggcaatccgatcggcggcacggtactgctgggcggcatgccggtggacgtgatcggggtggtgggtgccagtgcattcgcaggcggcgcgacgcccacggtctacgtgccttacacctcggcggcctcgcgcctgcttggcagccagcggctggagagcatcaccgtacgcgtgcgcgatgacgtaccaacccgtgcagctgaagcctcgctgggcgcagagctgcagcggctgcatgggcgccgcgatttcttcatctacaactcggaccagatccgcaaggcggtgatgaagtccagccagacgatggcggcgctggtctcggcgattgcggcggtggcgctggtggtcggtggcgtgggcgtgatgaacatcatgctggtgtcggtgaaggagcgcgtgcgcgagatcggtgtgcggctggcagtgggggcccggcagggcgacatcctgcgtcagttcctgatcgaggccgtattgatctgcctgttcggtggggtgctgggcgtgttgtccgcgttgggtgtgggagccttgtccagtctgctgtcactgggcgtgccgttccagttcacgcctgggccggtgctcgccgcgctggcatgttcgtcggcaatcgggctcggtttcggctacttcccggcccgcaatgccgcgcagctggacccgatccaggcattggcggcggagtag

SEQ ID NO: 503254 - DNA, 2760 bp, Stenotrophomonas maltophilia
atgagcctgctcaacgcctggttcaatgccttcctgcgcagccgtcgcgcaggcaacctgttccgccgccgcgcgatgcccgaatccggcttcggcccgggcagcgccgaggccgcgccgttcgcgctcaccaccggcctggttaccctcgcccagcaggaggaagccgaactgctgaccacactggagtcgcatgccgatggcctcagcccgcatgaggccgaggaacgactggccacgctcggccccaacgaggtggatcacgaaaagccgctgccgtggtggcggcacctgtggcagtgctaccgcaatccgttcaacctgctgctgaccgtgctggcggcggtgtcctggctgaccgaggacatcaaggccaccgtggtgatcggtgcgatggtattgctgtccacgctgatccgcttcgtgcaggaggggcgttcgaaccgtgcggctgagcggctgaaggcactggtcggcaacaccgcgcgcgtgctgcgccgcaatccgggcaccgaggccgccgatgtggccgaccagtacttcggcgctcacctgcacagccgtcgcccggctcgcctgctggacctgccgatccgtgagctggtgcccggtgaccacatcgtgctgtcggccggtgacatgattccggccgattgccgcgtgctgaccgccaaggacctgttcgtcgcccaggccgcgatgaccggcgaatcgctgccggtagagaagttcgcgcacccgggcgacggcctggccggcctgctggagcagcacaacctgctgttcatgggcaccaatgtggtgtccggcacggccacggctgttgtgctggccaccggcaaccgcagctacttcggcacgctggcgcagcgcagcaccgccaccgaccgtgcgccgaccgcgttccaggccggcgtcaacagtgtcagctggctgctgatccgcttcgcgctggtgatggtcccgttcgtgctgctgatcaacggctggaccaagggcgactggaccgaggcgttcctgttcgcattgtcggtggcggtgggcctgaccccggagatgctgccgatgatcgtcacctccaccctggccaagggcgcggtgctgctgtcgcggcgcaaggtgatcgtcaagcgcctcgatgcgatccagaacttcggcgccatggaagtgctgtgcaccgacaagaccggcaccctcacccaggataggatcgcactggagcgtcacaccgatgtgttcggccacgattcggaagacgtgctgaagttcgcttacctcaacagccacttccagaccgggctgatcaaactcctggatcgcgcggtgctggagcacgtggagctgcagagttcgctgcggctgtcgcaggactaccacaaggtggatgagatcccgttcgatttcgagcgccgccgcatgtcggtggtggtgtccgagcgcgaggaccaccatgagctgatctgcaagggcgcggtggaagagatgctggcggtgtgcagcaccgttcgcgagaacggccaggacatgccactggacgagcaccgcctggcccgcgtgcggcagaccaccgaggaactgaacgagcagggcctgcgcgtggtggcggtggcgatgaaggagaccgcggccagtcagagcgcctactcgcaagcggacgagtgcgggctgaccctggtcggctacgtggccttcctggacccgccgaaggagtccgctgcgcaggcgctgcaggcgctgaccgcacacggtgtcgaggtcaaggtcttcactggcgacaacgaactggtgaccgcccgtgtctgcgcacaggtggggctggacgcggacaccatcctgaccggcccgcagatcgagcgcatggacgacggcgcgctgtcgcgggcgctgcagcaccatcgcgtgtttgcccggctgacgccgctgcacaaggagcgactggtgcgcgagctgcgcgcgcagggcaaggtggtcggcttcctcggtgacggcatcaacgatgcgccggcgctgcgcgcagccgatatcggcatcagcgtggacagtgcggtggacatcgccaaggaggccgccgacatcatcctgctggaaaagaacctgatggtgctggaggaaggtgtcatccagggccggcgcacgttcaacaacatgctgaagtacatccgcatgaccgccagctccaacttcggcaatgtgttctcggtgctggtggcctcggccttcctgccgttcctgccgatgctgccgctgcagctgctggtgcagaatctgctgtacgacatctcgcagatcgccatcccgttcgacaacgtagacgaggagctggtgcgcaagccactgaaatggaacccggccgacatcggccgcttcatggtgttcttcgggccgatcagctcgatcttcgacctgacctgtttcgcgctgatgtggtacgtgttcgatgcacgcacgccggccgaccaaggcctgttccagtccggctggttcgtggtcggactgctgacccagaccctgattgtgcacatgatccgtacgccgaaggtgccgttcctgcagagcatcgccgcgccgccactgctgctgatgaccggcctgatcatggccatcggcgtggccctgccgatgagcccgctggccggctacttcaagctgcaggcgctgccggccggctactggccgttcctggtggcgatcctgttcggctatgcggtgctgaccaccgcgctgaagcggttctacatccgtcgttacggctggcagtaa

SEQ ID NO: 503255 - DNA, 12384 bp, Stenotrophomonas maltophilia
atgtcgcacccgctcccgtccgctgttcgtccggccgcgccgatgcgccgcaatcatccgatggcgtgggccatcgcggtcgccctgggcagcatggtggccccggccagccaggcgcagcaggcgttcagcccgggctggttcgccgagcggggcgcggcccagggcagcgcggcacagagtggccggatgcccaacggtgtgccgatccagttccagttgcctgcccagcagcaggatgcagcacggcagaagctgcagcagtcgatcgacaacctcggtacggcggcgcaggcgattgccctgcagcagcgcctgcaggaacaggcgcggcaggcgcgccgcgaggctggcttcatcgttgccgatggcctgggcaaggatggcctgagcgtcgaccagaacccgctgacccgcggctggctcaatgcgcgcgacgcgatccagtcgcagggcagcgacgggcgggtgcaggttacggtcgagcagaccgcggacaaggcgatcctgaactgggagaccttcaatatcggcggcaacaccacgctgaacttcctgcagaaccctgactgggcagtcctgaaccgcgtcaatgatccgcaggcgcggcccagccagatcctgggccagctgaaggccaatggcacggtgttcgtggccaaccgcaacggggtggtgttcggcaacaacagccaggtcaatgtacgcaatctgctggcggctgcagcacggatcagcgatgcgcagttccgtgacaacggcctgtacagccccgacgccagcagcagcgcgctcagcgatgcatttggcaaggtgatggtggagcagggtgcccgcatcgcgacccatgagccgaccagcgcgacgcgcggcggtggctacgtgctgctggccgggcacagcgtggagaatgctggccatatcgaggcgcgcaagggccaggtgcagctcgctgccggtgacagtttcgtgatccggcgcggcgtgggtacggcgaccaataccagctccaccacccgcggcaatgaaatcgcgccgcgcttcgtcgctggcagcacggcgggcagcgtgcgcaacaccggtctgctgcgcgcccgcgagggtgacgtgaccctggccgggcgcaacgtcgagcaggccggtgtggccgtggccagcaccacgctggcgcagcgcggcaccgtgcatcttctggcttcggccagtgatgccggcagcagcgtcacgcttgccgatggagccaccacggcggtgttggtcgaggacgatggcaaggccacggtgctggatacgcagcgcaacagcctcatcaaggagtcggcagagcaggacgcgatccgcgccggcgcgcgctcggcaaccttcgacaatctgtcccagcacaatgatcgccgggaccagtcgcgggtggagatcgtctcgggtggcaacatccatttcagtgcggattcgctgacggttgccacgggcggccagatcatcgccgacgcggcagcccgcagctacgtagacgacgcggcacgcgtggatgtttccggcgcagtgggcgtacaggtgtcgatggaaagcaacaatgtccaggtcaaggtgcagggcaacgaactgcgcgatgccctggacaaccgcgacagcggcaagctgaccagcagcgaggtctgggtcgaccgccgcaggctggtccacgttccggccggtaccgggggctatgcgggtgagcgctggtacgcggcgggtggcctgctggaagtgggcggctaccttgacaaccaggggcactcgatcggcgaatgggccgcgcagggaggcaccgtcctgctgggcggcagggaagtgatcacgcatggcggctcacgcatcaaccttgccggtggcagcctggatgtgcagagcggcgtgatccggcagagctgggtgcgcggcgtcgatggccaggtctaccgccttgatgacgcgccggcggagatgctcttcgatggcctgtacagcggccatgaagtaaagcaggagcgctggggcatcaccgagaccttccgtgatccgattgtattcgcggcgcagcgtgtcgataacggatacacggtcggccgcgatgcaggacgcctgatcatctccgcaccgaccgcggtgctggatggaaaggttgagacggctaccttccagggcgcgcagcagaaccgcaggccggataccgcgctggagggttatgcgcaggcgcagacggcggtcgcgcgcaatgcgcagctgtacctggggcgctacgacggccagggccgcagcggtgtgttcggctcggatgtgcgcctggatgacaaggctcggacgaaggccgcgtggtcgctgctggccccggtcaacgaagagcggcgtggcaccgtgtggctggataccgcagagctgagtgcccagcagtggggacggatcgacctggcgaccgctgatcgcatccgcatcgacggcagccttcggcttcaggcaggcggacagctcaacctgacgggcagcgaggtggaactggcaggcgacatcggcatcgccggcggccagctgtcggcgggcaacctgctggatgtgcagggccggccgacggcgctgctgcatgatggccgcgcgcgcaccgccatcgccgacggcacgcggatcgatctctccggtgaatggagcaatgcgtcactggcgacgccgcgcgacgcgagcggtgcctggacggatggcggccgcctgagcctgggcaatagtcatgacgtggccgtgggcgccgacgcaacggttgacgtcgaggccggtgctgcgctggacctgcgcggcaaggcccatatcggcaaaggcggcagcgtcagcctgcaggcgaacagcagtacggtgacgaccgacggcagtggccgggtgcaactgggcgacggaagccggttcagtggtcgaggacaggggggtggttccttctcgctggggaccggtggccaggtgcggctgggcgatgcggacctggcgggcacatcgctgcgactggaccccggcctgttcggcagtggcttcgcgcagtacgacatcaatggccaccagggtgtggaggtggccgatggcgcgcggctggtcgctgccctgccaggcctgcgcctgacccaggacgcgcggatggcgaccgaccgggcgtccgcactggcagcgtgggacgcgccactgtacagcgctgatccgtcgagcgggcgcgtcagccagcgcgcgggtgcgagcatcagcctgcgttcggagcgcaacagcgtgggcggtgaccttcgggttggcaaggatgcactggtggcggtcgatccagggcagacgatctcgctgctcggtgcaggcaacatcgatgttgaaggcacgctgcgcgcgaagggcggccgcatcctgatcgacgatgtgcgcccggaaaacgcgctgtacgccgggcagcgcaccgaacgcacctggcgtttcgccgaaggcgcgctgctggatgccgatgcagacgcgatgtcgctgcccgattccagcggccgcctgcgcgggcaggtgcgcgcaggtgggcgcatcgagattggcggggcgctggactgggagaccaccgcattcgtcgacaaccgaccaccggaagccttcgtggtggtcgaacgcggtgcgcgcctgcaggcgcgcggcgcgtcggccgaactggacatcgatggccagggccgcgtgcgcgtggacagcgacggcgggcagatcgtgctgcgttcagccaacgcgctgtacctggagggcgggatggacgcggccgccggtggtgccggcgcacgcggcggcacgcttggcctggcctttggcgggagcatccatgcacgtggcgccagcgacgaggtactgcgagcgcgtgcgatcagcctcagccagcacagcgcaccggcgcagccactgccggccgcattggaatatggccacgccgcgttgtcggtcgagcagctgcaggccggcggtttcgacaacctgtccgtgttcggtgacatccgcgcggtcggcgacgtcgacctgcgcctggcccagagcctgcgcatccacggccagggcacttcgagcctgggcatggccgtggatgccgggctatcgtctgggctgcgactgagtgcgccctatgttcgcctggcgcaggcacgctggcgccagatgccgggcgagaacctgcagggcaccgccgcggtcgcttcgtccgggccggaagatcacgcgctggcggtgcaggccgagctgatcgacatccgcgacgtcacctggctgccgggtttcaagcatgtggcgctggaaagccgcagtgacgtgcgcctgaccaacggcattgccagcagtggcaacaccagcgcgttgatgacggctggttcgatggacgtgaccgctgcgcgcctgtaccccaccacaggcgcggtcggcacgctggtggccggcgcgtcggcgcagaccgtgcagaccgctgattactgggccgatccggatgccgtgctgcgcatccacggcaccggtgcggccacgaagccggcgccggaatcggcgctgggtacgcttcgcctggtggctgccacggtgcagcagggcggcaacgtacaggcgccgatgggcacgctgcagctgggtggccttatccagaacggaaccgtcggcagccgggtggaactgctgccaggcagcgtcacctcgaccagtggcgccggcttgtcgctgccctatggtggcaccgtcgatggtgtcgactggcgggtcggtacgcgcagcctgggttcgctgacgccggccggcatctcctcgatgggggtgaccctgaaggcgaatgagatcgaggtggcgccgggggctctgctggacatgtccggcggtggtgagttgaccggtgccgcctttgtgtcaggacgcggtggctctgtcgacgtgctgcgaacggcgttggccgacgccaatccgcgctatgaattcagtgcgtcgggcaacccggtgtatgcgatcgtgccgggacgcgccgggacatttgcccccagcggcgaggaaggattcgccgcaccggccgtgggccagcagatcaccgtgccggcgggcgtgcccggcctggcggcaggcacctacacgctgatgccggccagctatgcgctgcagcccggtgcattccgggttgagctgggcgccaccggcacctcgggcatcgcgcaacccatcgcgaccggtaccggcacctggcgtgtgtccgggcagcagcgcacggcgctgggcgcggcaatctcgccgttgctcaccgacatcctgctgacccccgccgcagtagtacgccggcactcgggctacaacgaaacctcctacaacagcttcgcgcaatcggtggccgaccgccgcggcgagtcgcgtggctggcagaccatcgatgcgctcgggttgacccttgcgttgggcgaaggcgcaggtcgtgcagacacgcctgccatccgcttcgccggcaccgcgcggttcggcgccgccaccgacaacgggcgaggcggcacgctgacagccacgttggccagcccggcggtcggttcactggagatcgtcgacggcggtgcgcaatcgcaggcgcgtgatcgcggtgccaccttcagcgacgacgcgctcaatgccttcctgccggcgcggatgatgatcggcgggcagttcaaccaggaggcctcgcaggtggcggtgaccggccaggcgcgcagcgtggcgatccgttccggcgtcaccttgaacgcaccggaagtgctggtggcagcggcctccggtggcagcggcgtgctggtcgaggccggtgcgaccctcgatacactgtcgttcgcatccgccaacgcgaatgccagcgcgaccctgccttaccaggtctccggcggcctgctggcggtgtccaaccagcgcctgaacctgatcaccggcaccaccggggtggaggccggtccagtggcgatcgacatcggggggtgccagacggcgtgcgacggccagacccggctggtttccgatggcagcatcgcggtagcgaccgatggcgcgctgcagatgcgcgactcggccagctatggcacccgtcagctcggcctgagcatggcggcgctgaacctcggcagtgccgaagcgatcgccctggccgctgcggcaggggcgctgcccagtggcatgaccatgaaccagtccgtgctgcagcaactgctgcgcggcaatgatgccaccggcgcgccggcgctggacacgctgagcctggtcgcgcgggactctgtcaacgtgttcggcagcgtcgacctggacgcgcgcgacagtgccaccggccgcagtggcctgcagacgctcgtgcttggtgcgcaggccatccgcggctacggtgctgcgactgaccgggcgcgcatcctggtggacacgctggtctgggacggctcattggcggcgagccaagcgccgggcagtgacgcgtcggtgccgccggccgatccgatggtggaccggctcggcgccgggcagctggacatctttacccgccagctgcagctggggcgggcgccattcagccgtcccagttctgaagtacctgcgaaccggcaggtgctcggattcagtgcgctgaacctgagtgcttcggagcagctgtcgttctccgcgcagggcacgctggacgtgttccagcagcgcggcgactatctggccgacaagggctggcagtacagcggaggcagcctgggtatcgatacaccgctgttgacggccgatcccgccgcgcggctgcgcgtgcgcaccggcggcgacttccgcctgcaggggggcaccggcaaggcgggtggcgatgcactgggcagtgagctgagcatcgacgccaaccggatcacgctggacagcacgatcgcgctggcgtccggacggctgtcggcgaacgcacgccagggcatcacgcttggcagccgggccgcgttggatctggccggacgcaaggtctcgctgtacgacgtggacaagttcagctggggcggcgatgtcctgctgtccagcgacacgggtgacatccacgccgatgcggcctcccgcatcgatgtttccgcccgcaacaaccgaggcggacgcctgacggtcaccgcaatggccggccgagccgatctggccggtgttctgcagggtgccgccactggtcgctacgatgccggtggcacgctggtgccctacgacggtggcgaactggcggtgcgggcacgccagctgcaggacttcgccggcctcaaccagcgattgaccgccggcggcgtcgtcggcggtcgcagcttccagatcggtgagggcgatctgcggatcggcgacgaagtgaaggcgcgccgggtcgatatcagcgtcgatgcgggcagcctgaccgtggccggccgcatcgatgccagcggcgagcaggtcggcagcatccgcctgtacgcccgcgatcagttgcaggtggacggcacgctggacgcgcacggtaccggcctgcgcgtggacagccatggcaagatcatcgacagtccaaaccgggccaccatcacgctgggcagcgccgaaggtgccgtcggcctgggcagcgcggcgcagctggacctgcgtgcgggcagcgatgttaccgtcggtggacgtcctggccagaacgatggcaccccgcgcggcacgctgaagatcgatgtgccgcggctgggcagcaacgacgcggcgattgccgcggccaccggcctgcgcatcgatggcgcggccgacatccagctcaatggtgttcgccgctacgacgatgcgcccctggcagccaccgctgacgtgcgcggcaaccgcgcgcagctggtcacccagcagtggctggaccaggtggtcgatccgcacagcgtggcctggatcgatgctgcgctggacaacgcggatctgcagcagcgcacgcgggcgctgggcgatgtccgccttcgtcccggcgtgcaggtgctggcgcggcgcagcgacgccaacccggacggcgacctgaccattgccggcgacatcgatctgtccggctaccgctacgggcccgaagccaaccgcgccgatccatcgcggcgtggcttcggcgaatcggcctcgctggtgctgcgggccgaaggcaacatcaacgtctacggcagcatcaacgatgggttcgcaccgccgccgtccacgccggatgagggtggctggcagctgtatgagggtcgcaatggcagcgcggggcaaaccccctttggcggcggcctggtggtgccggtggacggagtgaagctgcagcccggcaccgagttccaggccggcacccgcctgaactatgacgtgccggtcgaatcggtaacgcttccggtcggtaccgtgctgcccgcgccgatggtgatctcgcagaacctgcgcctgccagcgggcacggtgctgggtgcggcggtgaccaccgactccgggcagacgctggcggcgggcaccgtgctgcagcagccgctggtgttggcggccggtgcgcgcctgggggccggcttccgcctgcgcagtgccgtacagatggcggcacaggaatggcccgccggcgcgacgctgccggttgcgttgcgcctggcacgggaagtcgagctcaaggtgggcgcgtacatcccatcgttgaccaaggtggagttgcccggcaacgggccggtgaatctccggccggccgatgccggcggcaaccaggggcgcaactgggcgctggcgccgatgctggccgagggcaccacctcctgggacctgaccgtggttgccggtgccgataccggggcagccgacccacgcagccggcgctggggcagtgaaggcagcgtggtgctggccgacacccaccagggctcgatcggtacggtcaagaccgaaatcatctgggtgggtgatcgtgcgttgactgagcgggcatcgctggactggatcggtgacacctcctatgcaggccgtccgatcgcggagctggccgacatgttcggcttcaccgaagacgagttctgcgcgatgtcggccgactactgcggcccggccccccgccaggtggccgcgcagggctcgctggattactggggcgacgagtcctacgtaggcacccctgcgaaggacttcgccgcgatgttcggcatgaccgaagacgagttctgcagcaccgcgcccacctactgcgccggcggcggcacgcagaccgaagtgaccacctacggcaagcgcgcaggcacgccggcgtggagcgtgctgcgcaccggcaagggggacctcgaactgctcgctgccggtgatgtcgtgatgaagtccggcttcggtgtgtacacggcgggcgctcccaccacgctgggcgagggccgcgacgctgccttcaattcgccccgtgcagcagcccccaggaacaccgcactgctggggccgaacctggtgccgggcagctatgatgctgcgttggccggctaccgggcctggtatcccgatcatggtggcaacctgcgcgtcgaagccgggcgcgatatcgtcggtgacgtctggaccgcgcgcgcagagtcgggcaccagcgagcgtgactgggcgctgtactccagtgccgcggtcggcaattggctgtggcggcagggaaccggcagcaccaccggtgtggagccggtgccgaccagctggtgggtgaactttggcgcctacaccaacgtgtccgctgctgctggcgcctctccgcggatggtcggcttcaccggcttcggtacattgggcggcggcaacttgacgctggaggccgggcgtgacgccggcgtgcgcgatgcgataggtgacgcgctggactcgacgatcgcaccgcgctcgggtgcgatcatcgcggcggtgggatcgaccggccgggtcagcgatggccagctgcacctgaccggcggcggcgacctgcaactgcgtatcggtggcgcactgaatcccaatctgcgggcgacgttctccagcctcaatgcctccagggcgggacagaatctcgacctcaacggtaccttcagcaatctgcgtggcagcctgcagctggatgcgggacgcatcggtgcaatgggcgtcaccctggaaagctacgcgacgctgggccagctgcgtgcggccgatctgttcgccgccgacgccgctcgcccgatgggcgggccggtgctggtgctgggcgatgcggtcgcgcagctgcaggcgcggggcgatgtggtgctcggcggcgtcgccgatgccggccgggttccgctggccaactacagcgcggtgctgcaggatgatggcgcgcgcgctgcaggcagtacgtggttctccctgtggaccgccaacacggccgtggatctgttcagtgccggtggtgacctcgcgccaggcctcgccgggccggaaaacgtgacgggcagcaatctgtggcgcgagcaggtccagcttgttgtgcgtggcggtgatgatctgctgaattactggctctatccttcgcgcttcagcgcgattgctgcgcagggtgacatcaagctggaccggatcagcactacgccggggacgcaggatgtgatcctgctggcaccctcggcgacaggacggctggacgtcctggccggtggcggcatcttcgcccagcctggcgcgacccagatcgcgcgctcggccagtgacgcgcgcctgccgggacccttcgacccggcattcatggccgagcagggggattccgcaggcaatgtgacccgcacgcggcacaacctgtcggtcgacggcaacattgcatcgccggacgcgtcgcttccgctgtttgcgttcggtccgaatactccgctgtcctccgtgtctgcggccctggcgccgagccgtttctacgcggtgcagggcgacattatcggcctggccaccggcgcccggcgcacgctgaatcccaacgcggggcagcgcacgcagttgaactggttcgaggccgccggcgccgtgcaactgcgggcaggccgggacatcctcggggtgtcgatgaccgcgttgaacaccgcgcccaccgacatcacggtggcggcggcaggccgcgacatcgtgcatctgaacgcgaccatcgctggccccggcaacaccgagatcagtgccggccgccagctgcgccaggaggatgcgggcagcatcgtcagcctcggtggcatcgtgcagggcgacacccgtcccggcgccagcatcgcgctgacggccggcaaccagcagatcgacttcgcggccctgcgtgcccgttatctggacccagtcaaccttgccgatcccgcgcaatcgcttgcatcgcagccgggcaaggcagtcaaggtctacaaccaggagctgaagcagtggctgcagcagcgcttcggcgtggccgccgatggcgacgcggcgctggctgcgttcgatgcgttgccgcaggaacagcagcgcatcttcctgcgccagatctactacgccgagctgcgtgaaggtggccgcgagtacaccgatgccgaaggcccgcgcttcggttcgtacctccgtgggcgcgaggcgatcgccacgctgatgccggacaggaatgctgccggaacggccatcgaccgcaccggcgacatcgtgatgtacggcggctccggcgtgcgtaccgaagccggcggcaacatcgagctgatggcgccgggcgggcagatcgtggtgggtgtgcagggtgtggtgccgccggccagtgccggccttgtcacccaggggcagggcgatatccgcctgttcagccaggacagcgtgctgctgggcctgtcgcgggtgatgaccacgttcggcggcgacatcctggcgtggtcggagcagggtgacatcaatgccggtcgcggttcgcagacgacgctgctgtacacgccaccgcgtcgcgtctatgacggctggggcaatgtgatcctgtcgccgcaggctcccgccagtggcgccggcatcgcgaccttgaaccccatcgccgaagtacgaccgggcgacgtcgacctgatcgcaccgcttggcaccatcgacgcgggcgaggccggtatccgcgtctcgggcaacatcaacctggcggcgctgcaggtgctcaatgccgccaacatccaggtacagggcgagagcaagggcctgccggtgctggcatcggtgaacgtcaatgcgctggcctcggccagtgcggcagccaacagcgccagccaggcggcacaggatgtgatgcgcaagagccaggacgaggcacggcgcaaccagccgtcggtgatcagcgtgcagatcctcggcttcggcagtggcaccagcgccatcaatccgccggcgcgtggcaacactgccaacagcggctatgacgccaacagtgccttccagttcccgcaggcaagtcgcgacgagggcacgcagcgccggtag

SEQ ID NO: 503256 - DNA, 147 bp, Stenotrophomonas maltophilia
atggattggacccaagacgatggcggcagcccccactccgggcactacagcgccagtgcggcggcgctggtggcaagtggcaagtggcaagtggaaatccaccatgcagacgcgcttgtcacattcctcaatatgaccatgctctga

SEQ ID NO: 503257 - DNA, 819 bp, Stenotrophomonas maltophilia
atgaagatcaagtatcgatttgctttcacttggagtgaggcacgtgctttgcagctccgtgctctaggcttgaaggttcagcccccggctgatcctcgtcctgaagtcggtggcattgctgtgagctttgctttggaaggtgcgccagggtggagtgaagcttgtagcttgattcgctcgtggaatggtgcaacttctgtgactacggagtttactgctgcggagatttcggaagccgcacactgcgcgcttcaggttgtccacgccagcggctacccgcagccagaaagagattttctgtatcttgagcaggtatacgacctgagcgcgcgatgcccaaaatgtggcgaaggcgcagttcaggtggcgccgttccggatcaagaagacgttgaaatgggggcggaatgcctttctgaagctgaattgggtagaggaagcttgcttcatgcagacttccgtttggtcagaacatcttcgccccctgggtatcggagtgcttccggttgaggacaccagaggaagcctcttggatgaggttgttcaactcgatcttgggcctgtggttccgctgtgtatgggtgagctggagggagttcgttgcgagaaatgcggcagagaacgctaccaatggcatgaccgcggctttttcccgtcaatcaagaaccctccagatgtgccgatcttccgtagttcgcagcgtttcggggtcgagcatcagtcggcgaacgcaatgattgtgagtgcgacagtagcgaacgccatcagagctgcaggattgagaggtgtcgagctctggccttgtgcgccggcaggatag

SEQ ID NO: 503258 - DNA, 4008 bp, Stenotrophomonas maltophilia
atgtacgctgaaaaactgcgcatggccgcggcggtgctgctgggcttcgtgctcatgttcatctgccaggtggcccatgcccaagcatggattgaactcaccgggccggctcagacatcctacacggcgcctgcaacctatcagttgcagctcaagagtggcgtcagaggcaccggccccaaggccgagtacctgtcggacatacagctcatgcgtaatggccaggtgatctcgcggcttccgagcgggacgtacaccgagaacggcatctcgcctggaagctatcagtacgtctacagagctcttgccgtacgcaatgtcaatggtgatgagttcacgcgagagctgacgtcgcctgtcatcacgatcacggtggccgcaccaccggccccctttgacggtgcggagtatgtttccgcgagctggccgaggtcagccgacaggggcacgccgttcagcggtactgtcacgttccggaacaccggaaacacgacgtggagagcgggagacggctaccgcttgggtcaagccgaacgctatgtctccagtgctgcgagactgggtattgccgacgtcgccgttccccatgacgtgggccccggcgggacggttacctttaccttcaacggcgcggcagccaatgagaatggaccgagcaccctccagtggcagatgaaccgcaatggtgttcgctttggtagcaccagcagcgagcagacctttgagacgaccggaaggctcaatcgcggcgtcatgtatgagcaggaggtcccgaccagcatggaggccgggcggacctatcgcgtcaagctgaaattcgtcaatacgggcaataccacgtggtcggcgtctgcgggctatgcactgggctcctggaatcccaatgacaatgtccggtggggcagggcgcgggtcccaatgccgaatgacgtcagtccacagctgcctgcgttctttgaattcgatgtggtagccccttcattgccgggtgtctacagcttccaatggcgattgctggaagagggcaaagagtggtttggtcgggaaagtgacaatgtccaggtcaccgtcaacgggccgccgtccaaggtaatcggcaatatcgatggcgtcaccagcgacggtcagatccgaggatgggcgtgttcgacgggcattgattcgtcgatcgacattcatgtctacaccggtggagccgccggcagtggcgggacgatcttcctgaccggtaaggccgacttggcgagtgagccggccgtagctacgtcctgcaaggccggaggcaatcatcgcttctcgcttccaatgagcaacgagcagcgccgccagcgggctggacaaccgatctatgtccatggaatttcccccgttgggcaacccaacaacaccattggcggttccggtgcgttcgtcgttcccgcagcgcccagtggcactctgtctgtgtcccctgcgatgtgccagattgcagctggtgcgcagacctgcaacgtcaccctgacctggtcggccacggactcccgtgcagaactcaagcgtgatggcggttctgtggtcggcagcggagcgagcggttccatcgtggtgccgattggcgccggcacgaatcgattcacgctttcggttgcgggtgatgcgattgcccaggcggcggccactgccaaagccgctcctaccttgccagtcaatccagacaatccggccccgaccgtggcccggcgatacgtctacgacgacaaccttcggttgtgcaaggtcatcgagccagaaaccggggcgaccgtgtttggctacgatgcggccggcaatcttgcctggagtgcgagcgggctggagttgcccagcctgaccgaatgcaaccgtgaggcgccgcagattgcagcgcgccgcgtttcacgcaactacgatgccagcaatcgcctgcagacggtggtctatcccgatggtctgggtgatcagcagcttgagtacacacctacgggccagctgaagactgagagggtcttcaatcaggaccgtgtgccagtggtgaccacccgtacctacaactctctcgggtcggtggtcagtcagagccgtgtcataggcagcgcgagcgcccgaacgctggcatttggctatgaccacatgggtcagcatgttcgtacggactaccccgatggctactccgtccagcaatccttgaatgctctgggccagcccgtgcggctacaggatggcactggcgccgtactcgccagcaacatcgcctacttccccagtggtgaaaccgccgcgctgacctacggcaatggcatcgtacgtggcgtaaccgagaatgcgcgacagttgaccagccgcatcgttgacagtggcatggtcgatctgaactacagctatgacgcgacgggaaacatcagccagatcagcgatgccgtacgcggcgactcctggaagatcagcttgggctacgatcgccttgatcgattgattcaggcccgcgcgccggcatttggtgggaatgggcagtacacgttcggctatgacacgttggacaacatcgtctcgatgcgattgccagggaagcgggagcgcacgttccattacgacacccgcaatcgcctggaactgctgcgggaccccagcggtaacggcgtctctggcttctcctacgacgcggcaggcaatctggcggtgcgtaacggccagacgttcacctacgacatgggtggccagctccgttccgccggagatgtgcagaaatacttctacgacggagccggactgcgtgcttacgcaacagcatcaacgtcggcaccgacatcagaaaattcacccatcttgggcaaggcgcccatcacgggtagccacaactgggatgtatccattccagagcgcggtggcggtgaacttggtttcttggcgagtgatctggatcgctcctggcagtatctcgtgggtggggagctgatcgaatccacccaaggtggggaaacgtccgactacatctacctcggcaagagactgctggctattcgcaccagctctgccacgggggcaacgctcacctatcttcatcacgatgcactcaatacgcttgtggcaacgagcagggctaatggagaggtgctgacgcgtcacttctggtcaccgtatggcgaggcagacgcggcgcctgctgcgaagattccaggctactcaggccatcttgcagaccccgacacgggactggtctacatggggcggcgctactacgacccacaactggcgaggttcatttctcccgatccgttagctgctagcacctccggagggccaaatttcaatcgctatcggtacgccagcaacaacccattccgattctctgatcccacgggcgcgtgtgaccaggcaaccgggtcacatatgtgcaatggcagctggttcgccggggcaaacctgaccggtgcgccgtcgccgacacctggcggagtgccacagcacgatcccaacgcccccgcgcctgcggagatcgtcaaggctacaggcctgggcgccattgaggagtatttttctgaacggaatttcttcatcggacaggggagcttgaccgatttcgatgccgtgtcggaggcgatcgtcgttccgttgatgaactctccaacgggatcaacggctgctggtggcctcaagctcgcctccatcatggtagtgctgcgtgggggcaatgcagcgagaggctttgggaatctctcgcgtgcgggtgagtttggcattgcatcctacaactctctgaagagaatggtgggtacagggtctgggttacaagttcaccatcttattgagaagcggtttgcaggtgttatgcaagtgaaggagggtgaaatgctttcggttgtggtgactagaacggagcatcaggtctttaccaaccagtggcgatcgatgtttccgtatggcaggccgccaccgagccaagcccagataatggacgccgcaaggtcaatttatgccaatcatcccgccatccttaaatctttgggactctga

SEQ ID NO: 503259 - DNA, 2649 bp, Stenotrophomonas maltophilia
atgatttctgccaaggacaggcggggggaaaatgctccctgcagtgtttatccgggctcgccgctttgctcgctcatcgtgggcttggcacttacgctgggagccgggttccacgtctcagcccaggatggactcttcaactatcaagagtatgagaagagggtaaaaagcgcgcagtcgcttgccgccatatccgcagatgaggtattcggggatcgaacctccggcttcgacggcagcaccgagttccttgttgaagacgtgtccatacctggcaatttcgaccttccggtcagcatcgcccgccgctttggagttgaggccgtcaaccgaggatctcgctatagcgaggccaaagggctgacgctgtttgacgattgggaaatcgtcgttccccacatgtcgggcgtatggaccaagggggctggatggattacgggcgatccaggggcgcagaccacacagcgttgttcggtcaataaggcgccctacctattggagacctggggctataccaatatcggcttcggcattgacgtgaagtggcaaggcggaaatggcgaggagcttctgattgccgatgatccgtcccatgccacggcaccaggcttggaggcgcccaagtggatgacggcttcgagagcacggttcacctgtttggctgcaacacgaaacggatatccgggcgaggcgtttattgggcacaccccggatgggaagaagtacttcttcgactggggtgtggaaagaccctatgcaacagctcagttcagtgatggcgctgccaatcgctcagtggggcgtaagcgggtctatcttctggcgtcgcgtgtggaggaccgctatgggaattgggtgtcctatagttacaacggagacaaacttactaaaattgagtccagcgacggtcgccggattgacctgagctatgacggcgacggtcgggtgaccagtgtgcaagccaatgggcgcatatggcggtattcgtatgttggcgacacggacgggaacgacggcggcttgtcccaggtcacgcttccggatggctcggcgtgggcttacagtcatcgcggacgcctccagtccagtttccctatccgtaaagccgacgatgagggcgggtgcgaaatacgggccggtactgagccccctcctacgcagatgacggtggtcgccccctcgggtgcccgaggcatattcgactttgaaatggagttgttcattcgctccgatccttgcaatggactgacaccctcgcactaccaagcctggtctttgaagaagcgcaccatcaccgggcccggactgtctccgatggtcactgcgcgaagctacaacctgcagttgccgggaagcggccgctggtccagcctgaccaagccgaatggaacgcagattcgcgagcgctacggtgccaatccagctctgaacgagcgaaagctcatgcaaaagcaggttctggacgcagctggccaagtgcagcgtgacgagctctacacctatacgttcggttccgagagcggtccgttcaggacgcgggtcgggcattctatcggggtccaagcgggtcagttcctggcgggcatgctgagcgctctcagtgaaagcacattctctcaagatggcgatacctaccgcgtggtctacagcgatttcgatcgcaaggcccgtcctgcacgcgtgagctataccggtccttctggtaccaaggctgagatacgagagcatctggatacggccagcccttgggtcttggatcaggtgctgagtgtcaaggaggctgcgtcgggaaagatcaccacacagtatgcctatgacggtatggccaagccgaatgccgtctatcgggccggggctttgctgcagagtgttacttatgcggcggatggcacgatcagtgcagtgcgcgacggaaaggggaacgaaacgcagatccaggactggtatcgcggcgtgccgcgattggtcatcaatcccgatggcaccaccaatcgcatgtcggcagatggaaacgggtggatcacttccaccacggacgcgctacaaaggactacttcctatctgcacgatccgatgggtcgcgtgcgcgaagtccaaccgccggtcgatgagaaccagtgggccaagactaccatctcattccgtcaggtcgcggccgatgagtacggcctttcgccggggcactggcgagtcgataacgcccaaggggcacggcgtcaggaaacctatctcgacgcgctctggcagccgctcctggtgcgcgaatacgatgcaaacaacgtcgccggcacgcagcggtgggtcaggaacgcttacgacagcgaaggtcgcctgacgttcacctcttatccttcaagcgatagcacggtggcgaccggtacctggaccgagtacgacgcgctggggcggaagacctcttcgtcccaggacagcgagcagggcctgctgattacaaccattggctacagcagcaatgccaccaccacagtcgtggatccactcggccatcagaccatcacccgattcgatgcgtttgaaggcccggactacgggaagcctgcgcagatcattcgtgccgatggcagcaaagtcagcatcaaacgaaatgcttttggccttaccaccgaagtagcccagtccgccaactaa

SEQ ID NO: 503260 - DNA, 666 bp, Stenotrophomonas maltophilia
atgagccatgacagattcgaagaagccctttccctggagcgctttggccgctacctggattgggcggggggcgaccgtagccgagccatcgccctgtatggatgcaatacccacttgtctgaaagcctctacgcaccactgcagacgttggaagtggcactgcgaaaccgcatccacaccgttctgacccaggccaagggcgaggcgtggtacggccgaggcgctggcgccctgaaggttgctcatcaactcgagcaggtcgccaaagccgtcaacgaattggtcagagcgggaaagacggtaacagcaggcggtgtggtcgccagtctcaccttcagtttctggacaacaatgttcaacaaggactacgaggccctttggcagcagatccttcaccggattgcggaccccagtgcgcccaggggactgaagaggaggagcttttcgggaccgctgactcgcatacgcgtgctacgcaaccgcatcgcccatcacgaaccgatcctcggctggaacctgcgcgggcaccacgatgagattctgacgctgatcgaatggctatcgccgcccgccgcgacatggtgtcgtgagaacaaccgctttccgcaggcatacccggaagacggaatcaccttggtatgttcgcccgagtcgaatagacgctga

SEQ ID NO: 503261 - DNA, 2976 bp, Stenotrophomonas maltophilia
atgttgcccgcccgccaccaccgccccccctgtcgttcgatcgctccgctgtcgctggccatcgccggcgtgctgctgtcggtcgccgttcctgccttcgcccaggagagcaaggacaaggccaccgacctggcccgcatcgaggtcaccggttccaacatccgccgcaccgacgtggaaaccgcctcgccggtgcaggtgatcagcaagcaggacatccagaacatgggtgcgcgcacgctgctgcaggtgctcgacaatctgccggccgcccgcccggcgcagcaggacgcgcgttcgctgttcaccggttccgatggtgcctcgcaggccaatctgcgtggcctcggtgcccagggcacgctggtgctgctgaacggtcgccgcctgtcgtactacggtgcaccggccggcttccagacccagttcgtcaacatcgatgcgattccggccgcggccatcgagcgcatggaagtgctgaccgacggcgcctcggcggtgtacggcaccgacgcggtggccggcgtgatcaacgtgatcaccaagcgcaacttccagggggcggaggtcagcttcaccaacgacacctcttcgcgcatcgactcctacggcgaacgccaggccagcatcaccgccggcttcggtgacttggccgagaaccgcttcaacatctacggcgcggtgaacatgtaccgccgcgacgcgatcccgctgagcgatttctacgacaagcggcccgaccagtactacgtcaacaatccgaactacctcaacaacctgcgcctgggcgtgggcagcaagccgggtgaattcaatccgggcacttacttcgccttcgatccggtcaccggccgccgcgtgcaggaagctgcgccgggttgcaggaacgtgctgaccagtgaagcggccggtccgcgttgcgtctgggaaacctggatgaacaacgagatcgacgccggtgccaagtccgagcgcaacaccgcctacctcaacggcaccttcctggtcggtgacagcaccgagatcttcgccgaggcgacctacaccgacatcgacctgcgcgccaacggcggcacgccgcgcacctacggcaccaccaccggcaacccgaccagctggttctcgcgcaataccggcaacaccgtcaaccagttcctgtacccgttcctgggcccgaacaacgaatacaaccacgccagcccgcagatgaaggcgatgatgggcggtgtggtcggcctgaactacctgctgcaggatgccggcccgaactatttcggccagcgcaataccgacaagagctaccgcgtgctggtcggtgcgcgtggcaaccggggcgactggaactgggaaaccgcgttcgccagcgccggcacccactccaccacctaccagacgatcaacgtcaacaccaagggcttcgaaaaggccttcggcccgtacacgatcgatccgggcaccggccgcgtgatcatctccgaccatccggcgtacaagttcggcgagatcagcgaagccaacgccgcgctgatccgtgaagcgttcccgaccttcgacatccagtcgtggacccgcctgcacaccctcgacggcaagatcgaaggcccgctgttccagctgccggccggtgagatgcgggcggcattcggcttcaacgccagccgcgaaaccttctacactccgggcaacgtcgacgccgccaacggtctgatcacccagcagggcggttcctggttcgacggcaagcgcaacacctacgcgctgttcgccgaaaccgtggcgccgatcaccgacaagctggaactggatgcggcggtgcgcgtggacaagtacccgaacttcagcgccaacgtggcaccgaagatcggcttcaagtaccaggcgttcgaccagctgatgctgcgcggtacctactccaccggcttccgtgcaccgagcctggccgagtccggcaatggcggcgtgttcgcccagctgggcggcttccgcgacgagctgcgctgcaacgagaccaacgccatcgccaacctgttgctgaagtcgcagcggccgggtgatgtcgacctcggcaagaacatgctgaacgtcgactgcagccgcaccgtggcccgcatgacccagccgaacaaggacctgaagccggagaaggcgaagatcgccaccctcggcttcgtctacgagccggcgagctggctgtcggtgtcggccgactactggttcatctaccgcaacaacgaaatcgtcgcgccggactatcgccgcatggaagacatcatctcgatgtcgcgctcgccgatcaccgacagcgaccgcgccaacctggcgcagctggcggccatgtgtgccgacccggccagtggcgtgagctgcccatcggtgctgccgggctattcggccggcaacgtggccagcgtggtgggccagtacaagaaccgtggcaagaccctgatcgacggcttcgacatcgatgcgcgcagccgcttctcgctgggcgactggggcaacctgaatatcggcctggccgccaccatcgccaaccgcaaccgcttctacatggacgcggagaacggctggtactacggcgacgtggtgggctactacaacaacccgcgcctgcgtgccacgctcaatgccgactggacctacaagcaggtgaccaccagcatgttcgtcaactacgtgggcggcaccaagtgggccaccgaccaggttgatgaggtgagcaacaacaaggaaacctgcaccggcggctacctggccctgcagaagagcaagtgcgatggtgcgccgtcgtggtggactgccaacatgagtgtcacctggcgcccggatgacgcgtggaacctgagcttcactgtcaagaacctgttcaaccgcctgccgttctacgatccgaacagcttcctgcgtgactccagtgactacgccaccatcttcggtcgtggttacagtgtgaccatcggctaccgtttcaagtaa

SEQ ID NO: 503262 - DNA, 357 bp, Stenotrophomonas maltophilia
atgcacttcgacacctttacgcccgctcaacggatcctccgagatgcggctgacgcgcgccaaacacttgctgagcaatggctcactgcagcacaggtcagtcaggggcttggctctcatgctccgaacggtggccgcttggtcagccagttgcgccgcgctggcaagttgctgggggtctacgtcaccaatccgtcgcccagttaccgctacccgacatggcagttcctcccgagcggccagcctgtggaccacttggccgagattctggctgtgctgcgtgagttcggtccttttgagcaagaaggtcggcagggattcgtgagaaaaacagccgaatcgtctctaacaccatga

SEQ ID NO: 503263 - DNA, 330 bp, Stenotrophomonas maltophilia
atggcagctcgatatgttctgagtcgttcgggaacgcagtaccgctttgtccttaaggccggcaacaacgagatcatcctcaccagtgaattgtatgcctccaagcaaggggcactgactggaattgcttcagtcaaggcgaactctcctgaagattcgcgctatgagcgcaagaacgcggcaaacggccagcctatgttcaacctcaaggccgctaatggcgagcgcattggtaccagtgagacctactcttccacccaggcccgcgaggcaggaattcaggctgttaaaaacaacgggccaactgcgccagttgacgaccaggcttga

SEQ ID NO: 503264 - DNA, 1023 bp, Stenotrophomonas maltophilia
gtgcagcgcgcccgcgacatcctccgggccgaaggtaagaacccctcggtggacgccgtccgcgtggcgctgggcaacactgggtccaaaaccaccatccatcgctacctgaaggagctggaagaggaggaagggcaaggcctacgcgccaagatcgctgtcagcgatgccctgcaggacctggtcgcgcggctggccgagcgactgcacggcgaggccgaggcgctgatcgcccaagcgcaagagcgcttccaggccgagctgcaagcgggcacccaagccttggaacaggcccggcaagaggccggaagcctcagtgcgcagcttcagcgcaccgaggcggcgctgcagacagagcgcgaggccggcgaagcggctaggcgcgacttggccagccgtaccactgaactggcccagctagaggagcgcatcgcgggcctcacagcgcgactgaccgagcacgaaagccatgcgcgctccctggaacagaagcacgagcatgccagggaagcccttgagcactaccgcacctcggtcaaagaccagcgcgagcaggagcaacgccggcatgagcaccaggtgcaggaactgcaggtcgccctgcgccaagccaacgaagtgttgaccaccaaaaaccacgacctggtgcagctcaacagggaaaacggccaatggctggaacgccacactcggctggaaagggagttagcgcagttgcgccagaccatccagacacaacaaggcgagctcgatacgctgcgcctcacagcggccgaacaccaggcgctgcaggtgcgctggagccaagatacccagagtttggaagcagtacgacaggagctcacccaagctcggaccgaattgacccaggagcgcgaacgacgcgagcacgccgaggcggggaccctgcgcgccacggtgcgtctgagcaccttggagccgcttttggcccagctacagccggccagtaccggcggtaaaggctcgaagcggatctcatcggaagagacgccggagccataa

SEQ ID NO: 503265 - DNA, 627 bp, Stenotrophomonas maltophilia
atgaccgtggtaacgaccacacccccggaaatcacccgtgcagtgcggcgcctgaccgattccgtcgtgcgcggcgcagagcccgtctatctgcctgtgcagccggaagccgatgcgatcgtgcatgagtgctttcccaacgtgcaagcgaagatcacgcgggacggcggccagatgcggtgcggttggcagctgtgggaatggccgcacgtgctggtggaggcagaattccatgccgtgtgggtcagccccgagggtgaaatggtcgacatcacgccaaagcctgaaggtgagacacgcattctctttgtgcccgatccgcgcagacgctacgagggcttggccatcgacaacgtccgcatgccgttacgcgatgacatgctcatcaagcacttcatccagatgtctgaagcgatagtccgggtgatgaaccgcggcgagcgagcatcccaatatggagaggtgagcgttcccgccaatgaaatccagccccttctacaggccagggatttcttgggccagtcactcggtgcgggactgcgtgaacatacgccgtgcctgtgtggcagcggcagcaagtacaagcgctgccatggcgcgcaagtagaagcattcttccgtcattga

SEQ ID NO: 503266 - DNA, 597 bp, Stenotrophomonas maltophilia
atgcaacgggttatttatcgcatggtgttgtggcaccatggagtgatggcggtgacatattactttcttgataccgagtggtccgatgtattgggcgctgagttggtcagcctcgcgctggtccgggaggatggggagcaggacttttacgccgaacgtgccgatctttccgaaacgccgaccgactttgttcgccaggccgtatacccgctgctgacccgcggaaatgcggccatgtcggatgcggctttgaccacggcgcttcgtgcctttctggggtcggttgcgacgccagcggtgatggcggactacccaaacgacttgcacctcttgcagtacgccttggatggctttgaactgcctgacgagcaggctgcagcctgcggcccaattcccacccccatcctgacgcgcatgctgaaggacggcctcacgggaatgctggtagaagattggttcgccgcacatccggagcaaaacgccaagcgccatcacgcgctggcggatgcgcaggcgttgcggatggcgtggctggtcgctaccgatcgcctgccgccgccagcatgggccaagtcgtaccggcgactcagggtatag

SEQ ID NO: 503267 - DNA, 726 bp, Stenotrophomonas maltophilia
atgaccgaccatattgtccagtctttcgatgtcgagctgcgggggcttacttcacacatccttgagctcggcatccttgccgaacagcagcttacggatgccgtctggtcgctacggcgtggcaacgagcaaatggccaaggaagtggcagagcgtgaggagcgactgaaccggcttgcggcgcagattgatagcgacgctgtgagcatgatcgcgcgtagacagccgctagcgatcgaccttcgccatgtgatggcggcaatccgaattagttcaaacctggagcgcgtgggcgatcttgcttacaacattgccaaacgctcgatggcaatgagcgaggctccgataccagcagagcttgcggagcctatgcagcgtatggccgagctcacgctattgcagctgaaatcagcgcgggagtcctttgccacgatggacattcattcggcttatcgcgtttgggaggaagatgcagtaattgacgcgatgcacacgatcttgttcaaggatatcgtccaatgcatggccgacgaccgcgcctccgcatttgacttagctcacctgctgttcgtcgtcaaaaatatcgagcgggttggtgaccacgcaaccaacatagccgaggacgtcgtatacatggtcagcggagcgttacccatcggcaaacgccccaagatggatgaaagcaccctgcccagggcgggaagtgacaacctcggcaacagctaa

SEQ ID NO: 503268 - DNA, 828 bp, Stenotrophomonas maltophilia
atgaatcactcgaccatctcaattccggttcccgtggccgaacgcacctcaacccccgcccacgatgcgacggtgcgtgctgaggtccgtgggcttgacttccattatgacaagttccacgcgctgaaggacatcaacctgtcgatcggcagcaaccaggtcactgcgctgatcggcccctcgggctgcggcaaaagtacgctactgcgctgcttcaaccggatgcatgacctgtatccgaataaccggtactccggcgcgattaccctcatgccggagaacctgaatatcgtagggccggatgtggacccgatgcgcgtgaggctgcgcattggcatggtttttcagaagccaaatccgttcccgaaatcgatctttgacaacgtggcctcagggatcatgattcgcggtgtgcgcaacaaatcagttgtcactgagcatgtcgaacgcgcattgcgcggagcggccctctgggatgaggtgaaggacaggcttggtaagtcagcattcgagttgtccggcggtcagcagcagcgtctgtgcatagccagggcgctggcgcccaaccccgagataattctctttgatgaacccacatctgcactcgatcccattgcaactgcgcggattgaagagctgatcgacgagttgcgtgcgcagtacaccatcgtcattgttacccacaacatgcagcaggctgcgcggatctcggacaggacggcattcatgcacatgggacagctcattgagagtggccctacggcggagttttttaccaatccgaaagagcagaagacccacgagtacatcaccggccgtttcggctga

SEQ ID NO: 503269 - DNA, 930 bp, Stenotrophomonas maltophilia
atgcgcgaccacatcgagcccatgggccttgacgatgctgcaattacacggcgagcaagagtttcagacttgtgcttcaccgtgctcgggctgctggtactgttcctgaccctgaccattctgatggcgcttgtagccgacttcgtagtcgacggcgcggccagactcactccagactttttcaccaacttcccctctcgccgacctgagtctgccggtattctctcggcgtggatcggtacttgccttgtcatgctggtgaccggggtccttgccgtgccggtgggggtcgccgcaggcgtctatcttgaggaatacgccccgaagcactgggtcaccgactttattgaggtcaatgtcaccaaccttgctggcgttccttcgatcatcttcggactgctggcactggggctcttcgtccagatgttcgggctcggccaaacgatcctggtcgcgggcatgacgcttgctctgctgatcctgcccatcatcattgtcgcgacccgcgagtcactgcgtgccattcctcaagacatccgcgaggctgctttcgggctgggggcagatcagtggcagaccgtcagcatctttctgcttccggccgcgcgtccgggaatcctgactggcgccatcgtgggcatgtcgcgggccattggcgaaaccgcgccgatcatcaccatcggcgcactgaccttcattgccttcctgccgccgtcaccaatccaggcatctgctcccttcatcagttttgaatggctcagctcccccttcaccgtgatgcccatccagatgttcaactgggtgtcgcgaccgcaggctggctttcacgtgaatgcagccgccgccgggctggtgctgctgggcatgaccctgctgatgaacggctttgcaatctggctgcgttaccgccttcgccgccgcttgcggtga

SEQ ID NO: 503270 - DNA, 945 bp, Stenotrophomonas maltophilia
atgaaaagtagtggttccttcctcgatgtgggtcctgtcccgcttcagccaagcgacgcatttctgcgccgccgccatgccatcgacacaggcattcgcctggtactgttcgtcgcagcggcgctatcagttctggtcaccttcggcatcctctacgtccttctcagtgagagcttgaagttcttcactcaggtgtccatcgtggacttcctgaccgatacgcattggacgcccgtcttcgaagagaagcacttcgggatcatgacactactgtcgggtacgctgatgaccacggccattgccctggttgttgccgtgcctgccggcacgattctcgcgttgtatctcagcgagttcgccaagcccaggctccgtgaagcggtaaagccgttccttgagctcattgcaggcgtaccaacggtcgctttcgggtacttcgctctgctgttcttgacgcccatctttcaatccttcatcccgggtctggcgcgcttcaacctgctcgtgtctggggtggtcatcggcatcatgatcttgccctacatcgtatccatgagcgaagatgccatgcgcgccgtgcctgattcgctgcgtgagggggcatacgcactgggattcacccgcctgcagaccggactgaaggtggtgacgccagctgcgctctcgggcgtcaccgccgcttacttgctcggaatgtcgcgggcggtcggcgagactatggtagtggctatcgctgccggccagcaggccaggatcgcgaccaatccgctcgagggtgcagcaactatcacctcatacatcgtgcagttgagcatgggcgatcttccacatgagtcgattgcctatcagaccatcttcgccgccggattgacgcttttcgcacttacgttcagtttcaacctcttcgccttctggctccgcaagcgctaccgggaggcctactga

SEQ ID NO: 503271 - DNA, 1053 bp, Stenotrophomonas maltophilia
atgtacctgcgcctcactttgcttgccgccgcaacgctcagcatcctcgcctgctcgccgtctggaacacctgctaccactggccaggacagtgccggggcacctgcaaaagccggcgagatcaccggcatggtgagcacggacggctcgtcgaccgtttttcccgtcaccgaagcgatggctgaagagttccagaaagaaaatgccggcatcaaagtaacggtcggcatgtcaggaaccggtggcggcttcaagaagttctgccgcggcgaaaccgacatctccaatgcgtcgcgcccgatcaagggtgaggagaaggaagcctgcaaggccgctggcgtagagtacatcgagcttccagtcgcgatggacgctctgacagttgtggtcaacccacagaacacctgggccaatgacctcaccgtcgacgaactgaaggccatgtgggtccctgaagcacagggcaagatcaccaactggaaccagattcgtccgagcttcccggacaagccgctggtcctctacggtgcgggcaccgattcgggcacctacgactatttcaccgctgcaatcgttggcaaggagcactccagtcgcggcgactacacggcctcggaggacgacaacgtgctggtgcagggagtctcgggtgatgccaatgcactggggttcttcggtttggcctattacgaagagaacgccgacaagctcaaggcagtaggcatcaagaccaacgccgccgcccaggcggtcgcgcccagcgtcgaaaccgcgcgctccggccagtatcagcctctgtcgcgcccgatcttcatctacgtaagcaagaaggccgccgaaaccaagcccgaggtcgcgcgctttgtcgagttctatctggactccaagcactccgaaggattggtgcaggaggtgggctatgtaccgctgccggagaacgcattggccgcaatgcgcgagcgctttgcaaagcgggagattggcaccggcttcactggctcgaagattggcgtttccatcgacgagctgctgaaagagaagctggtttactga

SEQ ID NO: 503272 - DNA, 1224 bp, Stenotrophomonas maltophilia
atgcaaggcgcgtcaaagcagccgcaaaagctgaccctgctgatccttgcgctaggggttggccagatcattgcgtgggccagcagctattacctgttggccgttctggcccttcccatgtccagaagcactggctggtcgctcgggctgctggtgggaggcctctccgctgggctggtcaccgccggactactggctcccctggccggtcggaccatcgacaggcggggagggcggaccgtactggcggccagctccgtagtgtttgccatggggctggcagtgctggccacgtcgcactccccaactacctattaccttggctgggtggtactgggcgttgccatgtctgcgggcctgtatgacgctgcgttctcgacactgggacagctgctcggtgcaaacgcgaagcgatccattgccggcctgaccttggtggccggctttgcaagcacgctcggctggccagcgctgacctaccttgacgaggccatgggatggcgcggcgcgttgtgggtagctgccgcattcaacctgctggtcgcattgcccatccatttgctcgccattccgaagcatcagccccgcattggcgcaagtccgcatgcctcagcggccgctgccgcccacatcagcactgcagcacccgcttcacctgcagcaccgcctgcacactggcttgtgctcattggcctgttgctgacctgccaagccgcgatcatggcgaccttgtcggtgcatctgattgcactgctcggtgccatcgggctggcaccgtcggtggcgttgcttgctggcatggtgatcggccccgcccaggtcatcgctcgtttgctggagatgtacttcggacaaggcgtgcatccgacctggtctgcgcgcatgggaattgcagcgacattggctgcgctcttgctgctacttaccgcagacccatgggtcgcgatcattgcattcgtcatttacggtgccggcaacgggatactcacggtagcccgcggcaccctgccgctagcgctgatcggatcggcggactacggcaagaccatgggccaacttgcccgacccatgctgctggcccaggcggcggccccgccgctggcagccattacattggagcgagcaggccctgtctggctgatctgcctattggcactgcttgccaccgtttccttgatcggaagctgttggttgcctgcaaaggcgcagcgcgtgcacccttga

SEQ ID NO: 503273 - DNA, 168 bp, Stenotrophomonas maltophilia
atgaaggtcctgctttgggcgcctacagctttgtttgccttgctgtcattgagagcgttggctttcgtgacctatcaaggactgaatggagccgcctttgaagaggaagagatcattgtcgcgggggggcggcttggtctgcggctggatcgcctggggcatgcataa

SEQ ID NO: 503274 - DNA, 432 bp, Stenotrophomonas maltophilia
gtgagacaacgcgtcatcgtatgcccgctgatccagaaccagggcgcctatctgctgtgccgcatgccgttggaccgtggtgcattcccaggccaatggggactgtccggcggcgggctggagcccgccgaacgcatcgaggaaggcctgcgccgggagatccgcgaagagctggggcacgcgctgcagatcgatgccgttcaaccatggaccttccgcgacgacatccgcaccaagctctatccggacggttccagcgagcagatccacatgatctacctgatcttcgactgcgaagcactgaaccgtgacgttacgatcaacgaagagtttgatgcccatgcctgggtggaaccgaaggatctgggtgcgtacgacctcaatgcggcgacccgaatcacgcttctggcgaaggggctgctttcgagctag

SEQ ID NO: 503275 - DNA, 2238 bp, Stenotrophomonas maltophilia
atgccttctgctgagtccgcgcacgacactgccttgtccagttgcgcgcgcgaaccgatccacacccccggcgcgatccagccctacggtgtgcttctggtcgttgaaccgcagtccctgcaggtgcgcgagcgcgccatcagccagcccgggctgctgctgcagttcggcgaaccgttgatgcggcacgtcagtgaggtgttcggcggcgtgctggcgccgttccaaggcttgttccagcaggccgtgatcggcagcagtgcccatgtcggtgccgtgcatctggatggccacggccggcatcagctgctggtgcaccgttccgccaccgatctgctggtcgagctggaagcaccggttccgggccagcccggctcgctggaagagctgtatccggccatccgcgagctgatggccggcatcgagtcggccagcaccgtggaagatctctgccagctggctgccgcgcacatgcgccggctcaccggcttcgaccgcaccctggtctaccagttcgatgctggctggaacggtgtcgtggtggccgaggatggcaacggcctgttgccgtcctacctggacctgcgcttccccgaatcggatattccagcacaggcgcgcgaactctaccgccgcaaccgggtgcgcctgatcgcggacaacagctacaccccggccccgctgatgcggaccgaggatcaacgcgacgcgccgcccaccgacctgagcatggcggtgctgcgcagcgtctcgccggtgcacctgcgctacatgcgcaacatggggaccggcgcgtcgatgtcggtatctctggtgcatgaaggccgcttgtggggcctggtgtcctgccacaccgtgcagccacgccgcctgccctaccacgtgcgcactgcctgcgagttcatgggccagatcctgtcgctgcagattgcgttgaaggagcgagcgcgtgcgatcgaagagcgcgttgcccgtcgttccatactggtcaagctactgggtcgcatggccggcgacgaggacttcatggcggccctgcgccaggacgaggccagcctgctgtcgctgaccggcgcggccggcgcggcgatcgtgcacaagggcgattgcctgcgtgttggccagtgcccttcctccagcgacgtgctggccctggcgaactggctggccacgcagcaggccggccaggaaacctactgcaccgatcacctggcagccgactggtcgcctgccgcgcacctcgccgacgtcgccagtggcctgctggcggtgtccatttcgcagttgcatgacagttacctgatgtggttccgcccggaagtggtgcgcaccgtgcgctggggtggcgatccccgcaaggaagcagcaccgggcgtggcgctgtccccgcgcaactcgttcgaggcctggaaggagaccgtgcagcagcgcagcctgccgtggagcgacgctgactgcgacgcggcacacgagatgcgcacggccatcgtcgatatcgtgttgcgcaaggccgaggaaatggccgaactgaacgagcagctgctccgcagcaacaaggaactggaagccttctcctattcggtcagccacgacttgcgcgctcccttccgtcacattgtcggctattccgagctgctgggcagctcggcgggcgaacgcctgaacgataccgagcgccgcttcctggacacgatcgtggaatcggccaagtccgccggcacgctggtggatgacctgctcagcttctcgcagatgggacgctccacgctggggcgtgtgcggctggacatgaccgcgctggccgaggatgtgcgccggagcctggccctggactacaccggccgcgacgtgcagtggacgctcgcaccgctgccggaggttgaagccgatccgacgatgctgcgcctggtctggcagaacctgctggccaacgcgatcaagttcacccgcgagcgcgaacatgcagtgatcgaggttggtcacgagcgaaacgacgaggaagaccacttcttcgtgcgcgacaacggctgcggcttcgacatgcgctacgtggacaagctgttcggcgtgttccagcgcctgcaccacgtcgaagagttcgaaggcaccggcatcggcctggccaatgtccgccgcatcatcggccgccatggcggccgcacctgggccgagggcgagcccggcaagggcgcgaccattcacttcaccctaccccgctccacaggagaacacccatga

SEQ ID NO: 503276 - DNA, 2619 bp, Stenotrophomonas maltophilia
atgatcgatcgcagacgcacggtgctgttcgacattccgtccgacagcgaccagttttccggcggcggtcacgccagaaccgcacgcgccctggccaacacgcttgaacagctgcaggtgcgctccgcgaccatcggaatcgaagggccctggggttcgggcaagtccacccttgtgcagctggccgcagccgagttggaccggcgtgccgcaggcaggttccggttcttcaattacgacttgtgggccaatcaatcgacaggcttccgcgccacgttcacggaaagcctgctgatctggatgcaggagcaggatgaaacgctcaagcccttctgccgcgaactggcagacaacgtctccgccaggaaagtacgcacgcataccagcaaccggaagctattcagtggttttggcctggtcgccctgctgagcctgccgctgctgccgattgtctactccggcctggaattgtcgcagctgcgtgccgcagatccgtcgccactgcacatcttctcgtcgatggcgattctggccacggtactcagtgccggtgcgatccatgtcaagcgcgcctatgccgatgcacccgaggacgtcagagggttcagccacagaatgacctatgccctgtccagcgcgatccggctgtttgacaaggatgccgccagcaccgatgtcgagcagaagatcaatgagcatgattccacgcagcatggcttcaggaagctgcttgccaacatttcatctgaattccagaacgatgatcgccggctggtcattgtcctggacaatgtggaccggctgccgccctcgcgcatcccggccgcctgggcggacatccattcgatcacggtggattccttcgaatcgcgcagtccatcgactggaaatctgctgatcgtgatcccctatgatcgcggtcatgtgctttccgccatgcacggatcgcggggtggcggcagccaccaagagcaggcggacctgctgcgaaagacctttgatgtgtcgttcgtggtttcagcgccggtcctgtccgatgcttcggagttcttttcctgccagctccgcaaggcgctgccggaaggcaccaatgcactcgcgtgcgaccaggtctaccggatgttcgccgctgccgatcctgaccaagcgcagacgccacgacggatcatctcgttcatcaacgacctgacctcgatcaccgaccagtggtgggaggaaattccgctgcagaccgctgcattgttcgtcgccacccgccactcgccaaggctgctcgagacgatgcacgggcgcccggagggcctggagccggcgctggtcaaactggccgacgatgagcatctgcaggagcacctggccgccctgtggttcaacgttccggtcgcccacgcaacgcagatcctgctgcccgacctgatcctggccgccttgtccgcccccggcgatgatgcgcagcgcctgctggagctgagctcacgatccgggttctctcatcaccttgaaatgacggtgaggaccttgggccttcgcccgattcgcgcgagcgatttttccagcatcgcctcgagaatctcccggctggatgccggcaacagggatgtgcaggcatcactggcactgctggtgaagttcatcccgagtgtgtccgatgtggatgccggacatctcaccacgctgcagggtacattcgatttgctgcgcatctgcagcagggaactggcgacgtcgctgggacgtgggctggccgccctggtaagcgaggcgggcgtgaactccaagtatggtggcatcggcatcggccgcgcctgggccgagttcatcaatgccctgctggaccgggtgtcagaggcattcgatgcggacctggcaaaagccgttctcgtcgagatccggctaccctccaatgcggagatgtttgccggcattgcctgcagcacgcgggaaacactgcttctggacaacctggtccgcatgcatcccaagccggaggggggccggctggagatggcactgctcaaggtcgctgactacagcgtcggggatcttggcctggcctgggaagtactgtcgacgcagctcgaagcggatgcagccgcccgcatcttccaacggggtagccaccgggtgctggatgacatcaaagccgaggccacgctgcccctgcaccacagcctgtttgtactcaacaacttgttcgaaaacaccgatcgcggggagctggcccagtcggcgcgtacccagctctgcagccaccacctcctgctttccgcctggagcaaactggatccggcgtccgaggaattccgtctgctgaccacagagtatctgtggatgctgatcgatccgctggacgatgctgtgaagccagcggccaaggcgagcatcgacgccgcgtcgctcgagttgctcgaattgctcgaatcgccgcgaacacgattgatcaggctgctggacggccaggacgtcccgtcggccattcttgatgacctggtctccatggcagaaagcatggaacggatcgagctgtggcggaaggcgatttcaacggactcaacgctgcaggccgctggcctgctgcgcggcgttgtcgctcatttcgatcagtcccgcactgactga

SEQ ID NO: 503277 - DNA, 273 bp, Stenotrophomonas maltophilia
gtgctggaataccagacgatcctgttccagtaccacccggtcccgttgtggggaatagacaacgaagccgagaatcagcggcgacagcgtgaaaatcgctgccgcgcccagtgccggaagcggcccaagttcgggtgcgacggcaaacaggagtattgccagtggtccggctccggcggcaacgatggcgtactggtgatagcgcctgaagatgcgtacttcgctgccgattttccgcggccgggcggggagacgggagcgggcggtgggtga

SEQ ID NO: 503278 - DNA, 510 bp, Stenotrophomonas maltophilia
atgcacgccattatcaagaaggccgcgctcgctgcagcgctggccactgcttcgctgtccgcgcacgccgtggaaaccaagatctccgtctacgccgacgtcgacccgaccctggcgctgctgcgcgatgacggcaccccgctgccggacatggtcaccctgacccacgatccgctgcgtggcctgattccgaacacgcagcgcgtgcgtatccattccaacgatgacaaggcggatatcgaagcgcgtatcgatggcagcttcttcctggccaacgagaccggcaccgtgaccgtgccgatgaccatcagcctgaacaaccgcgcgctgggtgcagccgccatcgagtacaaggcaactgacctgttcaacggtgcgggctcgaccccgggcgcctcgatctcgatgccgctgaccatcgcacagaccacgccggcgccgatcctcaccaagggcgcgtacagcggcctggtcaacgtcgtgctgaaccagaaggcggctacgccgtaa

SEQ ID NO: 503279 - DNA, 1134 bp, Stenotrophomonas maltophilia
atgaaccggcgttggatgttcgtgttgatgctggtgtgtgcgctggtgctggtgatgccgcgggcgtgggcgcagtggccgccggaaacgcatccgtccgaccagagccgggacatcgtaatgagctgggatcgctcggcggtacccggtgatgtggagttgtgggcgccgcggacggtgttgggattcagtcacgacctggcgctgaagtatgggcagatccatgtggtttgtgagtctgcttctgacagtgaattcggtcggtgccctcttgatggtgaaccgggagtgtcacttggcagtagcaatgtcgatctgctgttcgtggagcagaggactggcctacgtagcgaacttcgggcgcagggatatttacagagagtcatgtcggattgggtttgcgctatcgactactgggacacgctcagaaggcagttgaatgcgtcgttctggtacatatgcagttccggacagccagttggtacaggcgtatatctggaaatcccagcgaccgagctctccagactcgtcgcaggccactggaaggccacgatgcgcctgaacatcaaggccgaccccgccgcagcacccgtcgccacagctaccttcaacttcgatttcaccgtcaccgactacgacgcgatctcgatctacttcccgaccttcgacaccgtcgcgccgctggtcaatctcgatctgcgctacgaccccatccagaaggtcgtgggtggcaggaaacaactggacatgtgcctgtacgacggcctgggttcgcagagcgagtacctcgacgtcacggttcgcgacagcggtccacgcccacctgcgggatcggacttctcgctctggcaccgcgatggcggcagcgatgccagccagcgcctggactaccgggtccacctggactacggcggccatcgcctggcgatgaagcacaacgtcaagcagcagctgcgcggcatcgacagcgcacagctgcggctggtgatgctgccgggcatcagccagccggtgtactgcgtgcccacgccgctgaccctggaaacaccgcccacccctatcgccagccagcgccccggcctttacgagggcgagctgaccgtggtgctggatgtccctactgccaaaccctga

SEQ ID NO: 503280 - DNA, 186 bp, Stenotrophomonas maltophilia
gtgtggagcgttccccagctgatggaggagcttgccagtgacccatcaaacatgatcaggaagtaccgtgctgccttcgcccagggcaggggcgtctcctggagcctggacgggacgttcaatgccagcattggcgtgaaactggagggtgtcgacgactggctgaaagcccacttcgagacttga

SEQ ID NO: 503281 - DNA, 237 bp, Stenotrophomonas maltophilia
atgaaactgcaactggccgcgatggctgcattgatgttggcattgggtagtgtggtaccggcaaccggccacgcggccgggtcccccggatcgacgaccgattgcgtgcccgtaagacttgggcccaacctcgtgcatcagcgctgcaccgtcacccgcactctggcagacggcaccgttctcacgtcggtgtactggatagacgagaacggtcagtggtacctcccggcagactga

SEQ ID NO: 503282 - DNA, 246 bp, Stenotrophomonas maltophilia
atgacgctgcacaatcgaatgaccgctttttctttcgctgcagtagttgcacttgccgccctggtgccctcgccgccggcgaatgcagccgaagaggtcggcctgcaggaggagtgcgtgcccttccgcatcagcggcaacgtgttccaccagcgttgcacgttgtacgtggtccatgacgacggcacccgcgtagtcagcgaccactacaaccgcgacgagaacgggatgatctacgacccctga

SEQ ID NO: 503283 - DNA, 627 bp, Stenotrophomonas maltophilia
atgaccgccctgcccgccgatgtcgccctgctggtgatcgacctgcagccggacttcatgcccgctggtgccctggcctgcgaccagggcgatgcgctggtggcacccattgccgatctgctggcgcagcgccgctaccgcaccgtggtggcaacacaggactggcacccggccgaccatgcctcgttcgccagccagcaccccggccaacgcccgttcgagaccatcctgctgcacgcgcagccgcagaccctgtggccggaccactgcgtgcagggcagcgccggtgccgccctgcacccgggcgtggactggaccgtggccgacctgatcctgcgcaagggcacgcgccaacaggtggattcgtacagcgccttccgcgagaaccacggccccgatggcgagcgcccggccaccggcctggccggctggctgcatgaacgccgcatccgcgaagtgcacgtatgcggcctggcccgtgactactgcgtgctgtggagcgcgcaggacgcggtgaagtccggcttccgggtgaagttcctgtgggagctgaccaagccggtgaccgaagccaacgacgtgatggtgcgcgaggcgctgggcaaggcggggatcgcgatcgcctga

SEQ ID NO: 503284 - DNA, 1410 bp, Stenotrophomonas maltophilia
atgcactacctcgataatcttctcctcaacaccgacagctacaaggccagccattggctgcagtacccgccgggtaccgatgccacgttcttctacgtcgaatcacgtggcggcctgcacgatcgcacggtgttcttcggcctgcaggcgatcctcaaggacgcgctggcacgaccggtcacccacgccgacatcgacgacgctgctgcggtattcgccgcccatggcgaaccgttcaacgaggccggctggcgcgatatcgtcgaccggcttggcggccacctgccggtgcgcatccgcgccgttcccgagggcagcgtggtgcccacccaccaggcactgatgaccatcgagtcgaccgatccggctgcgttctgggtgccgtcgtatctggaaacgctgctgctgcgcgtgtggtatccggtcaccgtggccaccatcagctggcacgcacggcagaccatcgccgcgttcctgcagcagaccagcgacgacccgcaggggcagctgccgttcaagctgcacgacttcggcgcgcgcggtgtatcgagcctggaatcggccgcgttgggcggtgccgcgcacctggtcaacttcctcggcaccgataccgtgtcggcgctgtgcctggcacgcgcgcactaccacgcgccgatggccggctattcgattccggccgccgagcacagcaccatcaccagttggggccgcgaacgcgaggtggacgcctatcgcaacatgctgcgccagttcggcaagcccggttcgatcgtggcggtggtgtcggacagctatgacatctaccgcgcgatcggcgaacactggggcaccaccctgcgcgatgacgtgatcgcgtcgggcgccaccctggtcatccgtcccgactcgggtgacccggtggaggtggtggccgaaagcctgggccggctggatgaagccttcggccacgcgatcaacggcaagggctatcgcgtgctcaaccacgtgcgggtgatccagggcgatggcatcaatccggacaccatccgcgcgatcctgcagcgcatcaccgacgacggctacgccgccgacaacgtggccttcggcatgggcggcgccctgctgcagcgactggaccgcgacacgcagaagttcgcgctgaagtgctcggcggcgagggtcgagggtgagtggatcgacgtctacaaggatccggtcaccgacgccggcaaggccagcaagcgcggccgcatgcgcctgctgcgccgcctggacgatggcagcctgcatacggtgccactgccggccaacggcgacgacaccctgccggacggcttcgaggacgcaatggtgaccgtgtgggagaacggccgcctgctgcacgaccagcggctggacgacatccgcacgcgggcggccgtggggcattga

SEQ ID NO: 503285 - DNA, 1050 bp, Stenotrophomonas maltophilia
atggaattcgactatctcgtcttcatcgggcgattcgagcccttccacaacggccacgccgccgttgcccgcctggccctgagccgggcccgcaagctgatcttcctggtcggctctgccgataccccccgcagcctgcgcaatccctggaccgtggccgaacgtgccgtgatgatccaggccgccctcgatggccacaccgaccgcctgctgatccgcccgctgcgtgaccacctgtacaacgaagcgcagtggatcgccaacgtgcagcgccaggtggctgaagccctgcgcaacgacggcgccgccgccgatgcgaaggtaggcctgatcggcatggacaaggacgcgtccagctactacctgcgcgagttcccgcagtggccgctggtggacgtgcagcacaccgccaccctgtcggccaccgagctgcggcgctacctgttcgaagccggcgacgtcgacttccacggcgcgctgctgatgctgcgtggcaatgtgccggcgccggtgtacgacatgcttgaagcgttccgcaaaagcgcgcctgcctatggccagctggtggccgagtaccgcttcatcgaacagtacaaggccgcctggaaggatgcgccctacgcgcccaccttcgtcaccaccgatgcggtggtggtgcattcaggccacgtgctgctggtgcgtcgccgctcggaacccggcaaggggctgtgggcgctgcctggcggcttcgtcggccaggagcagagcctgctcgacagctgcctgcgcgaactgcgcgaggaaacccggctgaagattccgctgccggtgctgaaggggtcgctgaagggccagcaagtcttcgaccaccccgaccgcagccagcgcggccgcaccatcacccacggtttccacttcgaattcccggccggtgacctgccgccggtgcgcggcggcgacgacgccgacaaggcgcgctggataccggtgagtgaagccctggacatgggcccgcagctgttcgaagaccacctgcacatcctggagtatttcctcggccgcggctga

SEQ ID NO: 503286 - DNA, 1893 bp, Stenotrophomonas maltophilia
atgctcgggggcaagacagtggcggacaagtactgcgatctggtcatgaaaggcggcatcaccagcggcatcgtgtaccccaatgcggtactggcgctggcgcgcgagtatcgcttcaagagcatcggcggcacttcggccggcgccatcgccgccgccgtggcggctgcggcggcctgcggtgatcgtcgtcagcaggccggcgagcacctgcccggcgatgcaggctatggcgggttgtcggcggtgtcggcgcagctgtcgcggcgcggcttcatctacagcctgttccagcccgcacgcggcgcacgcgcggcctatcgcctgctggtggtgctgaccggcaatgccagcctgccgcacaagctgctgtgcctggccgttgccgtgttcgagatcgcaccgctggaagtgctggtgtcgctggcgctgcttctcggcctgggctggtggggcggtggttggagcggggtggcggccacgctgctgccgtcgctgctgtgtgcgtacggtgcgggtgtggccggtgccgcgcttcgcgtggcacgcgtggcgcgacgcaatctgctgggcctgtgcagcggcctcggccgcgatgcacgcacgccggcactgaccgagtggctgcacgaatgcctgcagcagttgtccggcaggccgctggatgcaccgctcaccttcgccgacctgcacgatgcgccgcgctatgccggcgagccggacagcccgcatgcgatcagcctgcagatgatcaccacctgcgtgtcgcacaacgagccgcgcacgctgccgctgggcggcgcgcagttctggttcctgcgcgaggaattcgagcagctgttcccggccagcgtggtgcagtggctggtgacgcaggccggtccgccgctggaggtggaagggcgacagtactaccacctgccgccgggcccgaagctgccggtgctggtggccacgcgcatgagcctgagcttcccgctgctgatcagcgcggtgccgctgcatgaaccctcacgccgcgaacgacgctgcgagccgaccgcgccggcggccgaccccgagcacaacgtggccgacagcatggaagggctgaccagcgccgggcaggcttgcggcccggtgatcaccgccttccgcatctgctggttctccgatggtggcatcagcagcaatttcccgatccatctgttcgatgccgcgttgccgcgctggccgaccttcgccatcaatctggtctacccgcagcacgccgaacaggtgaaccacggcagcagtggccgccagtcgctggagcacgcggtgttcctgcccaccgagaaccggcacggctggcagcgcacctaccagtcgatcgccacaccgctggcggccgccgagctgggccgcttcctgttcgcggtggtggcgaccatgcagaactggcgcgatctgctgcaggcgcgcgcgccgggctaccgcgaccgcatcgtgcacgtcagcctgcagggcgacgaaggtggcatgaacctggacatgccgcaggaggtgctgacccgcatcgccgacaagggcagcctcgccggtgcgcgcttctgttcgttctcgttcgagaaccactactggatccgctggcgcaacctggcctcggcctaccagcgctacacgctggaagtggcacgcaccgatgatccggcgcagcaggtactggcctaccgcgcggcctattcaatggttgcccgcggggaaccggcaccgccgtcgtacaagctgggctcggaagacaagcggctggcctcgcagcagctgtgggggttgatggtcgagcaggggcgtacctgggaagacctcggcccggaccttaccgacggcgcaccgcgtccgctgccgcagatgaaggtgaccccgatctactga

SEQ ID NO: 503287 - DNA, 1506 bp, Stenotrophomonas maltophilia
atgactgttgcagcgccccgtatccgcatgctgatcgatggccagttcgttgaatcggccacctcccactggcaggacgtgatcaatccggccacccaggacgtgctggccaaggtaccgttcgccaccaccggcgaagtggacgccgccgtcgccgccgccaaggaagccttcaagacctggcgcaagaccccgatcggcacccgcgcgcgcatcttcctgaagtaccagcagctgatccgcgagaacatgagcgagctggcccacatcctcaccgccgaacagggcaagaccctgccggatgccgaaggcgatgtgttccgtggcctggaagtggtcgagcacgccgccgccatcggcaacctgcagctgggcgagctggccaacaacgtggccaatggcgtggacacctacacgatcatgcagccgctgggcgtgtgcgctggcatcaccccgttcaacttcccggcgatgatcccgctgtggatgttcccgatggcgattgcaacgggcaacaccttcatcctcaagccgtccgagcaggacccgatggtgaccatgcgcctggtcgagcttgccctggaagccggcattccgaagggcgtgctgaacgtcgtccacggcggcgaggaagtggtcaacgcgatctgcgaccacccggacatcaaggccgtgtcgttcgtcggctccacccgcgtcggtacccacgtctacaaccgcgcctcgctggccggcaagcgcgtgcagtgcatgatgggcgccaagaaccacgccgtggtgctgccggacgccaacaaggaacagaccctcaacgcaatggtcggtgccgcctttggtgctgcgggccagcgctgcatggccgcctccaccctggtgctggtcggtgaggcgcgcaactgggtgcaggacctggtcgaaaaggccaagacgttgaaggtcagcgccggcaccgtgtccggcaccgacgtcggcccggtcatttcctgcagcgcccgcgagcgcgtggaaggcctgatcgcctcgggcgtggagcagggcgccaagctggtgctcgatggccgcaagccgcaggtcgatggcttcgagaagggcaacttcgttggcccgaccatctttgccggtgtcaccaccgacatgcgcatctaccaggaagaaatcttcgggccggtgctggtcatcctcgaagcagaaacgctggaagacgccatcgcgatggtcaacagcaacccgaatggcaacggcaccgcactgttcacccagtccggcgcggccgcgcgcaagttccaggaagacatcgacgtcggccaggtcggcatcaacgtgccgatcccggtgccggtgccgctgttctcgttcaccggttcgcgcgcctccaagctgggtgacctgggcccgtatggcaagcaggtggtgctgttctacacccagaccaagacggtcaccgcgcgctggttcgatgacgagacgctgagccacggcgtcaacaccacgatcagcctgaagtaa

SEQ ID NO: 503288 - DNA, 549 bp, Stenotrophomonas maltophilia
atgaaggacgcaggatttgtccgccacgacctgacactcttcagagtgcgccgacatttcattgacgtgctctcgcctcaaatcagaagcgacggcaaagcactcgcactcaatgtcggtgtgctcgcccgcttcatcccggggcgttgtacggatcagaccacgaatctcaacgaaaccgactgcgacgtgagatgcagggccgctccctcagggaaaagcgactattggataagcgttgaacaggatgctgatctgctcaagacagaggtggatgctctattgacagagagtgcccttcccttcttctcaaagttccaggacatcgattccatctgtgaagctctgacggtcgcggccattcaggctgacacgacgccggcacacttcaattcgatcacgcgcgtccgcagggccctgctcgctgccctttcatggcaggcaaaggatgaaatcgagtctgccaaggcgctggccacatatgggctctccatctgtaatggcgctaccgccctgaaaagccgattcaggaagattctggaggcttag

SEQ ID NO: 503289 - DNA, 1629 bp, Stenotrophomonas maltophilia
atgctttccatcaataacgctgttctcaagctaagtaagcgtgcagagactcatgatccgcaacatataattgattcttttgtggatattggtcccgtttttacattgctatcgaatgcggataatcagataattttcgggaggcgcggaacgggaaagactcatcttctggggtacctgcgcagtcaacttgaccggtctggtgtggtgacagcgcagctcgatatgagaacagtcggttccactggcggaatctatgccgatccgaatacgccattgccagaacgtgctacgcgtttgttggttgatactctgatagcgattcaagatgcggtgctgaaacgtgttcttgaagacacggaatgtttggatctttctcagattggaccagcgctcgacgcttttgccgaagctgcaactgaactcactgttgagggaatggttgagcaggagtgcacacgaagctctaccgtggccaataacgaaggctcaagcttaaggattggccttggtgccggtgcgccactttcattggagttcgaagatagtcagaaatctcaagtcgagagaggagggcgccttagggtttctggtcaccagcgcctacgcgtgcagttcggtcgactttctcgtgaactgcagagacttgtcgatctcctgccggatagaaagctctgggtgattctggatgagtggagcgagattcctctggatctgcaaccttacttggcagaccttttcaggcgttgtgtcattccagtcagaggtgtaaccgtcaagatagctgccattgagcaacgttccaattttcgggtcgctgatgattcggtggggcatattggtattgaaattggcgcggatgcggctgctagcatcagtcttgatgaatttttggtctttgagaacagtccggagcaggcgaagcagttctttgcggaacttctgtttcgccatgtgattgcaatgatgaaatctgagggggacggcctgcctgattctgctactgatctagtagccaagctctttacccaggtgacggcgcttgaggagttcacccgggcatcggagggtgtgccacgcgatgctatcaacatcattggcattgcagcacagaagtctccgaatagccctatttcagtgcaggatgttcgtagcgctgctcgaacgtggtacacgcgcgccaagcaacaggctattgccaccaggccggaggcgcagaggctcttgaactgggtgattgacgaagtcattaagcatcgacaggcgcgcgcgtttctactcgaagtcggcgcgagggacgatttgatagattttctctatgatgctcgtgttctgcatgtaattagacagggcgtatcttcgcaagatcatgctggtcgacggttcaatgtctacgcgctggactacggatgctacgtcgatctgatcaacacttctcgagcacccaaggggttgttcgctgccggggttgattctgtagatgaagagcaagaggtatttgtttcagtcccgcatacggatcttaggtcgattcgtagggcaatcctcgacctcgccgatttctataaacaacagcctgttcaggcccagctgcctggcttcggatacccagctagcaacgaggaatga

SEQ ID NO: 503290 - DNA, 738 bp, Stenotrophomonas maltophilia
atgcttctcgctgagcaggtctgcaagcggtttggcgagaggatcgtgctgcgggacctcgatctttgcgtacctccaggggagatcgttggcatcatcggtgccaatggcgttggcaagacgacgctcttccgtatcctctgccatctcattcctgccgattccggaaccgtagcttttggaaccgaagccgacaccgccagcgtaccgtacgtggatattggctatctgcccgaatcgcgcagtctcttctccgaagtcaccgttggaaggacactggagttctgggcgcgactgagagggatgtcaggaaagcaggcggtgaaggcacgcgatgtatggcttgaagaaatagggctgctggcgcgcgcctcaaatcgagtatccagcctctccaagggcaacctgcagaagctgcagctcgccgcctgcatgcttcacgacccgggcgtcctgatccttgatgagccgttctcgggactggaccctgtaaaccagattgccgttgccgacctcatcaatcgtgcagcacgccaaggcacagccgttgtgctttccgcccaccacattgagttgcttcagcgcctcgccagaaggattctcatgctgagggatggacagcttcatcccgccacgtcgcaggaccttcaccctacccgcatcgtggcgctctctcatcctctgcattgcgagtcctccccgcatgaccttcgaccggagaaaagcttatgcgagtga

SEQ ID NO: 503291 - DNA, 741 bp, Stenotrophomonas maltophilia
gtggttgccggccagcgtgcgcaacccgtcctcgttgaggatctccaccacgttcaggtggggcagggcgatcaacccctgctggcgcagcttggtgaaggtacggctgaccgtttccatggtcaggcccagatggtcggcgatgtcgccacgccccatcggcagcgagacgcgcaggccatcgccacccagcttggcctcgcgcgcggccaggcgcagcaggaagtcggccactttctcggccggctgcagccgcgccagtgccagcgcggcatcctgcgcggcgtccagctcctggcaggcacgctgcagcagcttgcgttccaggtgcgggaaacggctgcgaagcgccttcatctgcggcagcgcgacacggcatacgcggctgtctgcgatggcctcgatatcgtagcggtggtggtcactgccgctcaggcccaggtagtcgccgggaagcacgaagccattgatctggcggcggccatcggccagggtgcgcaccaggcgcagggcgccgccggtcaatgtatagacatggtcgcgctcttcgccggtgcgggccagggtactgcccatgctgacctgctgggaaacggtgacctgttccagtgcctgcacttcatcgggcgacagcgccgagcacaccgcaaggtggcgaaccgagcagtgcaggcagtccagcgtggtgcaggacggcgaggcgggatcgttggtggcgggcggagcgccggaaggccgtga

SEQ ID NO: 503292 - DNA, 3096 bp, Stenotrophomonas maltophilia
atgagcaagcattccaagcagctgcgtcgcgcgggtctgactgtggcgctgggcctgtgcctggcgggcgccgcacacgcccaatccgtgaccggcaacatctatggttctggcgagcctggcagcaccgtgaccgtccagaatctgggcaccggcttgagccgcaccgtgaccgtggacaagaacggccgctaccgtgcagctgacctgcccaacggcaactacaaggtcaccctgcagaagaacggcgaggtcgtggcgacccgcgactccgtgcaggtgatcattgccagcggtaccgacgtctccttcggcgcgggcggcaatgtgcagaatctggaccgcgtggaagtaaccgctgcagctgttccgcgcgtggacgttacccagatcgacacccgcaccgtgttcaccgccgagcagatcaacaagatcgccgtcggccgtgacattgccagcatcgccctgttggcaccgagcgtggtgtccaactccgcctataccgccaatggcaatacggtaccgagcttcggtggtgcagcctcctccgagaatgcctattacatcaacggctatccggtcaccaatccgctgacctccatcggcttcaccacgctgcccttcgatgccctggcccagcagcagacgctcacgggcggctatggtgccgagtttggtcgcgccaccggtggtgtggtgaacgtggtcaccaagcgcggctccaacgagttccatgccggtgcgtacacctactggagcccggaatcgcttcgttcggaccccaaggacctgtacttcccgaatacgggcttctacggcgatgacaacgccgacccgaccaagcgcaccgacggcaagctgtaccagactcgcaagaagtcccagagctggacccagagcagcggcatctatgccagcggcccgatcgtgcaggacaagctgttcttctacgcaaacgtcgaactgaccaagcgacagggtgaaggcgtggcctccacatcgcaggcagcggcgaccaccaccaatgcatggcaggagtacgagtacgagtacccccgctgggctgcgaagatcgactggaacatcaccgacaaccatctccttgagctgaccggtgtatccgacgtcaccaagtactacagcgatggctacacctacgactacgccaccggaaccccgggcaacgtccagaacgcaggcacctacaacgaagacaaggcacgtctgtacgtcggcaagtacaccggctacctgactgacgacctgaccatctcggccctgtacggtacgcagaaggtcgatcacagccagtcgccctggggctacaacccggcgtgcccgcgcacctcgtcttcggccaccacgcgcgcaccaggcattccggctgccaactacgcaggttgctggactgcggctaccgtcaacgtcccgggcgcctatgacgaaaccaagggcttccgcttcgacgtcaactatcgtctgggcaaccacgaccttcgagcgggtctggacaacatggaagcggagtcgttcaccggtagcgaatacggtggcggtttcgtctgggtctactcgcgcaccaacaacccgaacgccgccattgacgcctcccatggcgtaggctccccggccgcagccggcggcctgggcaaccagggctactacgtgcgccagcagtactacacccagattgctcaggtgaagaccaagcagagcgcgcagtacatcgaagatcgctggcaggttaccgacaacctgttgctgcagctgggcctgcgcaacgagaccttcaagaactacaccagcgccggtgaggtgtacgtcaagcaggacaaccagtgggctccgcgcctgggcgctgtctgggacgtccatggtgattcgaccctgaagctgtttgccaatgccggccgttaccacctggcactgccgaacaacgtcgccgtgcgcgccgcttccggctctctgtacaccatggagtacttcacctacaccggcgtcgccgccgatggtacgccgaccggcctggtgaacgtgcccgtggaccagagcaagggctacacctgccccggcaagccgaatgcaatctcgtccaacctcgaatgcggtgacgctccggatccgcgcaccgtggcagccgtgaacctgaagtcccactatcaggacgagtacatcatcggcatggagcaggtgctcaacagcaacctgacctggggtgcgaagttcacctaccgtgacctgaagagcgcaatcgacgatacctgcacaccggcgctgggcggtggctgcttcatcttcaatccgggtgaatccaacaccttctggcaggagcaggcagacggcagcttcgagcaggtgacctattcagcagcagagctgaacctgcccaagctgaagcgtcgctactacgcactggacctgttcctggaaggctcgatcggcgagaagttcaacggcaagatcaactacaccttctcgcgcaactacggcaacactgaaggtcagctggcttccgacctcgacaccggtaccggtggccagaccgacgtgtcggccacgcaggactgggacctgccgcagctgatggtcggtgcaaacggccgactgccgaaccaccgtgcacaccagatcaaggcattcggcgcgtaccagatcagcgaagaatggcgcgtgggtggttcgttgctgatcgattcgggtcgtccgcgttcctgcaccagcttctacccgactgcagaccagggcctgtacaacggcgcctactatcacttctgcggcctggcaggcagcggtaccgctccgggctcggcaggctacatcccgccgtccagcgactacgctttctcggcacgtggcagcaagggtgacacgccgtggaactacaccctgaacctgtcgctggcttacaccccgctgtgggctgacaagaagctgaccctccaggccgacgtactcaacgtgctgaatcgccaggagccgacgttctactacagcaattacgcaaccgatcgcgtgacgccggatcagcgctacaaccagcctctgggctacaccgcaccgcgtcaggttcgcctgtcggctcgttacgacttctaa

SEQ ID NO: 503293 - DNA, 1719 bp, Stenotrophomonas maltophilia
atggacgaagccgaacgactgctcgaaatcgaacgactgcacctgttggatacgccaccggagccggtgttcgatgccatcgttgccgcggcccgcgccgcgaccggcctgaccatgggcctgatcaccgtggtggccgaagaccgccaatggttcaaggccaacatcggcctggagggcgtcagcgagaccgcccgcgagatctccttctgcacccatgccatacgccaggacgagttgttcgagattcccgatgcgcgccaggacccacgcttttccaccaatccgctggtcaccggtgggccgcgcatccgccactacgccggcattcccctggggtcgacgcacggcgcacgcatcggcacgctgtgcctgctcgacccgatgcccggtgtgctgtcaccctcccagcgtgaactgatggtgcatctggctcgggtcactacccaggtgctggaacagcgcagcaccctcatggcgcaggttggccaggccaaggcgctgcatcgcgagctgaaacgcagtgaggacttcctggagcgtaccaaccgtgccgcacgggtaggcggctgggagatggacctgctgaccaacgaggtgcgctggacacgggaaaccaagcagttgcatggcgtacgcagcaacttcacgcccacgttggagaccgcactctcgttctatcgcgaggacagccgcaatatcatccaggcggcggtacagcgctgcatcgacgagggaacatcctgggaagtacagctgccgatgaccacggccgacgggcgcgcgatctggacccgggtggtcggcagccggcaacaggtcgacggccatccgcgcctggtcggggcgatccaggacatcacggacgaacgagccgcgctggacgcgctggaagcgagcgaaacccgctaccgtcggctgttccactacagcctgggcctgatctgcacccacacgctggatgggacattgacctcggtgaatccggcggcggtgcagtcgctgggcttcgaggaaagccagatgatcgggcgcagcctgtgtgacttgatgccgccggaaaaacgcgaaggtttcagggcctacctcgcccggatccaggcaaaccacaccgacgctggcgtgatcgagctgattgccgccgatggtacgcgccactactgggcgtaccacaacgtgctcgacaacgaagccagcccgccctacgtgctggggcatgcacaggacgtcaccgcgctgaggatgcaggagcagcagctgcgcgacatgtccttcaaggatccgctcacgcagtgctacaaccggcgttacctgcaccggctggatgaactgattgacgagcgctgggcctgcgtgatgttcgatctggaccatttcaagcacatcaacgacacccagggccaccgccgtggcgatgccgtgctggtcgagttcgccaccttcctgcgctcgccgctgggcaaggacgagaccgtggtacggctgggtggcgacgagttcatggtagtgctggtcgcgccagcgaatggccgcctgagcgaactcgagcactggtaccaggaccacgccgcgctttcgcccagcgcattctcgatgggtgcggccatcaacacggccggtgagcccgtggccgacaccatccagaaggcggacagccgcctgtaccgaacccgcgcgcgcgtgcgtcgggagcgacgcgaagaccctgccgcgcgttga

SEQ ID NO: 503294 - DNA, 711 bp, Stenotrophomonas maltophilia
ttgggaaggctgaaggacaacttcgaagacctggaaatgattggctcaagggtcatgcgtagcattcactgggcccgtacaacggcggtaaggcgagtccttctagttataggctcctcggtggttatcgtcggcctgtaccttttgctaatcaatcatctgagctcgtatcaattggagcgaagtgactatcgagccaaagcggctagtcaggactatgacgcgattcaatatgcggagttgctggacctgatcgatgaatgcctggctccacgtaatgctgcgctggcgggatttgcctgcagggcagcggacctgaagtactccgaggtccagcggggatcggctgtggtaaatcgaaaagaggttctggagagaggtgactaccctcggatgcggattgacgtccggtcggcgcagcgattgttggatcttcagcgcattggtagcgttccttcaaccctgcgtgaggatctgtacgaggtgatgcgcagtacgtatggcagagttggaacagccctactgatcggtgtcctgtatctgacgatctggttggtgccgcattttcttaattacagagagtctacacagcagtcgcggcagccctttctggggcatcgactggccggcgaagcaaatgaagaaggtattccctttggtgacatgccaaacttgcctcatgagcgaatacaccatcctgatcgccgatga

SEQ ID NO: 503295 - DNA, 1836 bp, Stenotrophomonas maltophilia
atgcccactcccaaccctcccggccccgctgaggggccaccacccgcccgaccagcgttgtccttgctcagcgtcccttttgagccaggcttgctgagcgcgctcggctgggaggacggcctggccgatctggactggagcggcaccgactgggacctcgcccagcagatagcccaacgcgcccgtcaggcccagcaaaacggacttaccaccgcctcagcgcttctgcagttcgtcgccagaatcagttcgatgagcctgcaggtcggtggcaccacgctgttcatgccgcgcatcatcactcccgatggcacctccgccggactggaccacatcagcgccaatgacctgcaggcgctgctggcgcttgcacgtcaggcgccgactgactggctcaccgcacgctgcgccgatctcgcactggccacgaaccggatcacggggcgggacatccagcaattggccgcccttggcgcgcgcagctacctgcgcttggcacagcatgccgccgccgaggacattaccccgcaggcgatcgatcacctgcggcgagccctggatctgggctggcgcggcctgcgcaaagatgagggtttccatgccgaactctgggtgaccttcatggcgatgttccagtcggtactggatggcccgatgaaggggttggccaaccgtttcgccgacgagctactgcgccgcgcagacgcagaacatacccaagcggccgccgcgtcgctggaggccgccgcggcagcgattgacccatctgtggacatcgatagcgaactgacgcatctgttgttccagctggcaagccgcctgtggctgtcactcaaccttgtcgagcgcagtcgccaggccggtcggcaggcgggggaatcactggtggtacgcgccggccgcgccacctcggccatggtcgcgtcatactggatggcccagggcattgccgagctgcggcagaatcacgcgccacgcgagcgtattcgcgaacttcagcgcgagctggaagacgtgcgcctgcgcatcaacgacgagatgggggaaatcagcactccagtggatgctcgacccatccacgcgtgggtggacgaacacctcgcaacgacggactatccgacctcgctgatgcgcattgcgttcagcttcaccgattattcggacttcacaaccgaggtagaacacgcaaaagcactcaaagcagaatatttcaacgggttgtttgggagcacggagctggacgcggacggtgtgccactacgttcgcacccaccgtttgatcccaagaatcccgaacacctggagaccgccgcaatcgaaggcgtctgccagacccgctacaccttcttgctggcaccgttcattctaagcagcgtgcgcaagctctctgagcgattcagcagctccttcaatgacgtactgtctttcgtgggcagaagtccgggcgctccggacgggcaccacaagcagatcgcacgcgggctggtggcaggcctgcagcatgagtgggacacggccgggatcaatctgcttccgatgatcgagccgatggttcgcgctcagttgaaggcgcacggtgtcaacaccttggtgtccaacaaggtcaacggcgaacaggagcgctcgctgtctgagttgctggagcttgatgacgaagccggcattctgccgcgaggcctgaacttcgagctcagggccttgatgacgcatcgggcaggctgcaatctccgcaaccgctacgctcacggactgctcagcgatcagcagcttgggaccttcccgattgtcatcacgtggtgggtcgtgctcaggatggtactggatccttaccgctga

SEQ ID NO: 503296 - DNA, 417 bp, Stenotrophomonas maltophilia
atgacacacaccacctccccgcgtgcgcacgccgcggacatgaccatgctcgcgctcttcatcgcgctgtttccggtcatgtccgcgctgcatgcccggatatccaacgagctgtatcacgtgctggccggcctgctgctcggtgggatcgccgcgctcagtcacgccttgctccacgatggcttcgtgcgctggcgccgtgccggtgttgcgggcatcgaacggtcccgttcgctgcgggtgctgctgctggggatggtgtaccccgcgctcgggctggtcagtggcgtgattgcactggttggctgcgaacccgccctcggcgtgcactacatgatcggctttgcggcggggggagcggtgatggggtggcgggccaaggccgcattggcgcacaagcgagcgcggggtctttga

SEQ ID NO: 503297 - DNA, 522 bp, Stenotrophomonas maltophilia
atgatgagcaacgcccagttgaaccggatccccagcatcgaactgcagctcttcaagtggatctcgctggtcgataccgccgagatccccgactgcgtggagctcaagcgcgccgggacccggatctggatcaagcacgcgcgacaaccgttggccggcttgggtgatgcggtccccgtactgacgctgagcaatatccagctcaacccacgccttagaggccggggttggcttactgaattcttggggctgtgcgataccttgattccgtggccagccctgttcgtggagcgcgtgcagaaccccaggctgcccgctttcctcagacgtgaaggatttatcgaattgcagcacgccaacttctaccgtccgtcccaggcttggcgagcacgccacggttggtcgcttgaccaggccgtggccgcacagcagcaggccgaccgcgcacacgtacggccgctgtgggacgaccccagcgccattgcccagttcatcgcccagcgaaaggagacacaccgatga

SEQ ID NO: 503298 - DNA, 921 bp, Stenotrophomonas maltophilia
atggcccgtggcctgaccgagttggatgtgcataacgccgccgatgacctcgtcgccggcggcgagcggcccacggtggagcgcatccgtgcccacctgggcaccggctcacccaataccgtgacccgtcacttggacagctggtggtcgagcgtgggatcacgcctgcgccaacgcgccctcgacagtgcccgtccggacgtcccgccagccgtcatcgccctggcccagcgctgctggaccgccgcactggaagccgccgccgagcacgcgcaggctgcggtggccggcgaacgcgccgagctgcaggcggcgcaggccgccctggccagccagcaggacgtgctggcgcatgagcgtacccagctgctggagcaactggcccaagcccagctgcaggcccgcacggccgaggccagcgtcgccgccgtgcgcgagcaactacaacagctgcacgaccagcgcgacgacctgcgccgtcaacgcgacggtgcgtatacgcgcaacgaacacctggaagatcaagtggccgcgctgcgcaccgagctggcgcagaaaaccgaccagcacaccgccgagcgcgatgagctgctggcgcacctgcgcgccaccgaagatcgcgccttggccgaggtggaccgcgcacgccaggccctgcagcagctgcagcacagcgccaccacacaggcccgtcagcaccagcgcgagctcagcgagctgagtacggcccgtcagcaggccgaaatagcccgcggccaggccctgcacgagcgcgatatccagcgcgcactggccaacgcctatgccagccagcttgagcgcctgggcgatctacccgagcaggtgcgcgctgcacttacccccgcggcagcgccggcacgacccaaacccacgccggcccgtaagccgcgctcgcgctag

SEQ ID NO: 503299 - DNA, 1080 bp, Stenotrophomonas maltophilia
atgaaaaccatcacttccacgaccgttgatcggacgctcgccctgcccgagccggcccggctgtcggcgcaggccgccaccgccgccgatcagatcctggcggcggcgcgcagcgccaataccactcgcagctaccgcactgcgctgcgctactgggccggctggtaccagggccgctacggccagtcgctgcggctgccgctgccggcggcaacggtggtgcaattcatcgtcgaccacgtggcccgcgacaccgccgaaggcgtgcgctgggagctgccggccgcgctggaccaggcgctagtggcggccaggttgaagagccgccccggcccgtggcgcttggccaccctcacccaccgcgtctcagtgctgagcaaggtccatcagctgcagcacctggccaaccccatcgacagcgccgaggtgcgccaactgctggccagcgcccgccggaccgcgcacaagcgtggcgagcgcgcacgcaagaaggttgcgatcacccgggtggagctgcacgcgctgctggccacctgcggctctgacctggccggggtgcgcgatcgtgccctgctctacttcggctttgctacgggcggtcgccgtcgcagcgaggtggcggccgcgaccctggcccatctgcgtgcgctgcccgagggcggctttgtctaccacctggaccagggcaagaccctgcaggacgggcccaaggccggcggcagtccggacaagccgctactgggcgcggccgcggccgcgttgcaggcgtggctggatgccgccaagctcaccgaaggggcgctgtttcgccgcgtgtggggtaaccgggtcggtccggcgttgagtgatcgcgccattgccctggtcatccagcggcgtgccgcactggcgggactcgagggagacttcggcgggcacagcctgcgctcgggcttcatcaccgaaggggcgcgccagggcgtggccctgcccgcgctgatggcgatgaccgatcaccgctcggtggccagtgtcatcggctacttccagcaaggcggcgcggtgaacaaccccgcggcgcgactatcggatgcgccctga

SEQ ID NO: 503300 - DNA, 702 bp, Stenotrophomonas maltophilia
gtgacagtgctggaagagatgacggcagcagtggaagcgatcacgcaaaaccaatggtcaacccgacagggccaggtggtgcctgatcctgaggatctgcggctgggcaacgacgcagtcgagtttgatcgcgccacggtcctgtacgcagaccttaaaggctctaccaagatggtcgatgccgagcattggtggctgagcgcggagatctacaaagcgttcctgcattgcgccgccaccatcatcaagaaggagggcggcaagattacctcctacgacggtgaccgcgtcatgggtatctgggtcggtgaccggcaagccacgccagccgccaaggcagggttgaaaatcaactacgcggtcaagaatatcgtcgtgccggcactgcggcgccagtatccgcactgggccggcaccgtgaagcaggtggtcggaatcgacagcagtacaatccgcgctgcacgcacgggtgtgcgcggcggtaatgacatcgtatgggtggggcgcgctgccaatcacgctgctaagctgaccgagctggacttggagccgtccacgtggattaccgacgaggtgttcacccggttggcggatgagtcaaagtacggtggcgcgccgccgacgttgatgtggaagccttacacctggaaccagcagggcaatcgccgcattcatggttccaactggacgtggaaggtctag

SEQ ID NO: 503301 - DNA, 921 bp, Stenotrophomonas maltophilia
atgggggcgagcattatcgagcgactttctgccgacggcggcaggcgactggtggcggctttggccgagttccgcaccctggcggggctggaggctgctgccacgcagctggctgaggccggggaactgctggacgtggcggcgggcgcgtccttcatcacgcaagaagatgccgaaaccgacgtgtttttcatcgttgccggtgcggtcgacgtgatcatcaatggcaaagtggtcaatacccgccgagtcggggaacacgtgggggagatggcagccatcgagccgacccagttgcgtgcggccaccatcaccgccaccgagcccacagtggtgctgaaggtgcctgaaagcgatttcagtcgcgttgccgatgcacacccattgatctggcggcgcttggcagctgctctgtcgcgccggctgaaggagcgcaaccgaatgattacggccccccgcgaacgggtccgggtcttcgtgatgtcctcggtggaggcgctgccggtcacccgcctgctggtgcagcatttcgagcacgatccctttctgacggtggtctgggaccacggcgttttccgcgcggccaactacacccttgatgagctggaggcccagctggaacaggcggactttgccattgccgtggcgcatgccgacgacatggtgatcagccgcggtgacgagtggccggtcatgcgcgacaacgtcgtctttgagctgggcatgttcattgggttcctgggacgtcggcgcgccttcctgatggagccgcgcgaagacaagctgaagctgccgagcgatctggccgggctgactaccgttccttaccgatacaaacctggtgccgatgcccgtgccttgctggcaccggcatgcgagcagatccgcgcccggattctcgccgctggaccgagggactga

SEQ ID NO: 503302 - DNA, 1533 bp, Stenotrophomonas maltophilia
atgggacatagctggaaggaagaccgcaccaagaagcgccttgccacgcgttacgaggaagtccgtaaggtcgatattcgtgactacacgcgcgagacctcgctggagaacatcgcggtcaaccgcgcctatcgggttaacggcgcgcatgtctacatcgacatcgtcaatctgcaggacatgctcaactgcaccaatgctgaaggcgaaacgtgccacaagcgcgctctccgcttcctgaatcagcattaccgcgccgtccaccgccttctggtcgagagtgagacggtccgcgtggatttccacaaccaacggttgcatgcggtggtcaccaagccctatggcgatgccgacgagcgcgcacggatcgagcgcgcggtggccattgcccagctgaccatcgacgtgctggccgaaacgggcgatacggatgagcacatccccaatgcacaggtccgtgtgggtatcgacagcgggttggcactggccgtcaacaacggtcgccgcgccagccgcgagccgctcttcctgggctccccggcaaatcaggccgccaagtgcgccggccatggcgtggcggagggcatttacctcacccatggtgcacgggcgctgctcgagctgccggcgctgagcggcgacaaagaccgcaccacgccactgacccaggaccaagtggcggcctgcgttgaggcggcaggcttgggcgtttccaagacgcggatcatcgagctctggaaggaggagcaggaggacctgcccattggcgagttcgaattcagccgacccaccccgccgatttccgatctggacttcagcctacttagcgctgccaagtccaagcgatttgagggcgtgtcgctatatgcagacatcgacggcttcactaacttcgtagataagcatctggatgaggatccgcagcatctggtacgcgctctccacgtgctgcggtcagagctggatgccgtagtgcacttggactttgccgggcggcgcattcgctttatcggcgattgcctgcaaggcgtgctgttggaaggtacctcgaaggagaccgacaccgaagcgacggtgagtacagctgtacagtgcgcaggcgcacttcgcagcagcttcgccctggccattgactacttgaactccgagggttcgaccaccgaggagctgggtctggccatcggctttgagcttgggccactggcactgtccaggctgggcatgaagggcagtttggtgcgctgcgcaaccggcagggcggtgctggcctcggaggccgaacagcggcagtgcgatggcgtgcagaccgcgatcggtgagaaggcttacaacgccggtaccgacgcggttcgtcgagtgttcgcatctgaccgaaaggtggccaacctcgattacgcggcagcggtggaagaactggccgcgtcgggtgacccagtggccaaggcggtgttggcggcccattacgcagaggcggcccccgcggtcgtacccgcccttgaacagccgatccgcccgcactcagatatccactga

SEQ ID NO: 503303 - DNA, 876 bp, Stenotrophomonas maltophilia
atggcgttggccttcgaattgctgcaaggcgtggcaccggactacggtgccacgctgcatcgcgccgcaggcggagggagggctgagatctcggtcactcgtccaggcggggctgtgcatgttttcaccctggcgatctccatcgccggggagcacgtgtctgctcaggaagccccaggacaccaccaacttccgcaattctgccctgaccgacacatcaaccccaaccaaagcttctgcttgggatggggtgacggcaagccgggccacatcattgacgaagcggcagccagacagtggtggtcgaccgtatatcgattcttggcccatcaaatcagcgcgaacgtacgcagggtcttccctggcgcggaaaacggccgcgcccatggcgacgcggccaagcatcaagctatcgcagaacaggcagccgaatgcttgggcccagaattcaaggcggcagcgcaagccggcttgttagaagtccggcaagatgggcggccgggaaagcatcgattggagctgtggcgtggcaaacgacttcttgcgcgcgtttcgcttcgcagcaacaccctgctttctggaagattggcctgtccttgcggttgccgtcctgagcacgcgacggcggattgcgcagaccacgccgaagctctggtgacctatgtcctggaacggcaccgctgctcgctagccgacagggccttcctcgatcaatgcgctgcagcgggaagggtctgctgcgggaccttggaaacatgcggccttcgcatggccatccgacgcaagcaagtcgcatccacgaagagagagagcccccaacatgcaagaacttcgaaatactggcgaccgccagccaagtcaaggcgaccgcgttaa

SEQ ID NO: 503304 - DNA, 525 bp, Stenotrophomonas maltophilia
atgcaagaacttcgaaatactggcgaccgccagccaagtcaaggcgaccgcgttaacgccgcatggcagcagctgcaactcgtgcttggcttcttctcgcgagtggacacgaagctatcggtcggtctgggcatcaacctcggcatgctggcgatgctttccacccgaatccccaggccggaagatctcacccttctcgtctcagtcattggcgtgctgttcctgacgccgctgacgttgagcttctggaacctgtggtggggatacttcccagagcttcgcggcggatccaattcgctgatcttctttcttcgaatcgaaaaaatgaccgagtctgatttcttgcgcgcttgcgaggacagaaccctggatgcgtttgagcgagacctgctgggtcaatgctggaggaactccaagatcctggcgtccaagttcaagtgcttgaagcggtcttacctcgctactgccctgactattgcaccttggatggcgctcattacgctgctgccatcgcctgcgaaatag

SEQ ID NO: 503305 - DNA, 1371 bp, Stenotrophomonas maltophilia
atgatttcctggagtcgcctgttgatcgatgaccactgctcatcgtggtccatcgttcagcttttgggttggctaaatcgctcacgcgtgacttggctaaagaccaagcgagcgtggcgattccatttgcgcggccacgcggtactcttgccggatgcaggtgcaggtccgcagcttgccgagcaagaagaactcagtgatgtggcacacctgctcaccgaaccgcgcaggtggcttgatcaggacgagcttcggtactgcccagtctgcgttggttacgggatgcactacgcgtatcagcaggacgacaggttcaggaactgcattattcatggtatcccccttcagctacagtgcccgagctgcggcacttcactcgatacaaaaggcgtaagctgcaatggatacgcctgtcttcagtgcggccagtccctgctcgacgcaagaacctccatgctgcataggggatgtcaaggcaaattagcagcttcggcgctaaacgagctcgaagtatggcagggggcagtagacgagctcggcactggatatcaaacgccgagcacggggtatgcgcacccgttatggggaaacctgtcaatgggtgagaacaccggctggtattggcgcgccattgaggtgaatccgaacccgttggtcgccgcggcgctggagccggcaccaagcaccttccacttctacccatcactccccaagctgatatctctgtgcgaccagcgagcggggtggtcggcagagcatatactcccagcctaccaggccatgtttagagcagtttcccgtcacctccgacgaagtcatctacgaggtcatggcgcttgcgccagatatgcgttagcggccatgggtggcttgggagggcgcatccccagggagatctgcatacatcccgagatgtgctgcttgggacagggctatgcgctctggcgactgcagtgggaccgcgagttcaagcgaatggatgcatggttggatcgacattgtgcagacgactgggaggagcagatggggcttcccagccttcccgccgcgcaactaagccttgccagctctttccagcactgggtctacgccctagcggagattcagaatgcatacgccgactcagaccaacgcgcaattctcgatggcgtgacagacacgccacattgggccctccttcagccgggggccgcttacagttgtccgatgcactttaggcatcctgacttgggcacgcttggtcgatgcgatcgcggtggcgtacgacggcgcgaacatgagcgagttctatccagcttgcaggaaattggaagacaacggcaggctttccaagcgcgcctcttggccgaccttcctgagccacccccatag

SEQ ID NO: 503306 - DNA, 1014 bp, Stenotrophomonas maltophilia
atgcacgccaaggacaaagtggcggcgatccgtgcgacttatccggacctgctcgctgaccatccgttattgagggctaacgcgatacttgccacgcccgccgtgagggaggcggcgacgctcatcttcgataaggctcgccgtgcgcgttcatcggttgcattctgggcgcacccactctccgggaagtcctcctgcattgccgccctgagaaagctggcacctgttcagttcccacgctgcggcttcatagtctatgaaccctcctccaaagaggtccctgcggaaggcgcactgattgaagacctgctatccgagatcggctatgagggccgcattgatcggacgctgaccggaaagcggaatcagcttgaaagagcgctttactcgctggctatcgccggaagacgcatcttcctggtgattgacgaagctcagaacctccacgcgaaggagctcgggtggctgaagcggctggtcaactggctcaccgttcgagatatcaaagtgacggtggtgctgtttggccaaagccagctgtgcgccatgcatgaccgactcaaggtccagatgccggacttcagtgagaggttcatgtcgcgactcaatgagttccgaagcctgcaggacgcggctgacatacgagtatgcctgcgctgttgtgacgaggaagcgcagtatccgacgggatctgggtggtcgtacacccagtacctatggccgcgtgcgtacgcacagggatttcgcctcgcaaagtgtgcagacgaaatgtttgaggcgttccgtgcccgctccgggggcgtgattgatcgagagggggtgagcatgcagtggatagcggaagcgctcatgctggtgggcctcgacgcggagaccagcgatgccgatgatcttgtgctgacccgcagcgactgggaacgagcgatcgaagacaccgactatggtgcgcgtagtccgcccgcattcgtgtctgccgcacgacgtggtcgatttgatcgtcaggatagtgcatga

SEQ ID NO: 503307 - DNA, 1938 bp, Stenotrophomonas maltophilia
atgcccgccttgcctaggtacacaagaagaacgttgcccactgacctcagagatatgtcggcgtggccgtcgttcgatttcagcgcgcttagtccggaggatctagctgtatggaaccgtcgcagggctgcgcttgcttgctacctcgcaggcgatccagtttcattgatcgaagagcgacacggctaccaatgtcatcaggttgtactcttcttgaaccgatgtctccaagtgatgcacgacggccgactcgccggcttcatgggcctggtaaagggaattcggaccaagccacctgttcgaagacgccccgtccgctcaatgccccatctgtcacgcggtgggtacgcgggcgcacttgaccagacgttcacggttcgtccgagcatccgagtcgccttggataagtacttggcgacgggtgtcgaccctgcggggaacgatcgggggagggtaacgccacgcacagcacatcaggttttcctgaggctctgcactgatgcaggacttggtccttcagactggccgttctgcgtagagcgccaaggacgtaccagtcttgcccaatacttacaccgattctttgccgacaaccatcaacaggtagcgctgcttcagttcggggagatcagccgagatcgctccaaacggggcagatcgccattggaaaagatcgaggcgaaggctcccttcgaagtggtagaggcagatgagcacgaagtgcacatgatcatctcggtcggcattgaaacgccgaaaggaacgaaatttgtcccctgccggaggttgacgctgatcgtagcggtggaccgttacaccaactacatcttggcatgggatttggtagtgcgtcgccagccatccagtgcggacttcctggagtgcatcgatcgagcgattgcaggacagtgcctgtcggttgaaatcaaggaagcgttgctatcgggagtgcggcgcaccaatcaatgtggacttcgaatcggctttgacacgcttttcgtcgacaacgcactggcgcacctgtccgactccgtatgcgccaaggtccgcgaatccgcgggtgccgctgtcagttttggcgcaatcaagcgcccccagcggcgctgcctggttgagcgtgttttcagctggatggcacgagagctcttccatcgctcacgcgccacaaccgggaacaatcccgtagacacgcgacgaatccacccagagcgcgcggctgtacgtatgaagatctccatgaaggacatcacgcacgcaatgacaaatgcagtagggctgtggaacaacaagcccactgaggccaattatggaagtagccccgctcagcagctgctggattactattccaataccagcggggtgctgccgccactgtgcccaccccctgaccttacgtctctgccgctgaggcttgaaatctgcatgcctaccgtacgcggcagtcaagcgaagggtaggttgccgtacataacgtatgcctccgtggagtattcatccagggagctcgcggcacgctgggacttggtaggtgagaagatccgagtgcacgccgaccctaacgacatttctaccgtcaaagcctacaccgcagagggcgaagcactggacgagctaacgccaatctccagtcgttggcggtatccgcactcgcacgagatgcgccgcttgctcaaagccaaaatcaagcacgcgcatgaccttcttgaccaacatcccgcccaggagttcctcgcggaccaggaacaagctgcacttgaagcaaacgaaaaatcagcccgggtgactcgagctgcctccatagtcgccgaggaggcccgcaagggatatacctctgagcagccgcagccgacgcgctcaaagcgcgaatccacacagcagctcgtgcgccgacttcgtaagccaacggtgatcgacttcagcgtcattgggaaaacgtga

SEQ ID NO: 503308 - DNA, 663 bp, Stenotrophomonas maltophilia
atgagtttggcgacgcgagcgcgaaaacgcatcctgggcgtacggcaggcgcgcaccagcaactcttcgaatctctggcacctcaagtcgccgctcgctagccatgcggtaaccctcagtggcgatctcagtatgctgctgttctactactgcgaaggtgatccagcggtccaccgagccgagtatgccgggccagaagttgacctctcgataggcgacatggaggcgattgctgatgcggtggtcgtccttgaggatggggcgtcccaaggcagagtggtagacgacggctccaccaacgccttagagaaaatttccgcactgcaagaggcctgcggccgatcgatcacatcagttgccgttggcgatctgattgaggcgtccctgcgcatccgtaactggaaggcagccatcgcagcctttcaccgctgcggaggcgtggacctagcgccacttgcagacgaagtggaatcccatgtccggcttcgccgcttcactaccctgggaaatctagtcaatgacctggatgcccatcatgcatcccatgtaattggggcagccgtactggcgttgcgagcgcgctcatttctatcaaacctggataccgcgccatggtctttgcacacgcggttgatgaggctcgatcatgcccgccttgcctag

SEQ ID NO: 503309 - DNA, 7614 bp, Stenotrophomonas maltophilia
atggcgtggtacgacgtgggagcccttttggaaaaggttccgctggaggatcttgtaaaccgcctgggtctgcagacggagcggcgtggccatcaggtaactgcggtatgccccttccaccaggacacgcggccctcgctcagcctttatgcccgggccgacggaatgcccgcccatttccattgctttgcgtgcggggcacacggcaatgcggttgacttggtaaagcaggtcaacggagacgatttcaaggccggcgtggagtggcttgcccggcagtacaacgtccagcccacacgcggtaagccaggaacagcgctggcccgggggcgcaggctatcggcgctggagttcgcgctgcagcagttcgaccgcagtcacgatacagtggtgtttgaacgatggtgcgccgaacgtgggtttgatacggactttttgtacagcaaagggttgcgctgcatcaccggcccggtcctggtggctgcggtggaagcgcataagaaggagggggagcggctggagctgctggatggtttgctggagttggggctgatccggcggttgcgtgcgtttggccaagcccgtcaactccagctgcgatacagcgaccagttccgcgactattttgctgacgggcgcattgtcattcccgtctatgacgctggaaagcccccccaaaaggttgtcggtttcgcgggacggctgttggatgctgccgcacccagcgaggcaccgaagtaccggttaacgccgggtttcaaaaaagccgaacacctgttcaacgcgcaggccgcgtttgcgggagtgaccgctcagctcaaagcagacatgccgtccacgttgtatttggtggaagggttcctggatgcactgcgcctggaatcgctgggccaacatgccgttgcgctgatgggtaccagcctgagcaaagagcagtacgcgctgctgtccgattttgtggagacccgccctgacaacacgcaggtgctgagcctgtgtgtgttcctggataacgatgagcccggtttcaacggtgcggaccggcttgtccgggaactgctgggggtagccggggtggacctgcagtggatgggcattccctggcgcacgcggcccagcatgggcaaagacccggacgcgtgcctgcgtggtgcatccacacaggatttcgcccaggaatggttgacgcaatacaccatgccggcagaggcgttgctattgcttgcatcactgggtggcaaggacagttcggcgctggacgaaggctggaacagcctgcctgtggcagtgagggaaagagcgcttttccgggcggcgctggcaataaaccgggcgcgtgggaaacggcagcacggtgcgtttcgtgaacgccttggccgcgttggcccggcgcagtgggcggtggacctaggcaatgtgctgaaggaagacggcgcgacgccctcgtgggttcccaaaggggtttatctcgatggtgactatgagcgcaccgcactggcgcggaccttggcgtactttggctcgcggcggggggagctgccgtgtgatgaagaagcctggctgacactgggtgccaatgcgcgcctctttgacacggtagctctggatagattgaagagcgtgaccgccaacggcgaggagtggcgtcaggctgctgccttcgaagccgtcaacctgcccaggaagctgagcagcgatgaaaaggtgctcagcgatccgcggcttaaagtcatgccgcacccggcggatttgcatgttcaacagatttttctcaatgagctgctgactgagcggcatgaccgcctcagtgcggatggactgacgttctctgccagcatcccggcggtgcggtggtactcgtcgcaggataaggtggttgtcaccgggccatacccggcgctcaacgagccggacctgcgtgccggggagccggcgacgctgagttttggctaccagatcgacatggaggtgctggaagggcacaagacgccttcggaccagggcatgttccgcccgtttggccaatgctggcgcgccttcatggcctgcctgggccaacaatgccgggccattggcccgcaggtgcatgtactgcgcttggacgtgaagcggtattacgactcggtgcagcgttttgtggtccgcgaccgcctgcttgcgcccttgatcaaggagatcaacgccagcgggttgccggaagggtttgcgcgcatgctgtccctgaaaggcgagcaggacggcggtggttgggccgaggcgttggaacggctgttgaccgggtttctgttcgggtacagctaccgcaaccccggcaagcaaggggatgaagcttggggccaggcagctgtgggtatcccgcaggggccggtgatttccgcctacattgggacagttgcgctgtttccggtggacaactgtgcccgtcggttcattcgtgaaagttcaagggtgtcagaaagcgggcaggccattccccgcgccgggtatgcccgctacgtggatgacattgtcatttttgccgacagtgcgcagttgcttggccagctgcgtgaagcgctgcaggccgaagcaacgctgttgtcgctggcgttgatccaaaagggcgagcgtgtgcgcccaggctcaccagaacaggtgatgcgccagctcaacgagggccgtgggttggctgcctcagtccctggctgggaggccccgctggtgggagacggtgaggtcggttggggtttggcacaggacatccccagtgtcgaccgccagtgtgcgctgcagatgctgcgccacccggacctgttgagccggccgaagaccatccttccgcaggtgaaggcggcattggctgccaaggcgttgcggccgaacgacattggtttgtgtgcccgctggctgtggtggttggtggccttggaaagcaacagtacggtggccaggcccagcgcggacgtatgggcgcagtactggcggctgtgggaagaggcctgccaagcattggtggagcggtgggaccttgcgtttgagccgcgtggttaccactggctgtatgccatcgaaggcctggaccggctgcttgaccccaacccctgggtggagaacggccagacaatgagcgaggtgcccaggcaccgggcccatcgtctggagttggcgcaacgcgtgtgccaggcggatttcttcgatttcctcaaaggcacggttgccgctgaggaaaacctgtcacacctgcgccggcgcgcgcggttgatggtgatgaaggcaagccggttggtgcgccagcgtgttaccgggcacaaggtcgagatgcacctggcaacacggatgacctcggtggagtggctgtgcctggctgctgaggcgctgaacgctgtgcctgacagtgaaattgaccagtggcagccgctgaacccgctgaaagaacgcgggcggatgctctcgctcggaggatcgggcgggctgggccagtccgatgccgtgtgcgacatgctcattaatagcactccggatgacgcggccgacaagaacgagacgtggagcatgacggtggatttcgtcttgaacagcgctccccagcacaaaggcctggaagttctggccacgttcaagcagctgttcgacgatggcacgggtgaggggctggagctgattccgaacctgcctgtggccagcaaacagacctcgctctatgcgttgaacaggcaacagggcccgggcagccacgtgtatgtcttcaccgcgccgccccaaaccacgccatcgcgggatttcatccaggttgcgttggtgggcggccggtcgcccaccgtccaactgaaaccgcttgcgttcgatgcccagcaacacagcgccacatgcctggggaaggaaaagagcgtcgaggttccatggaagcgcattggcccggtggagttggcagtgttggggccaccgacacaactggccgccgcgctgtttgaagggctgtatgcaatgcacctcagggccgttgacagcgacagcgacgatgacggtgagaaggtggcctacgtccccttcaaaccccagctggttcagcacgaacgcgatggcgaagtggtcatccacctggtgggcgagccggtggagcgcaagtatctgggcgtcaatgcttggttccacgatgacgatggccgggtgcacaccaccggcgttccccagcgtcacgccgacatctggcgggtggggtgggcggttgccgatgtgctgggcattgcggcgagcatgtcgggggagacgggtaaccgcgaggaggtattggccgaggatgcccttcaagccgacccgtccatggaacctgggcggctgcacgccgacgagctcgagcgctatgtgctcaggcagcaactacgcaagctgcagggcgcttacctttccgatgcacaggcggacctgcccgtggacgaagtggccgcgttgcctggaacggtgcgccgggcgctggagctgttgcggagctatccctcacaggaagacctgcgcaccaggacgcaacatgtgctggtgatggaggcacagaccaaggccatggcgctgcgcctgggcagtggctctggcataggtactgacctgcgcaatgccctgcaccgggtgttcccccaggccgttgagtgccttccgctgtgggtgctgcagggcatgggcctggcatcggcggggcgggcggggatgcgccctgagctggggttgatgcaggcgctgtatgacgccctgagcgatgcgccgggagtgcgggccgagcaggcgagcgacaaggcgcccgcgttgcgggtggcattggcccttgccgtggccaccgctggcctgcgcggcagcgttgccgcggtgtgggggctgacgtggggcaacaccaaacggtttagcgagctgccccgcttgcccgagacatgggcgctgcccgagacgctgcgagccgacccgcaaaccgattaccgcagcatctgcaaagggctcaccgatgccgatgccgatgtccttgagcgggccaccccatggcactggatactggcgatggcggggctgctggatgccagctttccgcaggcgttggaagttccggcgttggcggtggtgttttccacgctcggtgcgtggcgctacgccgatgcggcgcttgaccagacgggtcaagccacccaaaccgacgtaccacacgaagaggctgcctggccgtttgaggacctgcccacgctcagcgtggccgagtgtgatgcgttggtggaagcggtcaccgcggccatggtggctgttgatgacgtgctgggcatgcaggtggtgggagcgaaggcgccgcgctttggcagagacccgcataccggtgaattctccgatgccagcggcaagggctggcagatgtccacgccccagtactcctttctggggcggggcgaggttgagcgtgtgtgggcgggcaggggcaaggtgtctgcctggaccgaaacgcgaaggacatcagatggcgacctgttggccgtccattggttgaacggcaagctggggggctggtttggcaagcacgagggtgaggcggtccgcccggttgaagctttcacgccggtgcaggcagggggcgctggccggcttgaacctgcgccgttggcagaagaacagggccagcggattcccccaggcaatgaaggcgctgctgcgccagtgccggaggcgccgccacttgtttccttgcgggaggatgcaggtggtgacacacagcttgatgaggctgtacctgtccaggagacccatgcagcatcgagggctgatgttctggacgaactgcgtcggttgcgggacgcttccttccgtatccgtagaagagcgggggctgatgatagtaccgacctagcaggcagccacttccgcgtggcgctgctccagctcaatgctcacgacagctactgccacccgctggcggaagtgggcattggtgggctgccactgggggagcacattcacgaggcgttggtatcgcagctggggaacaaggacttcacaacagccagaaaagcggccaagcccgggagtgagcaccagtggaaggataaggtggatgttgtctcctggccggagcaccggcgacgcgcggtgctgaaagaagcgctccatgcatgtgacaggctaggtgtggagctgctggtgctgcccgaggtctcccttcgcaaggaaacagtccattggatgaaggaggagttggttaaacactaccctggacttgcagtcctggccggcacctaccgggactttagtccacaggaccattcagatcacttgaaggaaatgctctccctgctgtggcggcctgagccgtcgctgtcgaaaattttcaggctggaagacaacgcgatctttgagctgtccagaggtaagaagtaccggtccgtcgcctcacacgagctgttcaagccggatatgaatatcctggcgccgctgtacttcgatacacgtgtgatggatgccattacacagtcgcatgaagaagcgcgtctgaaaggagactggagttcagaccaggtgaaggggctggttggggcgtttgccggtggctcgatgaagttgcgccattgcatggaactgatctgctcggagctgttcctgctgaccagcccggcaaatcacaggccgttgatgcaggagctggagaggatgctggccatttttgacggccaagcggcggtggacgtgaaaaatgtggtccgtcgcgatgtggaagcagtgggtgagctactgagcattgcacagccccagcgtgagcgtcgctcggtgctgctggtgccggcgcacaccaaccgcaccaacgattactggcacgcggggcaagccagcgtactggcctccgggactgtcacggttttctgcaatgccgtgcttggtggcgccagcggaaacagctgcttcatcggcattgactcggtcagccgatcgcctttatcgaccggcacggtaaagctgctgacgccataccacgggtggcatacgggcatccttcaacccgactgcaagggcgcgctgtcaggcaaggaccaagcgcttgtagtggtggatatcgacccggtgcatgtggtcagtggaaaaccgcggccacaattgctgcccgaacccatgtccttggtggcgtacttgccaattgttgaggtggtggacgaagagcaaaacgttaaaaaactggcggaggcgttggtagatgccgacaggttggatcagcaaacatctgatgatgcggtcgcttcgctggccaatagaacggccaaggttgccgaagtggaagcactgttgaagaatgagcggttcagttcaaagggtgcgtcacacgagaagaagaagtttgggcacgcataccaggcgctgaaagagtgctcctacccgaaaaatggcgagggctatgatgcgctcggagcggatttcttcaagttttttggcgatccgaaagcggtctgcgaacgcctcaacgcttggcacagaaacagacatcagcagcctggcgcgaaggtgggtagcaacaaacgttccgagccggcgtgggtggacttcctgattgcagacttgacttgtggcggggagcttccgagattggaggtgcctgcttggcgctctcttgagctcttgtcatga

SEQ ID NO: 503310 - DNA, 756 bp, Stenotrophomonas maltophilia
atgccctatatcggaatcggactccacgtactggccgccatctacttcgcggtgcacgccatccgctcgggccagagcctctactggctcatcctgctcttctcgttcccgctgctcggcagcgtcgtctacttcctggcgatctattttccggaagtccgccactcgcgcggcgcgcgacaggtcgtccgttccgccaagcagctcatggacccgggccaggaccttcgcaacgcccgtgccgaactggcgcgcacgcccaccgtgcagaaccgggttcgcctgggcatgacgctgctggatgccggccaagcggaggaagccagaaccctgctggagcaggcagccagttcgccgctgggcgacgatccctacatcctgaccggccttgcccgtgcccgcctcgagtccgggcacgctgcgcttgcggtggagacgctggacgacctcttctcacgccacccggatgtgcgccgcaagccggaacagacgctgctttacgcgcaggcattggcggctacccaagcccccggtgcccgcgccgcgttcgagcgcgccgtggaatgcggaaacgatgcggccgcccgctgcctctacgccgaatggctgatggcgcagccgcaacccgacgatcgcgagcaggcccgcagtctgttcgccagcatcatcgacgatgcccagcactggtcgcgccacgcgcgcagccacaatgccgcctggttggaacggaccaaggcggcgttgaagggctactga

SEQ ID NO: 503311 - DNA, 1947 bp, Stenotrophomonas maltophilia
atggttactatggtcgacctgttgcccgtcgccaaggaagcattaaagcctgcctcaggttttatcgatgcgttgcttgcgccgaaactggatagggtaagaaaatgggcgcagacgcgggagctggattctcgtgttgacgctactcgtctagcggacgcttcagagaagtaccttaagcgtcttctcaagcgaatttccagcatttcgtcactcgtattccctcagcggtccgtccctctgcctgaggtttatgagccgctttcgctggttgatgttacaaagcgaatgagcttcgaaatgtctccaggtcgtctggtcggagcgaagccgatattctggatggagctgacaaggccgggtgcccggagtttcataatcgatggtgctggtatgggtaagtctacctatgtgaagcacctttccatgcttgaaataagtaattcagacagaatccccatttttgtggagttacgcagggtgggggagaacgagagcttggttgaggcccttgctcgagattttgatgatcttcaccaagcatatgatcgagagctttttctcagtttgttgtcggtaggtagatttcttatcgttctcgatggattggacgaggttcctgttgaggctcgacaggcgttgtgtgaccaaattgaagatctatctgtaaaagcagatacggcttcaataattgtcacttctcgccccgaggtctcgctgccaataatggcggaatcaagagtttttaactttctccctctaagtaaagatcaggctgcttcattggttaatcggtttgatcagtttgctggcattgatgtcggcgctcgtttgtttcatcgattggatgagttgcctgagcacttccttgagaagccaattctagttgcattgctctatatatcatttgggcataatggtgagatatcaccaagtgagtcaagcttctacgatgatctgtatgcagcgctattcaaagggcatgacctgtctaaaggcgggtttgcgaggaggaagttgtccgggctggagttcgatggctttaggcggctaactagagcatttgcatttttgctgattgctgatccacctagtgggggaatgacggagcagaatgcgattgactacattgagaaagcgatgggattcgcaggagtgtcacctgtgtcatccgtcagcttcttagatgatctgctaattgcggttccccttctctctcgcgacggtcctgagctaaagttctctcacaagactattggtgaatatttcgctgcagatttcatagcaggcaccccgaatggtgcaagtctattgcagtcaatagttaagtcgccggcagctgaccagttttctcaggttatgtatttcttgaagagtctgcacccacagctctttaggcagcaaatagttttgcctgcattgaaggagttcttatctatcttggagagcgttggcgatgtccgtattggctcgcttcgctttgctgttggtaattttaaaatattggcctcaagccagaatcagattgaggttcgctctcccaaattcacacggcgtaatccggcgaaaaatgctaggcggcttccgagacctctccagtttgacctcagtagcggcgtccccttccttgacctgttcgtcgacgacgtgactgtacatttggagagtgaaaattcatctaattttatctctggcttcgaatggatgccggcagatcagtggttcaacattgatgagattttgtcacaagaagagaggatccgggctaaatttataggatttattcctgcgatagttggcctggcaactggaaaaaaagcaaatcaatggacaactcaggattgtctaatagatgttgataaggttacccttattaagggtcagattgaggccgagaacgcaatgtcggaaggtctctcggcgatgcttgccgggctgaaattatag

SEQ ID NO: 503312 - DNA, 216 bp, Stenotrophomonas maltophilia
atgaccaagatcgaccccgcatggctggaagccttcgacaaggagctcctccacctgtttgccatcgaccaccgcgatgcttgcatggatgagtacctgctgggctgctacgcagaccttctgcctcgcgaagcagcactggcgttcggcagcgactacgacctggagcgcgacgatgcgctgtggcctcggccgggcgtggcgctgcaaagttaa

SEQ ID NO: 503313 - DNA, 645 bp, Stenotrophomonas maltophilia
atggaagcatcgaagtcgaaccagcctgttcccggcaattacttcctcctgatgccggataccacgcgtgggggaaaggggcacggcgttgtgttcgagaacgcgaagcggctgcgcatcccgccgcgcctgatcctgcgacccgaagagggcggctttccgtccatggcggagaagccgttgctcgtctactcggcaaagaaggggagcctcccggaggatctggaggggggcctgagcggctactggatggtctccgaacgattacgcggtgctcttgtgtctgtggatccggccggcttcgagtttgttgagtgtgactaccgccttgccgatggatccaaggggccgcggtacttcctgtgtgatgtaacccgtgagctcgatgcggtggacgaagaagcttcgaaacttcggatcatcactgacgcaggctatcgaggtgggaggttctacgaccttaggggcggagccagtctggcgttccgcaagcaggtcatcggtcaagccagaatattccggacgccttactcgggaaacctcgtcttctgcgacagagagctccgcgacgctgtgtggaacgctggaatcggtgggccgcgcgtatcgcggggcctctcgttcaccgacgcggccaggatctga

SEQ ID NO: 503314 - DNA, 435 bp, Stenotrophomonas maltophilia
atgaagaaccagaagggcttcacccttatcgaactgatgatcgtcgtcgcgatcatcgccatcctggctgccatcgcactgccggcctaccaggactacaccgccaagtcgaaggtcaccgctgcgctggctgacctggcctcgcacaagacccagttcgagatggaaaagagcgccggccgtgcgccgaccttggccgccgctggcttccaggccaacaacaccggctcctgctcgaccatcgccgttgacgacgatggcatgacctgcaccatccgtgacccgggcacccgcatcggtgccggttctaccttggcgttgacctataccgataccgtgaccgacgccaccggcgcgatcactaccccgggtggtttctcctgcgtcgtgaccgtgatggacgacaagttcattccgaagggttgcaccaagtaa

SEQ ID NO: 503315 - DNA, 1053 bp, Stenotrophomonas maltophilia
gtgttggcttgtggctcgcgaaataattgtgggggtgggatgagtcaatttcatcgggataatcactatgttccaaagttctatctcaatcaatgggctactaaagggcgtgttgctacttgcaatctcctggtgccagatgtcaggactcccatttgggggatgaggtccctcaaggggattgcatttcgacagaacttgtataccaatgtcatagatggtatagaaaccgacgcgcttgaaagatggttggatagggaattcgaggcgccggctgaacgcgcgcttcagttggcggtacgggatcagcggctcgactttagcgattggagattgctcgtgcgatttgcgatgtcgcaggatgtaagaaccccctcaaggttacgggaatttttacagcgatatggatcgttgatgccatcgctgctcgatgaagttctaactaacgcagtagctaagcttgaagctggcgttttacctccatcgacgcgtgaaagtggcaatggtcatggtctacctttgaaggtggagatcagtcgagaagaggatggaagcggaaaggtccatgtcgaaacagtagtggggcgctcaatgtggcaatggggcgttgaacacctgcttaccagtaccataaataaaatttcagtaaaggggtggactattcttaagccggccaacgggttttcgtggccgacctcggataatcctcttattcgactgaactacgtcaacgatgttaattacaatttttcaggtggatgggaggtgcaaaaaggggatattcttcttcctctctcccccaatcacttgctttttcgaagtggaggggttcggcctttaaagagaggaacgcgccttgaccagatcactacaagtagaattcaacgaatgatagttgagcacgcagacaggttcgtgtttgcgcgggagccgttcgcggtcgaagctattcgttcgagggtggtggacttcgaggctgttagggaagagcgtgacttctggcggcggtggaacaatgatcaaattgccgtcgagcagggctttaggaagtga

SEQ ID NO: 503316 - DNA, 2373 bp, Stenotrophomonas maltophilia
atgacgcaagattttgagttgatagaaggtttcgaccccgagtcttccattctcttcttgggctctggatttagtcttggtgcgaaaaatattgcgcgaggagctccccccaatggaggggcgttgcggcgccacttcatcaaggaattgaagcttccagatgacactgagtacaacttgcaagttctaagtgaagaatttgcagagcatgattctgcgaagctacgtgatgagctctataacatatttagacttaccgagctgactgccgggcagtcggcagtgctaagtgaatcgtggcgccgaatctattcaactaactacgatgacgcggttgaattgcatcgcctaaacacaaagagaccgctcgattcctatgatgtctcggagcccgttccgaataagttgcctcatggtgcggtggtgcatctccacggaagcattcgggttattacgcctgacaatgtaatgtcgagcttggtcctcggtgaaggatcctacgtaaatcagtatgtttcgcgctcgcgttggtacgaccaattccagcgggatctggcctatgcaaatgctatctatatcattggatatagtcttgctgactatcatattgcgggtctattgatggctaatcctaagctcgcagaacggactgtcttcattcaagggccggaggtcgacaacattttcctgcggcgcaccgcgcagtatggacgtacaatgtttgtgggtaccgacgggttcgcagagatgctccggcgcgcttcacgatcgagtgccccctcactgagcaacttgcgttctttccgcacgttgtcccctttgcgagacaagaaggcggtcgctcgccccactgcgacggaggtctacgatcttcttgtctatggcaatttcgacccaagccgtctcgctcgctcccagcctagtgaagagtacgcaattgcgcgagcggactccgttggcgaggcggctgacattgtcgagagtaaggcgtcgctggttgtagacggtcgtcttggtaatggaaaatcaatatttcttcatctgctagcgtttgagctttcctcaagaggctggacttgtctccaacttcaactggggcatcccgatttcccgcgcgagatttccgcccttaccggggttgatcgattggtcgtatttatcgaccagtattctgaggcgcaggatagcttgcgcggtcttcgcgaggctcttccacaggcaaagctggtggtggaagtccggactggaacattcgaggttcgcttccatgagtttgcgcagctgctgcccaagccgtttgatcgcgtgagccttaatggtctcaagcgtcaggaaatcacttcatttattcggttgtgtgagagcgctgggctccgcacccctgaccccgatcatcgcggcgaccttcgcgatcttctgcttgatattttcgagaatgcagcggtccgtgatcgtgtgaagcaggcgctgtctcctcttttcgagaacagggctactcgacgaatcttgaccatgacaatgttgatctccactcaccagggggtagttggtgcctcattcgtgagaaatgtgatcggtgaggatccttttatagcgctcaagcccttagaggatctgtctcaggagatttttgaaacatcaaacgagagctttaaagttaggtcgtcgatattttcctcgtttgttatctcaagtttaattgaatcggaggagattgccagtgcagtagtcgacgtgacgttggctgcagcgcaacgccgaagcgagcgaccctatcgaattctcatgtcgagcatgatggcatattcaagcttgcgcagaactctgcgtggtaagggtgattctgaggcagttatagccgctatctacgagcgtctacgatacgatgagcgtgtcaatcgcgagccgctattttggctccaatatgcaatttccatggcagagaatgaccgccttgatgccgctgatgaattcatagcaacggcatacaggaaggccgatgaattgcgcggcttccaaacttatcaaatcgatacgcaggctttccgcatcgctctcatgagggctagtcagcaaaagtcggggcagcccgtaatcaacattgaggcgataattgctggagttgaacgcatcgatgctatgttgggtgacgatagccatcgctcatacgctatcaaggtgttggagcacgttcagccgtttgtaatggcgcgtattggtgatttgacgagcgctgagcgcaccgccattcatatatggctactgaaggttgaaaagtcgctctctacgttgccagaggggtttaaggtgacgtccaactctgatgtagtgcgcaagagtgtgcaaacggctgcgagtttgttcctccaatga

SEQ ID NO: 503317 - DNA, 2286 bp, Stenotrophomonas maltophilia
atggccaaggacgacgaacgcgatgctccgcctacgatagggagcggctacattggcgcccagatgacgcgggctttgcgcgcgttgcaggaggctgccaatcgacagcagcgccagtccgcacaggcacgtgtcgatcgctggagccggctgctcgacggcaaggcgcttgacctgctgcagcacggctctcgaacgcccatcgagggggcgcccgcatgggcaacgccggaagtggttaccggcggcttcgccaccggtgcgctgttggccggtgggcccctgctggattgggaaaggcaccttgccgcccaggtgctggacacgggcaccggcaatgagcggcagcgcctgaacgcatggtgcctgggcgatgagggcatggcctggctgcacgcgcggttgcagcagggcgactatcgcgtcggcgtaccggaagagtcggcgctgctcaccgtggcctggctcttgcagcagggggcgcatgcgcaggtgggagcgattctggccgccatcgtcggctggttcccgagccttcgcttctatccggagccggtaccgttggcggccgggactgaaaagctgccggccgggggagacttcaccctcttcgtggagaccgccggcgccgtcgttgcgcagttgcagcggcgtacgagttcggcacgggtgaagacgcagcatcacgtgctgatgcaatggcgcccgttgtacgcgaccgctgtgggggtgttcctgcagacctggcgcgatggccagccctgcatgcagttcccgcaggactggttgccggatgcgaagcaggccgtggccacgttccgcacgttgcgcaggcaatcacctgggcgcaaggcgagccggcatcgtgatgttgaactgctggagtacctggcgttgtgcgtagatggtgcggtgctgacgccacaccagaggtcacgcgtgggccagatcgtgaacgatcacgtaggcaagcatggcgtgcctgactcggacacctacgcggcacgcatgcgcttcgagcaggaaagtgttgctgcacccccgcatgctgcgctcgcacgcatcgccgccaatcgcctgcgcctgttccctgccgatgccggtgtcgtggatgttgcttccctgcaacgggacgtgcagccggatgaagcgacttccctggttgcggcgggtagcgttctgccccgcacgctgcggcagcatgtggcccggtgccagcagggcaccgttgaacagcttatcgaagccggcctggttccttcgctcgagtcgctcgcgctgctgcttccgcagttgggtgcgcgggttgccgagcgcggcttcaccgatccggcgcatggtcgtctctatgccgcctgccggaccgctatcgatgcacgtcgttcactgttgctgttgaacctgcagtcgcaggtgcgcatggcggagttgccatgggctgctggactggaaagcgaacggcagcgcgggacgcctgcggcccggcggatgctggccgacatcgtagcgcttgccttgcgccactacccggaaacccccttgccaaaccccctgctgcggcagctgcggagcctggcggacagtgctggtgctgatctgcccctggtggaagagctggccgcagatattttcatgggcgcgttcgcccccggcttcgcggcagcggcacggcatgccggacggttcaccgcaggcagtctgtacgcccgttactacggtatcgacagcatgttgctcgagcggcttggcgaaccgaggccccgaacgggccgacggtcgcagcatcgggtagacgatctggcgggcctgtgcctggctcgggcagaccttgcgccgggccaggcagggcccgctgcgaatggtgcagtgatcgaacaggtgcagatcctgaccacccacaacctggcggtcctgttcgaccgtttccagctcgacgcggtgctggccgaggaactgccggacatgatccagcgtggtttttctgcggtctgtaccgacctgcagcaggttgctccgcattggcatgcatggctgacggcccgcaagcgtggtgcctatgcgtggcggcagatggtgttcttcctctcgcgcctcgatgacgctggcctggcgcaatccatggcgacgctgaggtcactgttcgccgcacaaccctccggtttccagcggcgtttcgcgcccgcgatggacggcctggtggtcgcgtcccagggcgggcagccggcgcaggtactgctcggctggagtccgcagtcctggctgcggccggcgacaatggagcactga

SEQ ID NO: 503318 - DNA, 468 bp, Stenotrophomonas maltophilia
gtggaactcgttcattcctggcgcattacaaaatactggcagtacacgccggaggggtacctgtcctcccctccctctgaatggaccgaattctgcgacgtgggcaggttggtaaccctcgaggattaccaggtcgtggagaacgcctatctcgatgccatccggcgattctgcgtggcagctggcgtggattcgctgcgtatccattcacttgaacggcgtgagtcacgcgactaccacgagggccagccgctggatctggacggcatcgagcgggtggcgcgcgatgtgctgcgcaacgtcatctggtgcaagctggtgagcgagaccaccgaagttcacttcggttacgactactacatgtacctggtgtcgtcggtggatgctgagtctgcgctggcggaggccgatccgctgttgaacatgcagcgctaccgttcgccctatctgcgggaggaagaggagtag

SEQ ID NO: 503319 - DNA, 411 bp, Stenotrophomonas maltophilia
atggtcgttccagaacgccagatgttcgatacctatctgtccgatccgcaggtctacgatcgtcttgagcagcatatccacgaccacttcatgacgggaatcaacgcggcaagcctgcgcattgaagacttccgcagcccgcactacaacacgttcttcgtcgatggcactaaggatcgcgatgccaacccgatcttctccgccaagcacctgcccagcggcaacatcgttcgtatcgtcatttttgacagcccgcctgaatacagcgaagtccgtaagcgggtaggggataacgaggagaaggacgagctctgcctgttcataacgcttctgggcgtgcagcgcgcgatgagcacgaccgtggcctgggcccagcaacaggcgtccatcatcccggccactcgtcagtag

SEQ ID NO: 503320 - DNA, 1272 bp, Stenotrophomonas maltophilia
atgccgcacggcctgccgcgcaagatccgtatcgccttcatcctgcaggcagtgttggccagcctgggcatcctgctgggtgcgtggctggtctcgctggtgatcaagcacagcctggtgggcgctgccctgcgcgaagaggcggcgtactactggacgctgcacgaagcgtccccggtgcagccaccgcccaatacccagaacatccgcggctacctgctggaaagcgggcagtcggcactgtcgttgccggccaacctgcgcaatctggagcccggcttccacgaactgcccaaggacgaccagctggtgctggttgatgtgcgcccggctggccgcctgtacctggtgttcctgcgctcgcgcgcagagatgctggcgttctggttcggcatcgtgccggtgctgctgaccctgttggcggtgtatggcgccagctgggtgacctaccgcgcgtccaagcgcctggtgtcgccggtgaactggctggctcggcgcgtctcgcgctgggacccggggcatccggaagcggccgacctggagcccaacaagctgccggcggacatgcagggcgagacccggcagctggcggccgcgttgcactcgctggccaaccgggtcagcgcgcacgtggcacgcgagcgcaacttcacccgcgatgccagccatgaactgcgcacgccgctgaccgtcatccgcgttgccagcgacatggcactgggtgatgaaagcctgcagcctcgcctgcgccgcagcctgcagcgcatccagcgggctggccgcgacatggaagcggtgatcgatgcgttcctgatcctggcccgcgaggcagacgtcgaaccgcagatcgagctgttcgacgtcaacgacatcgtccgctatgaagtggacaacgccaacgaactgctgggggctcgcccggtgtcggtgcacctgcacagcgatggcccggtgcagctgcatgcgccgccgcgggtgctgcaggtggtggtcagcaacctggtgcgcaatgcatgcagctacaccgacgaggggcgcatcgacgtgcatgtgcacaacgatcgggtggtggtgcacgataccggcatcggcatgtcccccgaagcgctgtcacgggcgttcgagccgttctatcgcgccgaacccagccggccgcagggtaccggcctgggcctgtcgatcgtacgcaggctgtgtgatcgcttcggctggaaggtcagcctggccagcgagccaggtcagggcaccgaggcaacggtgatcttccggtag

SEQ ID NO: 503321 - DNA, 1158 bp, Stenotrophomonas maltophilia
atgccctccccactcgccggcagtgccaaccccgccacgccggccaccagcaacagtgcggcgcgcgccccgcgcagcgaaggcggaaaggacttcagccagctgctgcaggacggcgcgccctctgcacccgcccctgccggcagcgccaccacgccgtcgccatccacgacgagccagccgtcgaccactgacagcagtggccaggcaccaggcgaacgcagcgacgccgaagcggtaaccgctgaagcgccgccgctgccgcccgttgccgtgaccccggctgcacccgctaccgacaaggacaagcccgccgcgaccgaagacgccccttggccgccgctcggtctggccggcctggtgctggcgatgccgacgcccgtggatgcggccgctgccctgccgaccaccgctgcaccgtcgcaggccagcgacggcagcgcactgcccgttgcccctgccgcgaatccggcactgcctgcaactgccccagcagcggccgccgcagcgacggccgacggcaaaccggcggcgaccagcgcgggcgatgccagcgcgctgccactgccggagatgatcctgcccggcaagcgcagcgagcgcggcgaaggcagcgacgtggctgccctcggcgaccgcgccagtgcaccactgctgcatgcaccggcggcggccgccgtacaggacctgaaggcggcgctcgccaccggcagcgcgatcttcaatggcgaacccacaccgaagccggtgcttggtgacgacggcttcgatcaggccatcggcgcacgcctgggctggctggccgaccagaaaatcggccacgcccatatccgcctgagcccggacgatatgggcccggtcgacgtgcgcctgcagttgaacggcgacaaggtgcatgccagcttcagcagcccgcacgtggacgtgcgacaggctctggaaagcagcctgccgcgcctgcgcgagctgctgggcgaacagggcttccagctggcacacgctgatgttggccaccaggccccggggggcgacggcaatgcgtcgggagcatctggcaacggtgggacggccggtgacggagaaccgtcgcccggcgacaccaacgtgtcgtccgcacagttgatccgccagcgcgggttgctggacgcctacgcctga

SEQ ID NO: 503322 - DNA, 1647 bp, Stenotrophomonas maltophilia
atggcactgacgctctccaaggacagcctgaacgccgagaaggccgggcaatggttcgaccgcctgcagagtctgcagatcacccgtcggctggggctgatggcgatgatcgcggtggcggtggcggcaggcctgtccgtgttcttctggtcacagaagccgggcatggtcccgctgtataccggcctggaccagaaggcgactgctgaagcgaccgacctgctgcgcgccgcgcagattccgttcgcgctcgatcccgccaccggtggcatcaccgtgccggaaaagaacctgcacgacgcccgcctgaagctggccggctccggcctgaccgacagtggcaagctcggcttcgagctgatggagcgcgaccccggcttcggcgtcagccagttcgtggaaagcgcgcgctaccagcacgcgctggaaaccgagctgtcgcgcaccatcaacacgctgcgcccggtgcgcgactcgcgcgtgcacctggccatccccaagcccagcgccttcacccgccagcgcgacgtcgccagtgcctcggtgacgctggaactgcgcggcggccagcagctggaacgcagccaggtggacgccatcgtgcacatggtcgcggccagcatcccggatctcgccccggaacgggtgaccgtggtcgaccagagcgggcgcatgctcagcatcaccgaccccaacagcgaggcggcagtcaacgctgcacagttcgaacaggtgcgccgccaggaaacctcgttcaaccagcgcatccgcgagctgcttgaaccgatgaccggccccggccgcgtcaacccggaagtgagcgtggacatggatttctcggtgaccgaggaagcccgcgagctctataacggcgagccgcagaagctgcgcagcgagcagatgagcgagaacaccaccagtaccccgggcccgcagggtgtgccgggtgcgaccagcaacagcccgccgggccagcaggccgcaccggccaccgcacaggccccgaccgaaagcagcaagaacgccacccgcaactacgagctggaccgcaccctgcagcacacccgccagccggccggccgcatcaagcgcgtctcggtagcggtgctggtcgacaacgttccgcgtgctggcgccaatggcaaggttgcgccgcagccgctgtcggccgccgaactgacccgcgtcgaggcgctggtgaagcaggctgtcggcttcaacgccgagcgtggcgacaccgtgtcggtgatgaatgccccgttcgtgcgggataccacgccggtcgaaggcccggcctggtgggaactgccgtgggtgcacgatgccggccgcatgctgctcggcgcagtggtggtgctggcgctgctgttcggcgtgctgcgcccggcgctgcgtgcgatcaccggccagaacaagaagaacgacgagcacgcactggaaccgcataccgcggacgtgcagctggtcgatgacgatggcaccccgctgccggcgctgggcgccgaccgggcaagcctgggcgggccggatgcactggccctgccggtggattcatatgaggaacgactgcggatggcgcgtgaagccgtgaagaccgactccaagcgcgtggcccaggtggtcaagggctgggtggccaatgactga

SEQ ID NO: 503323 - DNA, 573 bp, Stenotrophomonas maltophilia
gtgctcttcacccaggccgcgttcgcggtcacccagcgcacgctccagcgcctcaacgatgtctgtgggcgaaacgccttccagcacatgcacgcggcaacgcgacagcagcgccgaattcagctcgaaggatggattctcggtggtggcaccgacgaacaggatggtgccgcgctcgatatgcggcaggaacgcatcctgctgcgccttgttgaagcgatgtacctcatccacgaacagcacggtgcggcggccttcggcgaagcgttgcgcggcctcggccagcacctggcgcacctccggcaggccggacagtacggcagagatggcgcggaattccgcatcggcgtactcggccagcagcagcgccagcgtggtcttgccgcagcccggcggcccccacaggatcatcgaatgcacgcgaccggattcgaccgcgcggcgcagcgcactgtccggcgccagcaggcgcttctgccccaccatttcgtccagggtgcgggggcgcatgcgctcggccagcgggcgcatgtgttcccgatcgacgctcagcagatcgggtccggggaatga

SEQ ID NO: 503324 - DNA, 618 bp, Stenotrophomonas maltophilia
atgatgttgctttcctttgcgctggccgctgccatgggcgcgtctgcggagccgcccaaagcccccgactgcagctacgaccgtgcagcgatgctggcgatggaacctggtcgattcgatcaggacctggcaggtggctggcgcccgctggccgaccgtggctgtacccgcgaagcggccgacctgctgtccgcctatggcgctctgcccaaggcagaaggcaacgtcatcatcacctggcatgagggccagctgcgcgcggagctggggcagaccgcgcaggcgatcacgctgatggaacgcagccacaaacccgtgaacgcgggcgacccgggttactggaatgcctacgtggacggcatggtcgcgttcctgcgccaggaccgcagcgccctggagaaggctcgtgcgaggctggtcgcaataccgacgcccaccgcgatggcggagaacatcagggacggccgctaccacttcaccaccgagggcgggcagcaggtgcagatgccgtggccaccgaacctggatgtgcttgatgggctactgcgctgcttcggcaaaccatacacggaggcctatggaccaggctgccggacgcctgaaacaggcacccggtaa

SEQ ID NO: 503325 - DNA, 1839 bp, Stenotrophomonas maltophilia
atgcccgaataccgttcccgcacctccaccgccggccgcaacatggccggcgcccgcgccctgtggcgtgccaccggcatgaaggacggcgacttccacaagccgatcatcgccatcgccaactccttcacccagttcgtgcccggccacgtgcacctgaaggacctcggccagctggtcgcgcgcgagatcgagcaggtcggcggcgtcgccaaggaattcaacaccatcgccgtggacgacggcatcgcgatgggccacgacggcatgctgtattcgctgcccagccgcgagatcatcgccgacgccgtggagtacatggtcaacgcgcactgtgccgacgcactggtgtgcatcagcaactgcgacaagatcacccccggcatgctgatggccgcgctgcgcctgaacatcccggtggtgttcgtttccggcggaccgatggaagcgggcaagaccaagctgtccgagcacaagctggacctggtcgatgcgatggtggtggctgccgatgacagcgcttccgacgagaaggtggccgcgttcgaacgcagcgcctgccccacctgcggctcctgctcgggcatgttcaccgccaactcgatgaactgcctgaccgaagcgctgggcctgtcactgcccggcaacggcaccacgctggccacccacgccgaccgtgaggcgctgttccgccgtgccggccgcctgatcgtcgaactctgccatcgctggtatggcggcgaagacccgagcgcgctgccgcgcggcatcgccacccaggcggcatttgccaatgcgatgaccctcgacatcgccatgggcggctccaccaacaccatcctgcacctgctggccgccgcgcaggaagcggaggtcgacttcgacctgacccacatcgacgcgctgtcgcggcgcgtcccgcagctgtgcaaagtggcgccgaacacgccgaagtaccacatcgaggacgtgcatcgcgccggcggcgtgttcggcatcctcggtgaactggaccgcgccggcctgctcgaaaccacggtgccgaccgtgcacagcgccagcctggccgaagcactggaacgctgggacgtggtgcgcagcgacaacgacaccctgcataccttcttcaaggccggcccggccggcatccccacccaggaggccttcagccaggccacgcgctggccgacgctggacgtagaccgcgccgagggctgcatccgctcgctgcagcatgcgtattcgctggaaggtgggctggccgtgctgcgcggcaacctggccgtggatggctgcgtggtgaagaccgccggcgtggacgaatcgatccatgtgttcgaaggtcccgcgcgtgtctatgaaagccaggacgccgccgtcgccggcatcctcgccgacgaagtgcagccgggcgaggtggtggtgatccgctacgaaggcccgaagggcggccccggcatgcaggaaatgctgtacccgaccagctatctgaagtcgaagggactgggcaagcagtgcgcactgctcaccgacggccgcttctccggcggcacctccggcctgtcgatcggccatgtctcgccggaagccgccagcgggggtgtcatcggcctggtggaagatggcgaccgcatccgcatcgacattccggcccgccgaatcgacctgctgctggatgagaccacgctggcccagcgccgcagcgacgccgatgcgcgtggttggaagccgcgcgcgccgcgcccacgcaaggtcaccagcgcgctgaaggcctacgccctgctggccaccagcgccgacaagggcgccgtacgcaacaccgcgcttctgggcgattga

SEQ ID NO: 503326 - DNA, 789 bp, Stenotrophomonas maltophilia
atgtcccgcctgccttcgctgtacatctcccatggttcgccgatgactgccctgcagccgggccaggttggcgtgcgcctggccgagctggcgcgcgatctgccgacgccgcgcgccatcgtgatggcttcggcgcactggctgggccggcagccgctggttggcgcgcatccacagccgccgaccatccacgacttcggtggcttcccgcgcgcgctgttcgaactgcagtacccggcaccgggtgatccggcactggccgaagaagtggccggccgcatcgccgccgcaggcctgccagtggccatcgacccgcagcgtggcctcgaccacggcgcgtgggtaccgctgcggctgttgcgccctcaggcggacatcccggtggtgccggtgtcgatccagccgctgctcggccccgagcatcagttcgcgctgggccgtgcgctggcgccgctgcgcgaacagggcgtgctgctggtcggctccggcagcatcacccacaacctgcacgactggggcgactaccaggacggcaaggaagcgccgtacgtgcggcccttcatcgaatgggtggagcagcgcctggccgccgatgaccgccaggccctgctggattaccgccggcaggcgccgttcgccgaacgcgcgcacccgaccgacgagcacctgctgccgctgttctttgcaatgggcgcggccggcgagggcggtttcggtgcgcgtcgcatcgatgccggcatcgatgccggcttccttgccatggatctgtaccgcttcgacggggcatga

SEQ ID NO: 503327 - DNA, 609 bp, Stenotrophomonas maltophilia
atgaagcgctcacatgccttcagctgtggtgcatttctgcttttctgtggtaccgatgcagaggctgcccgtgcgtttgtggttgaagacgctgccatgcgcgcccccacctgccttacggtcgagccgcgccagcggctcttcgcttgtcaccagatcgttgccggggacagccgagtgatcgggctgagacgattccgctcgtcgtggaggaccgaccgttccaccttcagcaagctcacgatccagctccccgctgatgcgaaagcaggcgaccggttctctgtcccaaatgatcgagtacggatgttccatagcagagggtccagcgcgtttgccggaaagacgggctgctacgcagtgccggtcgcagggcagattaccgtggtttccgcaggagacttcggcatcgaggtccaggtcgatgcaacgtttcgctctgcaagcccactgcaatggccgggagagtgcgaggcaccgaccacagtgtcagagcatctgagagcccagccattgtctctggagcagcttgatgcatggacgggagtgcatgatccggaggcatcccccttcgaacaggcacacccctccagacgttcgcgcaactga

SEQ ID NO: 503328 - DNA, 612 bp, Stenotrophomonas maltophilia
atgaacgtgctgtacatgatgaaacgcactcactgcttccacgccagtggtctccttctctaccttgcgagcgtgcaggtggaagctcgctccattcacgaatgcatcatcgttccgcaggccgcgatcgtcactgacatgccggctggcctggacgagttcgaacagcgtctgtgggtggcagatacaggtcagagggtgcgcaagggcaccgataccctccttctgctgcgcctcttctcggagtcgccaggcgtgatcgactcccagcagtacatcaagatcacaggcagcttgaagcgatacgcgccctcgtcggaagggacgccggaggtagtggatgcacgcctcaccagtggcggcgcgggctttgtgcacaagggagacaactggctgtccgattcagtcgacgtagaactacatcagccgcatgagcgcgataatcggatggaagtcaaagtgacggctgtcgggtggaacagttatcgaaaagaagaccgttccttctatctccagttcacctgtcaactgaaggaaatccctgtcgagaagctcagtgcctggcaaggaggaaacgacgatctctggggatcctttggtcccacccgatag

SEQ ID NO: 503329 - DNA, 183 bp, Stenotrophomonas maltophilia
atgaggataatctactggctgggcatcgcgttcctgtggatgcttccgttgaacgttctgttgctgacgggcggcaagccgatctccggcgacgcgcttggagaagaagagctcgttggtttcggtgtggcggtgttcggcgctgtggcaggcgggattctctatcgccgtcgcccgcggtag

SEQ ID NO: 503330 - DNA, 945 bp, Stenotrophomonas maltophilia
atggctgatgatttccgtgatgttgaaagaatgaaggcggccgtgggtacttcggcggaacttaagttgagattaataaaccttaggtcgcaacttgctaatgctctgatttttgtttttgagggggatgatgatcgcgccgtatatggcgcgtggatgaggcagatcgatagggggatggtttatgagccttttacttgtaagggtaagtcggctgtcctgcggttgaaggtttccgttgatcgagatgctgctgggctcggggacggggttttcttcttcgttgatcatgattttgatggttcgcgtggtgttgagttgaataggaatctctatgtgacagatggctattccatggaaaatgatttaattaattggatggctatcgaagagacgcttaaggttgagttgaattgccattcttcgcccggcgctagggcggcgcttcgaaacctatttgatgctgcgtatgatagttaccttagagcgtcgtcggatattaattttctaatatttgcggtgagaaagctcggggttggtacggagggggctcttcctaattcggtagggcggtgtgtggatatttctatcgatggtgcggtgcgcaatttttcagttgatgcagccactgtggtgcggcccgttcgtgaaatatccgagtttgagttgactgcgctcgcggatgattttttacgattagagcctcgcgctagatatcgcggaaaattctctttctcgtttctgattaattggttgtcaattgtcgcttcggagagaaggtcggaagaatctcatatattcgcaggtatggacatggaagctcgaaccagggtggatagagtgaccttggcaacgctagcggcgcgctctctgccgccgggctcgttggataggttcgttagggaaaatgtagtgctggacccatgttcgaggatcgcgtgttga

SEQ ID NO: 503331 - DNA, 1524 bp, Stenotrophomonas maltophilia
gtggtcagtggatttgatgtcggtgctgccattgttgaagatttctctatcgagggtttgtatggatatcgcactgtgtcaatgcgagcctcgcactctgccgtcatactgattgcgaaaaatggctcagggaagacgacattgttaggtgcgctggatgcttttctgaactgtcagtttgggcgattggcaaatattgagtttgaggtagttaagtgtagattgaagggattcgacggggagcttgtgctcacttcaaagaatctcgaggaccttttgagaattccggactcttccgaattccttgctatggtccgtcgtaccgatgtcgatgcatccgaattgttggattttcttattggtgactactctcctcacatgagcttctcttcattggaggagggggatgttgcaaggaaaatctgggcaaggtatggctatcgcgcagacgaatgccttaaggcgctcgccgtcgttgctgaatcgattaaaggggaggttcccgaggtcgatcatgtaagggatgtggtgcggaagtgtcttgatggaattgaagtcgtctatctccctacttatcgtcgtatcgagttggcactctctgagtctgtggaagaagcgcgtgcggggcgtcgcagggctagcgttcagagtcgccttggaatatcaaagaagagtctttttaatactgagattcagtttggattgagagatatatctgatcggctgtctcagttgaacaatcagatgctctttgattcgaatcagggctatcgcgagattagcgcaaagataattaatgatttattggatggaacttttgacaggggctttctttctattattgataggcctagcaaagagtcgctggagttgtttttctcgcgacttcaggagggcactagatttattggatcgttcggtcgagttgatattccaaatttcgagaaaatttatgcggaaggcgcgggcactgatgcatccaataaatttttgaattattttctcgggaagcttaattctgtaattcttgctacaaggtcaatcgaggggttggtggaggattttgtcggaaaatgcaacgggtatctgggaggggcggaaggggaggacggtgacggaagctatcacttggggcgatcaatcgatgataagaccctcgaaattgataggctgactcttcaggtgcatgtcgtaagccgagtcagtgggcggcaggttccgatggattcgctatcttcaggcgagaagcagatggtgtcgctctttgcaaagctgtacttgtatgaagggaagaaaattgtattgatcgatgagcctgagctgtcgctatcaattgattggcagcggaagatacttctcgatgtggttgaagcaccgacgtgcgctcagcttgttgctattacccactctccatttgtttttgataacgatctagagccctatgcgagaccattgatgctaaaaatttcgcgtgagggatcttccagagaagattcctatgcgcgtgaggtgttcaatggctga

SEQ ID NO: 503332 - DNA, 945 bp, Stenotrophomonas maltophilia
atggcaacggaactggctttcagcacggaattcaacgacaccatcaatgccgagcgcgcctatgagctgtactgggcgaatgtgattgtcgacaagcgagcatttctctgccccgagtacgagaacggctgtccagcaaagtacatctgcgcgaacatggataccgagcagcttcaactgaagcaggtaccccacttccgcaaccagaaagacagtcagccgcatatggatggctgcatccatgtcgttgagttggaggtccggggaggtggcggagacagccgtcccagcgaagtgggacagccggcccccgaccggttcctgcttgcgcgccctccgggacatttcgatgttcgccagagtacaacgaccggagccggccccggcgcgggtggcagaagcagcagcggtgaatcgggtggagcgcgcagccggcgtacccagttctactcgcttgccgcgcttgtatcgcgctggctgaaggcgaggcgcgacgacgtggatgacacgatgattgtcagcgcgggtacgcaggagccaatgagctatcgggagatgttcgagaacttcttcgataagcgccctcacctttccgggaacacgcgcgtgtactggagcaaggcatggattcggaagaccgatgatggcttcaagatcaatttctgtgagtcggtggcgtcccttgccggtgaaatgttggcggagcccatgcgtcccacagcaatgatctggaacagcgtactggtggcatcggaaatgaaatccctgcacgccaaacggcttcagcgcttcgcagaaaggaaggccccctgcgtcgtattcctctatggaacacccgtgctgcacgagaaacattcagggacatatctgaatttcgaggtgaagagcttggacctcgttgatgtgcaggataccaatatcttcgacaggatccggcgctcctag

SEQ ID NO: 503333 - DNA, 690 bp, Stenotrophomonas maltophilia
atgagtacgtataccgcgttcgtcgagctcgcatttgaaaggttgaacaaagagctggcgataccgaagggattcgccgtagcgctctacaaagaagaagactcgtggagcttcatctcgaagctggcgcagctcgtcgaggccgttttcacgcgggccgtcgtcgatgccctgcgcgagccgctgatattcgatgtgatcagcaatctcccgcaggaagtgaggatcaattttctgcgcaagatgaacatcatcgacagtgaacagaaatcgatgttcaaggccgttgcagagatcaggaaccagtacatccatgatctctcgaacatcgacgttccgctggatgcctacatcaagaacctggaggacggtgcaaggaagggactcttcaaacggttcaagccgtacttcgtcgacccgaagatgtccattgaggagttcatctcacaatgcaggccacaggtcttccatgtgtgcgtgctggagctgctgaaggtccatggaaaggtgtcatccatcaacatccagaaggaccacgaggcattccgtcttcagcaggcgggaaggttgctgccggcgaagaagcacggcgagatgcttccgttggatcgactgacggtgagcagctatgtcacccaggccagagacgtcctgaagcgggtaggcctgctcgtttcagagttcaaatag

SEQ ID NO: 503334 - DNA, 2376 bp, Stenotrophomonas maltophilia
atgccgtggatcaacaacctgaaactgatgccgaagctgctgttgaccttcggcgtcctcctgctggtgatgctgctgcagggcatcgtcgcctatcgcggactgcattcgctgaacaacgtcaccaccgagttggccggttcacgcatggaaagcatccgcatggccggcgagatgcgcggcatgctgggcgagtaccgcaatgccgcctaccagcagctgatccgcgccagcgatgacgtcaagtccgacgcgcgcaagcaggccgtcgacctgcgcaccagcatggacacgtcgatcaaggaatacccgaagctggtcgacaacgcgcagcagaagaagctgttcgataccttcgccaaggaatggaaggacgctctggcctcctacgacagcgtcaccgagatgctggagctggacctgccggacgatgccatcgataccttcgtgggcgagacccgcaccaagcaccgcaaggctgcatccgcgctggaagcgctgatcgccgaagacaaccgcctcgcccgcgcctcgcgcgaagaggccgcgtccacctattccgcctccgccgtgctgaccgtgatcgccctgctgggcggcgccgcgctcggcctggtgctggtctggctgttcgcgcgcgccctggtcggcagcgtgcgtggcgccgtgtcggttgccaacgacgtggccggcggcaagctcgatggccacatcgacgtcagccgccaggacgaagtgggcgaactgatgcaggccatgcagcgcatgcagcgcgacctgcgcgaacgcatcgaaaccgaccaggccgttgcccgcgagaacctgcgcatccgcaccgcgctggactacagctcgaccggtgtctacctgaccgataccagcaacaccatcgtctacagcaaccgcgccctgcagcagaccctgagccagtaccaggatgaagtccgccgcgacctgccggacttcgacgcccaggcctcgttgatcggcaagccggtcaccgtgctggaacaccgcggcgagatggaccagacgctgttgggcaacctgaaggcccacggcgtcgcccgtcgcccgatgcagtacggcgatgcccagttcgcgcaggtggtgtcgaccatccgcaacgaaggcggcgacaccgtcggctacgtggtggaatggcgcgaccgcacccaggaagcactggtcgaagccgaagtggcgcgcgtgatcgcccaggccgccgccggcgacctgtccggccgcatcgacgccagcgacaaggaaggcttcttcctgcagctggcccagcagatcaacggcctgctggacgccaatgccggcagcatcgaacagatttccggcctgcttgccgcgctgtcgcagggtgacctgaccgtgcgcatgcacggcgactaccagggcgtgttcgcccgcatgcgcgacgacgccaacgccaccgccgcgcagctgagtgaaatcgtcacccgcatcaagcagtccagccgcgcgatcagctcggccgccggcgagatcgcctcgggcaacagtgacctgtcgcgccgtaccgagcagcaggccgccaacctggaagaaaccgctgcttcgatggaggaactgacctccaccgtgcgccagaacgccgagcacgcccgccaggccaaccagctcgccatcggcgcgcacggcgtcgcttcgcagggcggcgaggtggtcggccaggtggtcaccaccatgtcggccatcgaagcctcgtcgaagaagatcgccgagatcatctccgtcatcgacggcattgccttccagaccaacatcctggcgctgaacgctgcggtggaagccgcgcgtgccggcgagcagggccgcggcttcgccgtggtcgccagcgaagtgcgtaccctcgcccagcgttcggccgctgccgccaaggagatcaagggcctgatcgacgattcggtcggcaaggtcaacgacggctcggcgctggtgcacaaggccggcgcgaccatgggcgagatcgtcgcctcggtgcagcgcgtgaccgacatcatggccgagatctccgccgcctcgcaggaacagagcgccggcatcgagcaggtcaaccagaccgtggtgcagatggacgaaaccacccagcagaatgccgcgctggtggaagaagccactgctgccgcgcgtgcgatggaagaacaggctggtcagctcagcgaagcggtgtcgatcttcgtggtggacgaagccgaggtcgtcgccgccccgcgcgtcaccgccccggcgccacgcgccgctgcaccggctgccccggccccggctgccccgccggcccgccgcaccgccggtggtcgtccgatggccaccgaactggccgacggagactggcaggaattctga

SEQ ID NO: 503335 - DNA, 1380 bp, Stenotrophomonas maltophilia
atggaaatcggcagcgcgatggtgggtggggccctggggggaagtacgggcgccaacattgccgtcaccggggatcggttcaatcggcagctgcatccggatgaggtgaagtggatccgcttccatgcagaggaattcgcccgcgagcagaagatctcgaaggaagaggcctatcgcatccttcttgtggaagcggctgcgtacgttgactcgaaaatacagtccgacctgagtggagtagaaaacaacactgacgcaattgatttcctgcgcaagaaccagaacaagtacgactggggtaccgcgttcgacagcagcgatcgggacaacttctctaagttcagcgaagagcttgggcgcgaaaccggctatttcaaagacgtctacactgccatctcgggaactgcttacgccgccggatcaaccaaggactggcgctttgagttccaggagccactgcgctactacggcgacgcctcgcgctctcagaagggcgttgccatggtccaggctggcgcagccgctcttggcatcggtgcggcggcggccgttgaattcggtggctggtgcatcctcaatccatacagttgcaccaaggccatcagcggagccgccgatgcggtgatgggtgactacgtgggtggtcactcgcttgcaccagtgctgccagcgttggttgcggcaaaggccgctaccactgcggaacaaacgcttcgactgtcgagcggcgcggtgggtgctgagatcgcggggaatgctgcaaagaagggggggctgcaatccgagcaggtgctgaagccgatgcaggctgccggtgcggatgtggcagaggcaggcgcgaaggccggggcaagcgaacaatcttctctggcaaatctgaatcgtctgagtccgcaggaagaggctgagctactaaagcgacaactgatccaggccgagcggcatgatccatggatcggtacaacgcttccgggggccgaggcgccagtgacggttacggcagaagcaaccgtcggcgggcgaatgctcaaagacaccaatcagaccgcccgacctaccaagctcgctgatgcagaccacccgacgctggtggccgatctccttccgcctggtgcgccaaattccagtatgaagtccgctcatgcggaaattgcggtcatccagcgagcctatgagcaaggacttacaaatgcgcagaaaatgctcattgtggttcgcggtgagggagtttgcagctactgtcaacggagtgacaatttgatcgcagctgcgcaacgctctggtcttagtaagctcgaaataattgacgttgagaggaatacgaagatggtgtggaatagaggtgagaaatccttcttcgaggtgactttgcatgaataa

SEQ ID NO: 503336 - DNA, 915 bp, Stenotrophomonas maltophilia
atgtttgggatcgggatcgatgtgagcaaagccacgctggatgtggccgtccatggagagcagtttcgccaattcagcaacgacaagcgcggctttgtgcgcttgattcggtggctgaagacgtggccgatcaagcaggtcgttcttgaggcaagcgggggttacgagcgtgctgctctggatgtattgcacgccgctggcctgccgatggtacgaatcaatccggcgcgtgcacggcgatttgcccaaggcacgggccgtgccgccaagaccgatcggctcgatgcgacagtgctggcacagatggcccatttgttgccgctgacccgctacgtaccgcctgctccttggcagcagcgtctggctgaatttgcgcaatgccgcaggcaactggtgcagatgcgggtcagtgagatgcagcgcttgcggcgattggtcgatccggatctgattgcgatgaagcaacgccatatagctcagctatctgacgacctgaagcagttggataaagctattgccgagcagcttgaggggcagcctggctggaagaatatcggcgcgctcaaaggcgtcggccccatcctgatcagcacactggcctgcgagttgcccgaactgggcagcttgggaagcaaagccatagcatcgctggtggggttggccccgatgaaccgcgaaagtggcacctggcagggccaacggcggatcagtggtgggcgcgcggtggtacgcgaagccctctacatggcggccctgacggccatccggtacgagccaaggctgcgcgcgttttacgctggcctgaaggccaagggcaaagcgagcaaggtggcgctcgtggcggtcatgcgcaaaatgctggtgatcctcaacgcccgtaagcgagacgccgaggtggccctcggctgcccctga

SEQ ID NO: 503337 - DNA, 138 bp, Stenotrophomonas maltophilia
atgccggccagcggccggcactaccgggcatcagccctgcgcttcggctacggcgcggaagaccagctgcatctgctgcggctggaacaggcggtggacgccctgccacgcttcccctgggaaactgccgagcggtag

SEQ ID NO: 503338 - DNA, 348 bp, Stenotrophomonas maltophilia
atggaaagctacgcctacaaccatcgcggcgagcgcgtgctgcgtaccccgaccagtggcacggcacagatcaccctgtatgacgaggcggggcagtggctgggcaactactcggccagtgtggctgactacgtgcgcgatacccaggggcgcacaagtggcgacgtcatgaggggtggctttccatcgaatcccaccgttgcgcaggtccattcaataaggtgtcagtgtctaactccatattattcagatctctcgcatcctctgctatctaattccgagacgggtcctcttgatctgattgatctggttcgagactccataacaaactggcggtcgcggaggtag

SEQ ID NO: 503339 - DNA, 243 bp, Stenotrophomonas maltophilia
gtggacggagaagcgcgcaaccatgacacggcaggcaacaccaccagcatcggcagcaaggtgttcacctacaacgatgccaaccgcatgagcgcggtgaggcagggcaatgccgtgctggaaagttacgcctacaaccaccgtggtgagcgcccgctgcgcaccccggtgggtggcgcgactcagaccactctgtatgacgaagcagggcagtgccttggcgactactcgaccacgagttag

SEQ ID NO: 503340 - DNA, 1413 bp, Stenotrophomonas maltophilia
gtgaacccggcgcgcgccttgcagcaggcggccgccaccgtgtggctgctgttgctgctgtgcctgctgccgatggcagcgctggcggcaatcccggtcccggcgctggacgatcccgtggtggacactgccaacgcgctgtccgccgacacccgcgccaccctgcgcaggcaggcgctgcagctgcaggcacggaaaggtgcacagctgcaggtgctggtggtacccagcgtgggcagcgaaggcatcgaggcctatgcacagcgggtgttcgatcagtggcagctgggccggatcggtgtcgacgacggtgtgctgttgctggtggcggtgcaggaccgccgcgtacgcatccagaccggctacggcctggaaggtgcgctgcccgatgcgtacgccgctcgcatcatcgacaacgcgatcgtgccgcgtttccgtgagggcgatgtcgaccagggcgtgctcgatggcacgacgatcatggtggcgctgatcgatggcgaggacctgccggcatgggaagaaccgacggccagcaacctgctgcctgcggactggcgacgcgcagactcggtgctggcgttgaccctgctggccggtttcctggccgggctgtggcgctcgccgccgcctctcccactggcgaagaccgaggccgatttcagcggcagccgtcgggagcggcggcgcaaggcactggccgccaatgcatcggcaccaaaaccaacctggccgaccttgccggcctgggggcgcccgatgctgctggccgctgttgtgggtgcgggcgtgctctccgtggcgctgctgctgccacgccatgtgctgccgggcctgtgcttcgtgctggcgctgggtgtgccggtggctgccctgctgggctggtgctggcgccgcagccgaggtgtgcgcatcgtgctgcgcggcatgctgatgctcagcgcagtcttcctggtacaggcgctgctgcgtggccagctgccaccgagcctggcccggcacctgctgctgcaggccgccgcgggcgttgttgccctgatggtgttcctgctggtgcaggcctgccgcacacgctggaagaagaaccgcagcagcttcatcgtgcgcatgacggtgctggtgctgttgaccctcggctatgccgcgggcgcgttgctggcggtccatcgtgccgaaggtgacgatccacgattgctggcgatgatcgtgtccggggtatgtggcgtactgctgtacttcgtgtggttgttcaccatgctgccgggcgagcgcgcacgcggccgggcttcatcatcccgcgaacgcacgtcgtcccgttcgtcgtcctcgtcgagttcgtcgtcgagcagctccagcagctggtctggaggcggcggccgcagcggcggcggcggcgcgtccggcagctggtag

SEQ ID NO: 503341 - DNA, 1080 bp, Stenotrophomonas maltophilia
atgcgcatgacagccactgtgatgggaatgatgctgctggcctccgcgggggccgtcagcgctggcgagccttggaaagcaggcgaacgccacggcaccaccatagtggccagcgccgcggttcgcgatgcgcagcatcgcgacgccctgcgctacacggtctggtatcccgcgcccgctggcagcacggaaaccgccctgaccatcggtccgcccgatgcgccgctgttcgacgtcggccgctcagccatgaatgccccgatcgcgggcaagcgcctgccgacgatgctgctctcccacggtaacggcggcagcgcgcgcatgatgggctggttgggcacggcattggcgcgcgccgggtatctggtaatcgcggtcgatcatcccggcaacaacggcgtggacgagatgaccctgcccggcagcgtactgagctggttgcgtgcggatgacctgcgctcggcactcgctgcagtacaggccgatccgctgctgggtccgcatgtcgaccctgagcgactgggtgtggccgggttctcggccggaggctacaccgcgctgctggccgccggtgcacgccccgacctgcagcggctgttggccttctgccgcgcgcacccggatgacggcgtctgccggccacaacaggaaaccgccacgcacacgatggacgcgcgtgttgccgctgcgggctcacccgcgatgtctccctggatctcccacgccaacgactcgcgcgcgatccccggcgtgcgtgcggcattcctgctggcacccgcgatcgtgcaggcgttcgcgcccgagcagctgtcctcgctgaggcagccagtgtcgatcgtgctgggcgaggctgacacggttgcgccaccgcagagcaatggcgaggctgcacagacactgattccgggcgctgtgctgcagcgtctgccggatgtcggtcactacgacttcctggcggcctgtacagcggttggtgtgcagaggctgcccgagctctgcagcagttcggttccgaaggcggacacccacgcgcaggcagtggatgccgcggtgcgattcttcgccgaagcactgcggtag

SEQ ID NO: 503342 - DNA, 594 bp, Stenotrophomonas maltophilia
atgatgaagacgaccattctgttgagcaccctcgccctcgcggcgatgaccaccaccgcctgggcacagagctcgggccagacacctccggcgaagaccttgtcgaccgtagacacgcagcagttgaaggcggaggccactggccgttcgttcaatgtgggcggctcgcgcttccagctggcaccgtcggcaaccgtgcagcaggccagcggcggccagttccggatcaccaccggggctgatgccagcgcggcggccgtcggcacccgcagcaagcggtccacggatgcgtctaccggtgtggccgcacgtgcggatgccggtgccagcaagtttgcggccgctgtctccaacgatggcgcaccggtcgtggcgacctcgcgggtcaaggtgttcttcaccgatgcggcttcggcgcagcgtgcggccaccgccaccggcggcaccgtggtgaaggtatccaaggcctcgggccgcgcgattgtggagtatccgtcggtgaacgcggcactggatgcgaccaccaagatgctgtcgactgccggcatcaaggcagccgagccggacgtggtgcagtgggaagaaaccaagtaa

SEQ ID NO: 503343 - DNA, 396 bp, Stenotrophomonas maltophilia
atgttgctgggtcatgctgtcggcatggctcagcacaacccgcgaaccccgttgttcggcatccggggcccaggacggccccggcaggcgctgtccgtggcgcctgcaatcgacctgcgggccgaataccagttctggcaggtctacgaacgcgtggtccgcccgctacccggtggtgggctgccgcaggcgtggctggcctgccagaaggtctatcgcgaccgcatgcgcttccccgacgacacccacccgacggcgctgtcgcgggtgttgttcggtaccaacatgaccgccgagcgcgcggcggagctggaagcgctgtacgggttggtcagccggcggctggtgctattgggcaagcaacaaaggttgccgttgcacagcgcgggctactga

SEQ ID NO: 503344 - DNA, 435 bp, Stenotrophomonas maltophilia
atgtcacgtgaacatgccagagagcttcagaagcttcagctggcacaggggcaggcggcccctgatgtgaaaaattccaagcttgcggaactatgggctgggatggagctggtcaggatccgttgcgtggacgggcatatcaattctcgcgtgggcgatgccattcttcctccgcccgccgaaggtctggcgtcaaaacccgccagtgacgtctatgggatcgctctgttgcatttcccggagttgcgcccgcaggcctacgaacttcacgcaatcactgcggaactggagaccgaaatgtggttcggtggttccgacgagaatatcgatgtgctgcttgatcgacttgcggaggtgaggacttcgctggcggatggcattgaaaagatcgcatccagccttgcccagccggcgaatcaacgcccgctccgctag

SEQ ID NO: 503345 - DNA, 1497 bp, Stenotrophomonas maltophilia
atgagcctggcgctggtccacagccgtgcccgcgccggggtcgatgccccactggtgcgggtggaagtgcatctctctggcggcctgcctgtcacgcagatcgtgggcttggccgagaccagcgtgcgcgaatctcgcgagcgcgtgcgtgctgccctgctctgcgcgcgtttcgactttccacagcggcgcatcaccctgaacctggcgcctgccgacctgcccaaggaaggcggtcgctatgacctggcgattgccttgggcatcctcgctgccagtggccaggtcgacccacagtcgctgctgcagtacgagttcctcggcgagctgggcctgaccggtgaactgcggccggtagccggagcgctgccggcggcgattgcggcgggcgaagccgggcgcattctggtggtgccgccgggcaatgccgcagaggcagctttggccgagcatgctgatgtgcgggtggcccgtaccctgctggaatgctgcgcggggcttggcaatccgcgcctgctgccacccgtggagcgcgtggacacgacgcccctgccactgcctgatttggccgacgtgcgcgggcaggcgcatgcacggcgcgcgttggaggtcgccgctgcgggcggacaccacctattactgatcggtagccctggttgcggcaagacgctgttggcctcacgcctgcccagcctgctgccggataccgaagaagcggaggcgttgcagctggcggcgattgcctcggtgagtggtgaagggttggacccacgacgctggcggcaacggcctttccgttctccccaccacagtgcaagtgcggcggcgctggtgggtggcggcaatccgccctgccccggtgaaatctcgctggcccatcatggcgtgctgttcctggacgagcttccggaatggaatcgaagtgcgttggaaaccctgcgcgagccgctggaatccggccatatccgcatcgcccgcgcggcgcgcagcgtgcagtatcccgcgcggttccaactggtggcagcgatgaacccttgcccgtgtggctgggccggtgaccgcagcaaccgctgcctgtgcagcgacgaacgtatcaaccgctaccgcgcgcgggtgtccggcccgttgctggaccgcatcgatctgcatatcggcgtgacgcgcatggatgcggtggagctgcgggaaagcacgccgctgggtgagcccagtgcatcggtgcgtgagcgggtggaagccgcgcatgcgcggcagcaggtgcgtggcgggctcaatgcacatctaccgccggctgcgctgcgtgcgtgcacaaaattgagtgaggccgatcaggatctgctggagcaggcgattgagcgtctgcagctgtccgcacgggcgatgcaccgcattcttcgggtggcgcgcacgattgctgatctggctgattgtgaaacgatccagacggcgcacctcgccgaggcgatcgggtataggcagctggaccgtggacggtag

SEQ ID NO: 503346 - DNA, 525 bp, Stenotrophomonas maltophilia
atgcagtgcacgatacccgtctcgctggtcaaccgcggcatgctccttcaagagctcattcctgccttcatcctcttcgcctgcgccataggcctagccctctacggtggtcttgatcccaggaagaagttgtttggagtgggccggctttgcgtcatcggaatgatgacttcgttctcgaccgccatgctggcattccgctccaagattgtcgtcgaagaggatgtcgtcaccctctatgccggcatctacaaggccaacgttcccctctcgggtctggcaaatgcagaggcatccgatcagattggtgcttcgctgcgtaagcgcaccaacggaacaagctccaggggagtgaatgccggctggttcgaggaccccagcggccgcaaggtcttcgctatttcatcaagccctggacgcgtgctacttactacttccggtgagttcagcctggtcatggacaaggctctgtacgccgagctcggccgctgcggcgttctatcgccccccagtgaggggccatag

SEQ ID NO: 503347 - DNA, 1041 bp, Stenotrophomonas maltophilia
atgaagcgccgtcgtttcatccaatccacactgatcgctgcaacggtggcgccagctgccgccggctccgccgcctctagcacaggcacccgactctacggaacaccaggcagcctgacaggaggctctcgaggagccgatcgcttcctgctccctatctccagagctggcgtgccggtggagggttggctcgagtactcccgattcagttctctgatcgaagatttgctgcttgatccagcagccagcgccgaattcaatcgcaacccttccgccttcttgaaatcacggggcatggatggctcagatctggtcaagaacgacgccaacgttgcgctgctgattgcactgtctcagccggaggtcaaacaggcagttctgagcaaagactatcgctcggtcatttcctatctgcaggcggcaggcacgttctccccggtgtccactgatgcgctgaccagaagtgtctctcaggtcatcaagcgcaatcgtgactccattgtcagcgaacttaagcttcccccaggaacaaagctcgacatcgaatcctacaaggcgctgctcactacttctggcggcggcgccacgccactggatgccgctgccttggcggcgattggtggcaacaatgatgctctggttctcggtgcgtttgccttgctcgtctccgccgttcttgcagcggttggggtccactcggcggtcgttgtgtttacatgggcggcagtggtttcaagcgtcaaggttgaaggtggcggggacgacaatgaagagagtcgcgcggcacgctcctatggcgacctccttcagcgctccgatgcaggcgctcaacagaacatcgaagtagccggacgtcttgcacaactcacgggttctgtcgcggtgtatgacctgaccaaggacgacctggcaaaggcagagctcggggcattcttcgtggcgatgaaggagcacagcctactggactacgatgacgtcgacctcccaggattggtcgaagcgacgctgttgtacacccagaaatcgctgagcgtgaattag

SEQ ID NO: 503348 - DNA, 489 bp, Stenotrophomonas maltophilia
atgccctttcaggacatcgacgatgtccgaggcgggattgtggcgaagcatacgctccgcaagggctgcggccagatcttcgacaacatcgtgattacgccttatcgggaggtctcggcgtgctgtggcctgacgctggaacatatcccagagatgaagcttggcagcattctggatgagtctgcctctcagctctatcgtcagcagacagatgacttcctcaagtactggatccacgtcgatgggccataccagatcatcgagcagatgcttccggggcactcatcagaggagctcctcaaggacgtggtccacatctgccaagcctgcgtgattctccacaagaacgaagagcttcgtgctcgattgctggagcggcacaaggagttcatgccctcggtgatgacccgattcttcctggccaaagccatcaacacagcaggcctgaacagaactacgagcgaacccgccatggaggcattgcaatga

SEQ ID NO: 503349 - DNA, 357 bp, Stenotrophomonas maltophilia
atgaccacgccgcactccccgcccccgcgccccatccaggaagcgcgctcgaacgctccggccccggaccccaacagcctcatcgccatcctgcacgccatcggcgctggcgctgcggccgacggacagccttggcccgagcggcatcacctgcgcagccggcagatgcagttgtccgacgccgactgcgcgctcaccggccaacgcatcgtgcaggagatcctgctggcggccgagcgcacgcgccagaacggcgagccggagcagtacgtgggcgaccgggtgatggaggggctggtgatggccgacctcgcgctgaccgccttcatccacgagcggatgcgacccaaggactga

SEQ ID NO: 503350 - DNA, 906 bp, Stenotrophomonas maltophilia
atgtacaacttgctgatggtctaccaagagggaacatgggatcaagacgaatttttcctcgagctacctagatttcttgaatataccgcccagcctcttattgagcggttcggctcccttgatgggccaactgtccaacatctcaaatcccttcctactctattcgcgtacgaggaccgaggacgtgatgtcggtatttccgccagggtcggaagagtagatgacatccaggtgagatacggcggagtgcgaataaagtggtctttcgacgctggagtggggccgattcccgccttagcgctgcgcgaaatgtttggctcactagatatttcagagcggaagtgggagcacacgaggagccactgggcggtgaaggacgttgacctctacgatgtgctactgcgatatggccatctcaagaataatccaatgccaccccccagggtgttcgtgtcgtactcttgggactctcatgagcacattgaatgggtgagaagcctagtaaacactctgcgcgcgaacggcattgacgctatatctgacaggacgcaccttcgatttggccagaacctgccccattttatggagcagactgcatcttgcgaacgtgtgattgtaatctgcactgagaactacatgaaccgagccaacgggcgcgtaggaggtgtcggctacgaacaccttgtgactgcttctgaactcgcgagcgacccactgtcgatgaggttcattccggttattcgcgatatcagggacgccgcgcacatgcccaccaaccttagaggccgtttgtacgtcgacctgtccggtggtcccaacttcaacgcgaacctgcaagagctggtaagagacttgcacaacgcgataccaccgataccaccgattgggcgcaggccaagcttctaa

SEQ ID NO: 503351 - DNA, 723 bp, Stenotrophomonas maltophilia
atgccatttctgcagggcgtcaaagatctcattgcgtaccgtgctgcctatgtctgctcaaacccagattgcctaaggcttaccgctggaccatccttggcaggtgcagcgctccgggttaaaattggtgaagctgcacatatcattggtgagaatccgggatctgcgcgtcatcagcccttgggcgacagtgtgttgaatgacgtgacgaatgccatttggctttgcgccagttgccatgccgagattgacaagaacaagggggttgatcattcggagtcgcttcttaggcagtggaagtcagatattgaggcgagaattgcggcaatacttaagacgcatcaaagccctctcccgctctacgaacgggcgagctctaactcgaaaattgcacagaatattgtcgagatcattgacagccatggtgccttcttcaggcatgtggcctcagaggatccaagtgctgtgggtaattccatcaagttggcgcgaattaagatagagcggcagagtaggttgatagagggggacgctaggcttcgctcgatcgccagggccattcacgacgcttgccgtgactacatgaatgaagtatctattgataactctttgtgggaaagctatctacccgttctaagaatgcgcatctgggtacaggtaaagtcgctcaacagagagtttggcgttatcgtcccccagaatgtatctcacttgttgccatag

SEQ ID NO: 503352 - DNA, 798 bp, Stenotrophomonas maltophilia
atgagtgctctgggcaagctcaagatcaatcttattgactccatccttaggaagcctatatccaagggtggcgtcttgcgtatgggggcgggcgtcgaaaaggtcgactcgaagattattttgtttcagaaggatggtgggccatggcttatcgttgagcgtagagaagcagaagatcttgtctgttcaacttggaacggagacacgcacgctggagaggctcgttaccccattggcgatttccagagcggggaatacaagatcaagcactactatggctcggataccatatactatgaggggctaaatgattacgcgcgcggctactatctaaagctcccttacgtaatgattcatcttcgtcgtatcctcgagagagcgggcgcgcttctttacaaccgaagacggctagtgcggaagcagcgacttgatctccttacatttatgattgagcaggcagcagaaggaaaaagctcattcagctcgcttgatctcatgacagacatgcactctatccgttgggtgacgcatccagacggagagtctgtgcgcagtaggctaaaactctacttggattcgctagtagacactggcgagttgacaaaagacgggatgaactatcgcctaaatggtcaggcccttagattggtcgaggagcggtctgagcaagagagaaggcatagccaggtaattaagattcagtggcttgtcgcaggacttacgttggcgacagtgcttcttgctttggtgcaggccggtctagttaagctaaagccggtgctcgatcttgcgagctag

SEQ ID NO: 503353 - DNA, 891 bp, Stenotrophomonas maltophilia
atggttcattttgtctattcaagtctatgtaaggatgagaagcttacatccgttgctatgaatgttttgcttgctggccctgatggtgatcgacaaatcgatgttttagttaaacacacccatgctggcatccagtatgtgactgcaattgaatgtcgagactatgcggcgaagcttactgtcagccacgttgatgcctttgcatcggtcgtcacggacataaaggccagtaggggcgtgctggtatctaggaagggcttcagcaaaaccgctatccaaaaggcaaataggcttgggatagggctttgcgtcgtggataatgctgatgctgtcctgaaaggccttgttgtgcaggtcccgctaattgttaaggtggttcatccgacgctggaagccaggacgctagtggccagtcgcgacacagcaaggaaaatttccaatagcgcgtggactacgattaatgatgttccacttcgtcaacttgtcatcaaagagctcagggacgggcgtattgagcatcctgacgcgtcgatggtcatgaaatggtccccacaagatctggctccgccattctttatccgcgacgcgtttggtgtgccggtggaggttgttcaattcgatgtcaccctgcacctgaatgtttggtacctattcggacacactgacaaccttccagacgcaattacgcagacggaggtcggaggtgcggtctgtaatgtattcatgcccgatcgattcaaggctggaattaacgaaagcttttcccgctatgaagatcgtgccgaaattccaatccgcgataataatgccttaattggtgtgtatacgccggatgaggatggttcggtgacctcttcgctcagtacttatcaattggaaggggttttatag

SEQ ID NO: 503354 - DNA, 2169 bp, Stenotrophomonas maltophilia
atggcgacgctcagctttgatctcgagaactgctacggcatccgtaggctctgtcatgacgtccgcctggaccgcaagggctgcgcagccatctatgccccaaacggctcgatgaaaacgtcgctagcgaagtgccttcaagatctatgtaagggcgttgactcttccgaccagatattcaccgaccgagttacgaaacgcagcattttacttgaccgagaggagttgcagagtacgggcgtattcgtggtacgcagctacgacgaaatgttctcgaattctgacaagactgcaatgctcttggtcaatcatgagcttcgactgaggtatgaagaacagatgggaagcatccagaaggcgaaggaagcccttctgaaggcgctgaggaagatatccggcaccaaacgcgacatcgagcgcgaaatctcgcagattttcgtaagaaacgacagggatttcgttactgcgctgcgccgcgtccgagaagaagtgcaagccgagtcgatacaggacttctcgaagaccccttacgaagtaatattcggcgacaagccagcagcgtttttggagaagccggaggtgaaggccgcgatcgctggttacatcaagaactacaacgccctcctgtcccgttcaacgtacttccgcaagggcgtcttcaattacttcaatgcgagcaccatcgcgaagaaccttgcggacaacggattcttcaatgctcagcatacggttagactcaacggtacagccgaacccaccgaagtgcgcgaccggcagcaactcgagctgatcatcgattctgagcgcgatcagatcctcaacgatccaacgttgcgtaagagttttgaatccatcgagaaggcaattaatgccaacgcggatctacgtgacctgcatgcgttcctactagacaatgaggaagtcgttccggaactggagaacatggagagctttcgccagaagacctggatctgttacctcagagcgtgcgcgtccgagttcaagacattccttgaacgggaagcggagggtgcaggcgcactcaaagagatcgaggatcaagcggcgcaagagagcacgcagtggagtgaggtgatccgcatattcaatgaacgcttcagcgtacctttccgactcgaagtgcagaaccgaactcttgtcatgcttggtcaggaaaacgcgccgacccttggctttagatttgaggatggcaatggagatgttgcggaagtcgaccgcagtcgactgatgcgcacattgagcaccggggaattgaaggcgctttacatcttaaacgtcatcttcgagatcgaaatccgacggcagcaggttgagcccactatcttcgtggtagatgacattgcggactcttttgactacaagaacaagtacgcgatcatcgagtacctacgcgagatgtccgaggaccccaagttcttgcagctcattctcacgcacaattttgacttctttcgaaccacccaatctcggtacatcgagcgaaacagttgctacatggcggtaaagggaccaaccgaagtgcgcctcgagagcgcctatgcactaaagggcatcttccccacatggcgcgacaatttctttgaaaatccgaagatgaagattgcttgcatacccttcatccgcaatctgatcgagtacatcgctgacgatcaagatcctagctacctaaagctcacctcaatgctgcacattcgcgcggacacggctgacatcagcatctccgatctcgatggcattttttgcgacctattcaataagaagggcgcgtcagttgaggcgaaaaaaagcgtagttgagttgatcaaggaaactgcctcggcctgcctctatgagcctgagggcattaatctagagaacaagatcatactctcacttggcatacgactggtctccgaagagttcatgattgcaaagatcaatgaccctgaggaagtagccaaaatcacctcgaatcagacaggaaggttgtatcagctttacaaacaacgaataggcgagggtgatagggaagccgttgatgtgcttcgcaaggttatgctaatgactccggagtccatccacctcaactctttcatgtacgagcccattcttgacatggctgacgaccatctacgcaagctgtacaggcgcgttattgcactttcataa

SEQ ID NO: 503355 - DNA, 864 bp, Stenotrophomonas maltophilia
atgcaccgtcaccctcacagttcctttacgccattttcctgcctggcgctgatgctgctgatgctgctgagcgcctgcgcgcgcacgtcttcacatggcgcggagcgctatttcgagggcaaggcacttgaactggccatcgccgccgaacagggtgatgcggcgacgatcacgcgcctgatcaagaccgaaggcgtgaaccccgacaaggagttctcgaagcaggatggcattccgctcatcgcgtggccgttgcgcgcacagaacctggaaggcctgcgcgcgatgctcgacaacggcgccgacccgaatgcacggcgtattgaaacgctggacggcgagacgttccgccacaacaacgccatggtctatgccgcgaagatggacgatccgcgctacttggccctgctgctggatcatggcggcgacccggacacgcgcacctccaataccgaaacgctgctgttccaggctttcatttccggcaacctgtggaagaacatccagctgctggtggagcgaggcgcgcacgtcaacgaatccaacatcggccaggccgataccgttctcagctggtacaccggccgtggcggcttcgagcaggcctactggctgcttgagcatggtgcggaccccacgattgcatcgccgtcatcggcgcaaccgggcgcgcccgatcggatggccatggtcgaagccatctactgggaaatcaccacaccggacctgctgccctggcagaagaagtgccagcagtggctgatcgatcacggcattgcccggccgccgcttccgcagtacatccgcgagaagcgcgaagcattcgggttcccggcgaaggagcaggacataccgccgttgtag

SEQ ID NO: 503356 - DNA, 2358 bp, Stenotrophomonas maltophilia
atgagcggtcacgatcccgagcagcaggaacgcctgttgcaggcccgcgccaagagcgtccaggcgcagcagcacctggtcgagcaactgcagggaggtggacatgccaccgaggcggcgcgcttgcgcgagacctatcacgcccgcgagctgggttcgcttgctggtgatgtgtatgcctcggcaaagggcaaaggtgagccgccggtcgggtggacgcgggccagtgccgtgaccgacccggacacgctcaaagcggcgggcatcagcctgggggcggccgacctgaagacgctgatgcggccgaacgactcgggcttccgcgcagagatctacattccggacaaaagggtgttcggtgatgacgccaagccggtgctggtgttcaagggatcaacgggcgagatcatcgatccccgggcgaaaggcgggcggcgtgagtccggaggcgaggatttcctcaacaatggacgccagggcgtaggcatgcagagcgactactacgatcgggccatggcactggcgagtcgcttgaagacctctggtacccagtttgaactcgccggtcattcgcttggcggcggcatggcctctgccgcttcggcggttaccggtgtacgtgcgaccaccttcaattcggcggggctgcatccggccaccgccgatcgctacgcgaaatcccacggattgccggtgttcaacacgcgcgacacggtgcacacctaccagacgtcgggtgaagtgctcaacgatgtgcagaacggattgaagcggctcaacgagcatcaccggcagggctttggcctgttggccagcgagaccagccagctgctgcgtcagcccggcgtgcagcagatggttacccgcaagctgcaggagatgatgccggcgggtgcgcagacggccacggcccagctggttgaccagctggcgtcgaaatccggggcagaggcattgcgcaatgttccggtggccgcgggcaggatggaactgttgctggacgccaagaccgaagtgaacggaaaggtggtggaccgccgccatcgagaagcgccaagccagcttgccgaatacggtggcccgctggccgaggtgctgatcgcaggtgcgcgcggcatgcgtgccggacgggttgccggtgaacatgtcgagcaggtcggcgcgctggcgggccggggcatgagcttgtccggcgtggccgtcgagcgtgcgtcgaccctgcagggaaatgcgatcggcaccgtggtcgactacggtggcaagagcatgcgggtgggcatcgaaggcggtgcgacggtcattgccaagggtcgcgagctgcagggtctggtcgaatcggtcagccaccgcgtgcaggccaagggcagttacggctggaacatcggggccagcgtgctgggtgcgctcggtgccgacgacatggccagacagatgcgtgagcacggtgatgcggcgcgcaatcaacacgaaaccaaggcccgtgaagccacccgtgaagcggcggcggatgccggccgcatccgtgccggcggccatcatctgggcggccagctgcagcagggcgtgcatggcgtggccaatgggctgcgcaacggctatgccgtgtacggcgcgactttccacatgggcatgaactggagcagccatcagatcaccgggctgacctcgcaggcgccggccgtgctggccggcaccgtcgggctgggcgcgatggccaacaagggcattgccacgcacctgcccacgccggcactgccgcagaacctggtcaacctggccaagacgtcgtgggtgatcgggcgcggcagtgcgaccatgggggagtcggtggaccggcatggcatgagcgagacgatgaaccccagtctcgacgcggcaatcgcgagccaggaggcggccgcgcgcaagctgcttggacggccgcatgcgcagctgcaggaggggggcgcgaagatacccgcgctgaacgatccggggcacatcgatttccatctgttcaagggcgcgcagaccggtgtgcacggcctcgatgtggcacatggccgcatcccgaacctgcagagcgatcagctggccggggcgttggctgtgcaggccaagcgcgaagggttgcaggccatctcccatgtgctgctcagtgacgaccgcacgcgggcattcgcggtcgacaccccggatctgcaggcggcccaccgccgacatgcgcatgtggacgtggcggccggcatggcccagccgctggtcgtgagcacggcgcaggttgacgccctgaacaccggtcgcgaacaggcgacggcagccggactggcccagcaacaggggctggaggcccaggagaacgcccggcggatgggctaa

SEQ ID NO: 503357 - DNA, 891 bp, Stenotrophomonas maltophilia
atgatgcgttccccactgtttctcgccctcgcgctggccgtaggtgccggcgcccccctgcttgcaggcgatgccactgcgcagaccgcacgtgctgtacgtgcgactgcggaaatgagcatggtgctgtccggtcatatcgaggtcacgccggagggcgcggtccgttcgctggtgctggaccagaaagccatggtggccccgagcatcgcctccttcgtggaaggcaccatcggtggctggcgcttcgagcccacgctgcgcgatggccaggcggtggccacgcgggcccctttgcgcgttcgcctgcgcggcaaggctgcggccgatggcggttatgaaatcagcatgaccagtgtcgacttcagcgagtacgatccgaaggccaccgattcggtgacccagctgcacatgacgccgccgcgctacccggaagcggcctaccgtaacggtggccagggtgaggtgctgctgttggtcaaggtggcccgtgacggaacggtggccgatgtggccgccgagcaggtgaacatggccgtggtcgcacctgagcggaccctggccaagatgcgtgacatcctgaccagagccagtgtcagcaccgcccgcacgtggaccttcaagccgccgaccaccggcgaggacagcacccgggacagctggacggttcgcatcccggtgaacttcgccctgaacaacgatcccaatgcagtggcggaacgctatggccgctggcgcgccttcattccggggccgcggcagaccgtcccgtggcgcgaggcggacccggtcgagcaggtcggcagcgatctgctgccggaaggcggcgtctacatggtggacggcgccaagcgcggcctgcgcctgctgaccccgctggcgcagggctga

SEQ ID NO: 503358 - DNA, 1539 bp, Stenotrophomonas maltophilia
atgatgaaccgcctgttgctgtgttcgctgctggtctgcctgaccccgttccacgtgatggccactgacgccagcgctgaagacgctgcgcgctttgcccaggcaatggcccatggcctgcgccccagcaacgcgcagctgggcgcggcgctgccgcagtggtcgatcgaggaacgccttgcccattacaaggtgccgggtgccgccgttgcggtgatccgcgatggcaaggtggtgtacgccgccggatacggcctgcgccaggcgggcacgcacgacgcggtggatgccgataccgtgttctcggtgggctcggtcagcaagatgggcgctgcggcgaccaccctgaagctggttgctgccggcaaggtctcgctggaggagaacatcgatccacgcctgcgccgctggcatgtgcctgccgatgcgcagggactgcacccgccgatcaacctgcgcatgctgctctcgcacaccgccggcttcaatgtgcatggcttccaggactaccagcccgccgaacgcttgccgaccttgctgcagacactggatggactggcgcccgcaaagaatgaaccgatacgcctgatccacgcgcccggccagcaggtcgactattccggtggcggctacacggtggtgcagctggcgatcgaagacctgacgggcagagcattcgccgacgtcgcacgtcgcgaggtgttcgcgccactgggcatgtcccgcagcacgtaccagagccccttgcctgccggctacggcaacgttgcccatgcgcacgacaacaaaggcctgccggaggccctgccacgcggctggcagagctttccggaacaggcggcgtccgggctgtggaccagcgccaacgacatgggcctgttcgtcgcggccctgctgcgcagcatccgcaccaaggatggatggctgccgcagtcattggccctgcagatggtcagcgaagtggcgccggccggtcgtggcctgggaccggagctcgccggcaacggcgccagtcgccgcttcttccacaatggcagcaatgacagctatcacgccggcatcgaaggctacccggagagcggcgatggattcgtcatcctgaccaatggcgacaacggccccgcactgcgcggggaaatccgcaatgccctttccgacgcactcggccacaatgccaaaccagtcatccgcacgcttgacccagcgcttctgcgcgacagctacccagatttcagcggccacttcgtactcgatggcgcgctgccgatggacgtccgcggcggtctcgctgactggttcgaagccacgacgttggacgtacaggcaggccaagcgggactggaactgcgccttccaggacggggcaaggccgtcatgctccaggcactgacccctgttcgcttcctcgccggcagcgtaggtgcggagctgctgttccaccgtggtggcgacggcacggtccaagccctcagcgtgatcgccgaaggcgcgcgtgcctactatcggcgcgcggatatcgcgccagcagcgggccattga

SEQ ID NO: 503359 - DNA, 1527 bp, Stenotrophomonas maltophilia
atgaacctcatcgacatggcgatggcactgggccttcggcagttgctgttgtctgccgttgtgctgctgcccgcgctgtggctggcacggcggcgggccctcagtgccgaacaacgctcctggctgctgaccgccgcgatggcagcggccctgctgttgccgctcagcgccttcctgccgggctggtcaaccaccctacccgcaccggcgccacccgccgccgcgttccaccccctgcccggcgaaggcgcaacggcgggagaggccatcttcgaagctggacggcagcccgacatctattacgtcgaactaccgaagaccctgccgacagtgcttgcagtggtgtggctgctgggcaccctgtggctgggcatgcgcctgctggacgcgatgctgcatgcgcgccggctgcggcggctggcacaaccggcgtccgccggactgcgcgcggtcctggccgacatcgtgcccgcccacgtgacgatcgccacctgcgccgtcgacgggccgatggtggtcggcctgtggcgcccgcagatcctgctgccccgccccttgctggcacggctggacaacaacgtgctgcgcgacatcgtccgccacgaggttgcacacctggatcgacgcgatctgtggacaagcacgctgctgcgggcgggaacagcactgttctggtggaatccactcctgcaccttgcccaggcacgcctggcgctactgcgcgaaatggcctgtgatgcacgcgctgcgatgctggcacgcgaaccgctggactatgcaggctcgctgctggccggtatcgaacagctgcaggccctgcgcgaagaggcgccgacgcttgcactgggcatgttcagtgcacgcagccagctggcgcagcgcatcgaccaactgctggacgccccgtcgtacgcccctcggcgccgcagtctgttgatgctgggcctgctgcttctgctggcctgcgtcggcaccgcggtggctgtctcaccacgactggcctcaccagcggccagcacctccgatacgcgcgtcaacactctgctccaggccgccagcacgcatgacgtcgcgcaggtccacgcgttggcggtggcgggcgtcgatctcgatgcgcgcgtgctcggcgatggcacggcgctgatccaggccatccgcgcacgcgatccggtgatggtcgacgccctgctgcagctgggagccgaccctgatcgcgctgcgctgggcgaaggcaatccgttgatcgtcgcctccgcgctgggcctgcaacccatcgtcgagcagctggtgcaggccggtgcagacgtcaaccgggtcgtgacctatgacgagacgccgctgatcaatgcctcgcgcgaagggcacctggtcaccgtgcagtacctgctcgcgcacggcgccgatatcaacctgggggtggaagccgacggctggctgggccgctggcggacaccgttgaaccaggccggcaccgcggccgtacgcgattacctgctgacgcagggcgcccgccgcgaacgacgctga

SEQ ID NO: 503360 - DNA, 393 bp, Stenotrophomonas maltophilia
atggcccgccctgtctcgcagaatcccacccccgccgagcaggccatcctcgacatcctctgggacaagggcgaagcgtccgtgcgcgaagtggcggatgtgctcggcgaacacaagccggtcgcgtacaccacggtgctgaccatgttcaacgtgctggcaaagaagggctttgtcagtcatcgccaggaaggtcgcgcctacatctatcacgccacgctcagccgcgagcaggcccgccggcaagcgctcgaccatctgctgcatcagttcttcgacggctcaccgaacgtgttggcacagcacctggtggacgaacgcgaaatcgaccgcaacgaactgcaggcactgcagcagcgcatcagcgatgccagggccgggaggaaggaatga

SEQ ID NO: 503361 - DNA, 879 bp, Stenotrophomonas maltophilia
atgtccacagtttcaatgaaatcgctggccgccctcgctctcgcgggtgcggccgtactggcgggctgcaggcctgccggcgagcccagcgtggcgccgaaggtggatgcgcctgcagtggcccccgcctcaccggcgcagcatgtcagccgcaccgcacgactgcaggcgttcctgatccagcgctacggcagcaacgccacgctctccgctgaatggcgcggcagctggactgacgatggcgacacccatgcggtggactggcaggtctgcgcggaacaaccggtggtgagcggagacagctggcagcagttgttggccgtgtgcggtgcgctggtcgatggcgcgcacatcgacccgggaaccatcgagttcttcgtgctgcgcccgaagggcgatggcttcgaggtgaccagcgaactgaccggcgagcgtttcggtagcggcggccagcccggcaccgccagcatcatccgcgccggcagtgacttctatggtttccgcgtcgaggacggttggttcgggcagggcttctcgctgctctcgcagtcgctgatcctgccgggtccgaacggcctggtggccagtggcagcctgcgcagccatatcgacaatgacgcccagtacgagtgcgacacggtcgacgccagtaccgacccggacaccgccaatgactgccgcacccgccgcttcagcatcgatttcgccctgcgtttcgacgacagcgaccgcagcgcgcgggtctggccattgctgatcgacgaaaccggcaccacctgcggtggcaagcaggtccggcaggaacaccgcttcaccctggacccgaagacctgggcctattccttccccgaatcgctgcgacgcgaaggctgcgagtga

SEQ ID NO: 503362 - DNA, 786 bp, Stenotrophomonas maltophilia
atgtccgagccgaacccaccgcgccgtcccctggccaccttcctgcgcacgacgccggagggtgagcctgcgcctgcgaccgatgcacgtgcgaccgatgcgcgcatgcaggacgaagccgggcacgcaacgcccgtggagcagatgcaggccgagcccatcgacctggcacgcccaccggcgacagagatgcgacacgacgatgacgttgtcatcgttgatgaagcagcggccatcgagccggcgccggtcgcggtgcaggcaacggcggtcgccagtgatgcccccagcttcctcggcagcgcacgcacgcgcacgctgccaacaccccgctggcactggctgctggtcgccgggctggcattgctgctggtactgcagagcgtgctggccgaccgcgcgcggctggccgccgacgccggcaaccgcgcatggctgggcacgctgtgcggcgtgctgcgctgcagcctgcctgcctggcacgaacccactgcgttcaccatgaccagccgcgagatccgccccctgccgggccaggccggtgtgctgcaggtacaggccagcatccgcaatgatgcgcgctgggcacaggcgtggccggacctgcggttgtcattgtccgatgccgatggccgggtgatcggcagcggcgtgttcacgcccgcgcagtacctgggcgagaaccccggtgcagccctgctggaaccgggccagagcgcgcgcgtcgccttccggttgcaggagcccgctgcgtccaccgtcgcattcaccttcgacttcctctga

SEQ ID NO: 503363 - DNA, 1554 bp, Stenotrophomonas maltophilia
atgactgcacgcattccacgccgctggcttcattcttcgttgctgctcgcgctggccgcacttggcggctgccagcccaatctgcgcgccgaggctgttgcttccggcccagcgcgcccgcacaacgtgatcgtgatgatcaacgacggcgccggttggggcacctgggacgccgccgcctactggcaatacggcggccgcgaaggggccccgtatgcggatttcccgcagcgcctggcggtaaccaccttcccgttgaatgccagcagccagccgacccgcgacaacgcacagaccctgggttacgacgcgggcaaggcctgggatgacacaccggttcctgcgcaggacctgccgtttgcgggctaccagtacctggctgcggtggctaccgacagtgcggcggcgggcaccgcgttgtcctcgggcatcaagacctacaacaacgccatcaattacaacaacgatggccagccggtcgagttcaatacgctgcgcgccaagcggctgggcatggccaccggcgtggtgacttcggtaccgttcgcgcatgccacgccggccgcgttcgcggcgcagaatcaatcgcgcaacaactatcacgccatcgcccatcagatgctggcgcaggggcatatggatctggtgatgggcaccggaggccctggctacagcgttgatggtcgcgcctgtgacgagagtgccggcgcggccaaggccgagggctgcgcgaatccatgggagtgggtgtcgccgcaggattggcagcagctggaagcgggcagcaccattgccggcaatccgtccgggccgtggcgcctgatccgcagcaaggaagcgttcgccgcgctggcgcagggacggttgccggccgaccggccgctgatcggtgtaccgcgcgtggccaacacgctgcagcaggcgcgccagctgcaggtgctgggcaaggatgcggccacgccttccggtgtgaggaagatcgacagtgtgccggatcttgcgaccatgacccgtggtgcgctgcaattcctgcagcagcgttcgtccaacggcctgttcctgatggtggaaggtggcgccaccgactgggccgcccataccagtgcctgcggcactgaatggcactacggccagtgcagcgaccagccgcagtacggccggctgatcgaggaaaccgtggagttcaacgacgcggtgacagcagtgatcgagtggatcgaacgcaacggtggctgggagcgcaacctgctgatcgtcaccaccgaccacgacaacagcatgccgatgggcccggatgcacagaacgtcgccttcgagccggtgcgcaacaacggccgtggacgcatgcccgggatcagcttccgtcccaccggcaaccattccaacgcgctggtgccgttgtgggccaagggcgcgggcgcggagctgctgggcaagcgcgtgcgcggcgttgatgccgattaccgccagcatgtgcgctggaacgacggcagctacatcgacaacaccgatgtggctgcggcggtgcaggaagcgctgcagcgtccacggtaa

SEQ ID NO: 503364 - DNA, 141 bp, Stenotrophomonas maltophilia
atggagctggccccggacctttcaaggccgctcgcggaaaaaatttcactgccccgggcccactcgatctgcgcccatgtgaaggcctggatgccggtgcaacgcggcaaccctgtctctggaatcctcgacttttggtga

SEQ ID NO: 503365 - DNA, 924 bp, Stenotrophomonas maltophilia
atgggtgcggtgctgccgctgctgggcctgcgggccttcgttgaaaccggccgccatggcagcctgaccgccgccgccgatgcgatgggggtgacacctggtgcaatcagccagcagcttcgacagctgcaggagcggctgggcgtgagcctgttcgaccgcacccggcatggcgtggtgctcagtgcagccggcgcgcgcgtgtatccggagctgctgcaggccttcgatcagatcgcacagagcctgcagacactcgaacgctgggaaacgcggtgcacgctacgcatcagcgcggcaccgagcttcgccgcacagtggttggcgccgcgactgggccggttcagtgcgttgcatccgcaggtggacgtgcagctggactcgagcgcggcgttggtcgacctgcgccgcgagggggtggacatcgcgatccgtcatggactgggccgctaccctggcctgcatgccgagcacctgatggcaccggtactgctgccggtggccagccctgcgctgctggccagcgcgcctgccgtgggtacagtgcaggattgcctgcagctgccgctgctgcaggacgccgaccgcagcgactggcggctgtggttccaggcactggatctgcccgtcgatgaacgactggagcgcggccctgcgttcgatgacgacctgttgctgatccgcgcggcggtggccgggcaaggcatcgccctggtgcgcgacatccacgcggccgaagaactcgccaatggccggctgcaggtggtgatcgaccagccctggccacaggcctttgcctattacgcggtgacgcgtgcggacggcgaggccaacgcggcgatacctgctttcatgacctggttgcatgcagcactgatgacgccgcaggaagcaggcacacacaccctgcaggacgcaggatga

SEQ ID NO: 503366 - DNA, 636 bp, Stenotrophomonas maltophilia
atgaacgaaccttcgctgcacctgtactccgacagttctcccaatggcttcaaggccaccatcgcactggaagaactgggtcttccctatcaccttcaccacgtccacatcgccgatggcgaacatcgccatcccgacttcctgcggctcaacccgcatggccgcattcccgtgctggaagatcgcgcgcgcggcatcgttgtcttcgagtcggcggcgatcctgatgtacctggccgaacagggcaatgcgttgctgccttccgaaccggctgcgcgctgggagacgctgacctggctgatgttccatgccgccagcgtcggcccgatcctcggccagcgcgtgcacttcgagcatttcgcgcaacagcccgattccgcggcaatcgaacgctaccgccgcctgagcgacgagctgttcggcgtactcgaccagcgcctgcagggacgcgagtggttggctggcgatcactactcgattgccgacatcgcccacttcggctggctgcacatcgcccgcatcatcgacatcgatttgtcgcggcatcgccatctggatgcgtggtacgcacgggttgccgcacgccctgcggtacagcgcggcgtgcagctgcccgaaccggccaccggaccgtaa

SEQ ID NO: 503367 - DNA, 1029 bp, Stenotrophomonas maltophilia
atgaatgattcccttgcgatgccgggcgcatcggcgcccgcctttgccacgcacccgggctaccagcgcatgttccgcgccgacgcgctgaccctgggcatctacctgccgctgcgtttctaccagggcaacatggccgtgctgcagggccaggcgcggctggtggaggagatcgaccgctacggcttcgctgcggtatgggtgcgtgacgtaccgctgttcgatccgttgttcggcgatgcggggcagctgttcgatccattcacctaccttgcgtggctggcagcgcgcacacagcgcgtggccctggccaccggcagcgtggtgctgccactgcgccatccgatcgatctggccaaggccgcggcgtcgatcgatcagctgtccggtggtcggctggtgatgggtgtggcgtccggtgatcgaccgctggagttcccggcctatggactggagcacgcggcgcgcggagagcgtttcgccaccgcaatgaacgagatgcgccgttggctgcagccgggcacggatgggcggatgacacatgccggtgccgggcagggcgtgcagttgctgccgcccacggtcagtggccgcgttccgctgatcgtcaccggtggcgcgcgccagccactggaatggatcggccagcatgccgatggctggctgacctacccagaggccacccatgacaacgctggtccgcagcggctggccgcgaagatcggcgcctggcgcgcgctgattccggacggcggcttccgtccgcacatgaccaacgaatggatcgacctggtggacgatccggaccatccacgcacgccgctgcggggtggcttcaccctgcgcaccggccgcaagggcctgatcgatctgctgcaggcctggcagcgggcaggcgtcaatcacgccgcgttggggatccagttcgccgagcggcctgccggcgaggtgcttcaggagctggccgaggaggtactgccattgttcccgtcgcatcccgggccggcggcgaaggtgatggactggtag

SEQ ID NO: 503368 - DNA, 501 bp, Stenotrophomonas maltophilia
atgatcgaagccaagcaccatgccctgatggatgaggcgcagcgacgcggccacgccaacgtcgcgcagctgcgcctgtgcttccagctgctctcgttgtcgtcgtccatcgaccacgattgcgccacccggctggcgccacacgggctcagtgagggtcgcttcatcgtgctgttcctgctgcatggggccggtggcacgttgtcgccccacgagctggccgaacgcgcaggcgtgacccgcgccaccatcagcggcctgctcgatggcctgcagcgcgaagaactgctgcagcgtcgcagcgatgctgaggatggccgtcgcctgcagatcgtattgaccgcacggggaaaacgcttggccgagacactgtttgaccagcacacacagtggatcggtggcctgttcaatggtctggataccgatgaacagcagcagctgtcgcggttgctgcacaaggtctggcagcacaccgatgctggacgagagtctgcagcatga

SEQ ID NO: 503369 - DNA, 312 bp, Stenotrophomonas maltophilia
atgaaagaactgatcatccctgaagctgcccaacgcgacgaatcttcggtcgagatgattcgcgtgtggatcgctgagcgcgggctgcatgcatcattgaaagtggggctgtacgaggatcgccccgacatccgcgaagaacgtgcctgggggcgaattcttgccgacgttgcccagcacgttgccgacgcgctggtgaccagtgagggcatggaccgtgacgtggtggtcgaggccatcaaggcagccttcaacgaggagctgcaggcgccatccagcggccggtccggcgggttcgtcgtgcggcattga

SEQ ID NO: 503370 - DNA, 3060 bp, Stenotrophomonas maltophilia
gtgacccccatcgcgcgcctggcgcaggcctgcgtgcagcgcccggttgcgacgatcctgctggcggtggcgctggtgctggctggcctgctggcattgcgcctgttgcctgtggcgccactgccacaggtcgattaccccgccattgaagtcagtgccagcctgcccggcgcctcgcccgagtcgatggcagccaccgtcgccacgccgctggagcgcgcactgggcagcctgcccggcatctcacgcatcgactcggccagcacccagggccagacccagatcgaactgaagttcgtactcggccgcgacatcgatgaggcagcgcgtgaagtgcaggccgccatcaatcttgcacgcgggcagttgcccagtggcatgcccggcatgccgcagtaccgcaaggtcaatccctcacaggcaccggtcctggcgctggcactgacctcggacacgcgttcgccaggccagctgtatgacctggcctccaccgtgctggcgcagaagctgtcgcaggtaccgggcgtgggcgaagtgcaggtgggcggcagcgccttgcccgccgtgcgtgtatcgctggacccgaatgcactgaaccatgcaggcctggcgctggaggacgtggcccaggccatcggccgcgccaacgccatgcgcccgctgggtgccgtgggcgatgaccgccagcagtggcagctggaagcgccgctgcagctgcgccaggccgcgcagtaccgcgaactggctctgaaggtgagcgacgaccgcacgctgcggctgggcgatgtcgccgccgttgccgatggcgtggaagaccgttacgccagcggcttccacaacgaacgccccgccgtgctgctgatcgtcagccgccaacccggcgccaacatcatcgccaccgttgatgccatccaggcgcagctaccgcaactgcatgcgctgttgccctccggcgtggacatgcggctggtgatggaccgctcgccggtgatccgcgccaccctgcacgaagcagagctcacgctggtgctggcgatcgtgctggtggtgctggtggtgctcggcttcctcggccactggcgtgcagcgttggtgcccagcgtggccattccggtggtgctgttcggcacgctggcgctgatcgcgctgatgggcttctcgctcaatacgctttcattgatggcgctgatcgtcgccgccgtgctggtggtggacgatgccatcgtggtgctggagaacatcgcccgccatcgcgaactgggcgccgaccgctggcaggcggcagtacggggtgcatcggaagtcggtgccacgctgctgtcgatgaacgttgcactggccgtggtgttcgtctccatcctgttcctggacgacttcgtcgaacgcctgttccgcgaattctcgttgaccctggtggcggccatgacggtctccgtgctggtcgcgctgagcctggtgccgatgctgtgtgcacgattgttcgtggatgccgcgcagcaaccctcgcgctggcagcggggcagcaatgcgctgttcgaacgtgtgcgcagcgcctacctgcgcacgctgcaggccagcctgcgccggctgcgctggccgttgctggccttcgttgcagtcatcgcgctcaacacgtggctgttccagcaggtgcccaagggcatcgtgcccaagcaggacaccgcgcagctgcgtggcttcgcgcgcggtgatgacggcctgtccttccaggccatgcaaccgaagatcgatgcgtacaggaagctgttgctgtccgatccggccatcgaggacatcatcggctacatcggtggcagcaacggggtcaacaacgccttcatcatgatcaagatgaagccgctggccgagcgcaaggtgtccagccaacaggtgatcgaccgcctgcgcgcgcggctgcccaagctgcccggcggcaatctctatctgtgggtcgaccaggacatccgcctggagggcgccggcagcagcggcaagtacgagttccagctgctgtcggccgatacagcaccactgcgcgaatgggcgccgaaggtggcggccgccctgcgtggcctgcccgaactggttgacgtggaagcacagggtgaagcgggcatgcgccaggtggtgctggatatcgaccgcgaagcagccgcgcgccacggcgtcgacctgcgcacggtggccaacatgctcaacaactccttcagccagcgccaggtcgccacgctgtacgacagcctcaaccagtaccgcgtggtgatggagctggacccgaagcacacccaggacccgggcacgctgtcacgcctgcaggtgatcgatggcaacggccagcgcattccgctgtcgagcatcgccagctggcgctatggcatggcaccggaccgggtgtaccacagcgagcagttcgcctcgatctggatcgagttcgcgctggcaccgggggtgggcctggaacaggccacgcaggcgattgatgctgcgatgtcgaaactgatgctgccgcgttcggtccagggaaaactgtccggtgaagccggcgggctggatcagctgcgcgcgcgccagctatggctggtgctgggcgccacgctggcggtctacctggtgctgggcatcctctacgagagcttcctgcagccgctggtgatcctgtccaccctgccttcggccggtgtcggcgcgctgctggcgctgtggctattcggcaacgaactgaacctgatcgccctgctcggcctgttcctgctggtgggcgtggtgatgaagaacaccatcctgctggtggatttcgcactggccggcgagcggcgcgggctgagcgcgctggattcagtgatggaagccgcgcggttgcgcctgcggccgatcctgatgacctcgctggcggcgctgctcggcacgctgccgctgatgctggccaacggcgaaggctgggagctgcggcaaccgctgggcattgcgattgtcggcggcttgctggtcagccaatggttgacgctgtacacgaccccggcgatgtatctggcgttggcgaggattcgggcgaagcagtga

SEQ ID NO: 503371 - DNA, 3078 bp, Stenotrophomonas maltophilia
atgaacctctcgcgcccgttcatcctgcgcccggtcgcaacgactctcctgatggtggcgctgctgctgtccggcgtgctggcctatcgcctgctgccggtggcggcgctgccgcaggtcgattacccgatcatccagatcaccacgctgtatccgggggccagccccgaactgaccacacgcaccatcaccgcgccgctggaacgccagctcgggcagattcccggcctgaaacaactgtcgtcgaccagttccggtggcgcctcggtcatcaccctgcagttcgggctggaggtgtcgctgggtgtggccgagcaggacgtgcaggccgccatcaacgcggcgggcagcttcctgcccggggacctgccggtgccgccggtgtaccgcaaggtcaaccccgccggcaccccgatcctgacactggcggtgacctcgcaaggcctgtcgctaccgcaggtgcacgatctggtggatacgcgcatcgcccagcgcctggcgcagttgcccggcgtcggcctggtcagcctggccggtggccagcgcccggcggtgcgcatccaggtcaatccagcggcgctggccgccaacaacctgggcatggaccacatccgcaccgccatcgccgccgccaacgtcaacctgcccaagggcagcttcgatggcccgatccgcgcggtgatgctcgacgccaacgatcagatgcgcagcgtggccgaataccgcgcgctggttctggcctggcgtgacggcgcgccactacggctgggcgatgtcgccaccatcagcgacggcgccgagaaccggcagctggccgcctggagcggcaccaccccggcggtgctggtgaacatccagcgccagcccggcgccaacgtgatcgccgtggtcgagcaggtgcgtacgctgctgccgcagctgcaggccacgctgcccgccggcgtgcagatgaatgtactgagcgaccgtaccgaatcgatccgcgcgtcggtgcgcggcgtgcagaaagaactggtactggccatcggcctggtagtgctggtcacctgggtgttcctgcgcaatctgccggccacgctcattcccagcgtcgcggtaccgctgtcgctcatcggcacctttgcggtgatgctgctggccggctactcgctcaacaacctcaccctgatggcgctgaccatcgccaccggcttcgtggtggacgatgccatcgtgatgctggagaacatcgcccgccatctggaggaaggcgaaagcccccgcgatgcagcgctgaaaggcgcagccgagatcggcttcaccctggtgtcgctgactgtttcgctgatcgcggtgctgatcccgctgctgttcatggccgacctggtgggtgcactgttccatgagttcgcagtgacactggctgtagccatcggcatttcgctggtggtctcgctgacgctgacgccgatgctgtgcgcgcggttcctgaagccgaacgcgaagactgcacatgcgcccgatgtcttcgaccgcgtcatcggcctctacgaccggcagctgcgctgggtgctgcagcgccagccgctgatgttgctggccaccgttgccaccctcgcactgaccgtggcgctgtacttcgccgtgcccaagggtttcttcccggtgcaggatgccggcctggtgcagggcatcagcgaagcgccgcaggcgatctcgttccaggccatgcgcgagcgccagcaggcgctggcggcggccatcgaagccgacgaggcggtggccagcgtgtcgtcctacatcggcgtggacggcaacaatcccacgctcaataccggccgcctgctgatcgagctgaaaccgcacggcgaccgcgatggcgccgccgtggtgatggcgcgcctgcaacagcgcgtgtcgaagatccccggcatcaccctgtacctgcaaccggtgcaggagctgggcatcgaggaccgcatcagccgcaaccagtaccagttcaccctgaccacgccggatcttgaaacgctggaacgctggacaccgaagctgctgcaggccctgcgccagtcgcctgcactgcgtgatatcgccagcgatctgcagatgcagggtcggcaggcgcgcgtagcaatagaccgcgatgcggcggcgcgcctgggcgtaagcgtggaagcggtagccgatgcgctgtacgacgcctatgggcagcgccagatctcgaccatcttcacccaggccagccaataccgggtggtgctggaagccgatccggcgcgccagccgggaccggaagccatcaccggcctgcgcgtgcgcaacagcgccgggcagaccgtaccgctgggttcggtagcgcgggtagaggtgggcccgaccgccctgctgcgcaaccatgtcggccagttcccggcggccacgctgtcgttcaaccttgccccgggcgcatcactgggcgaagcggtggatgccgtgcacgccgcgcgcgcacaggtgaacctgccgcagagcatcgaacttcgcctgcagggtgccgcagcggccttcagcagctcgctgtcgtccacactgtggctgatcctggccgcggtggtggtgatgtacatcgtgctgggcgtgctctacgagagcttcatccatcccatcaccatcctctccaccctgccctcggccaccgtcggtgcgctggctgcgctgtgggtaagcagccgcagcctggacctgatcgcggtgatcggcatcgtgctgctgatcggcctggtgaagaagaacgcgatcatgatgatcgacttcgcgctggacgcgcagcgcacacgcggcatgtcaccgcgcgaggcgatccatcaggccgcgctgctgcgcttccggccgatcctgatgaccacgctggccgcgctgttcggcgcagtgccgctgatgctggccagtggttccggcgccgagctgcggcagccactgggctgggtgatggtgggggggctgctggtcagccaggtactgaccctgttcaccacgccggtgatctacctggcctttgatcgcctgcagcgtggccgtgcgacgtccccggtggccgttgacgaggcgcgcgcgtga

SEQ ID NO: 503372 - DNA, 1167 bp, Stenotrophomonas maltophilia
atgtctgtcgccgaaaattcccgcttccgtcgtgcccgcctgttgtgggcggtgctggccatcgccctcgccgcccttctggcgtggtggctgtggccccggaatggtgccggcagcagcgacgatgcgccgggcaagacggtgccggtacgcgtggcccgcgccagcgccgagccgctggtgctgcgcctgaaggcggtcggtacggtcaccccgctgcacagcgtggtggtacgcagccgcgtggatggcgaactgctgcggctgcatttccaggaaggccagcaggtgaaggccggcgatctgctggcgcagatcgacccgcgcccgtatgaagtgaagctggcacaggctcagggtacccagcagcagaatctggccgagctggaaaacgccgagcgccagctgcagcgctaccgcgaactgcagaagcagaactacgtgtccgggcaggaactgagcgaccagcagagcaaggtgcgccagctgcagggccgccgcctcagcgatcaggcgtctgttgatgaagcgcgcctgcagctgcagtacacccgcatcaccgcgccggtcagtggccgcgtcgggctgcgccgtttggacgtgggcaacctggtgcgcgccagcgatgccgaaggcctggtgacgctggcgcagaccgcgccgatcagcgtgctgttcacggtgcccgaacccgagctgcctgcgctgctcgatgccgtgcaggcgcaaccggcactggcggtggaaacctgggaccgcgaagaacgccggcagctggcccgcggctcgctgtccagcgtcgacaaccgcatcgataccaccaccggcacgttgaaactgcgtgcgcacttcgacaaccacgatctggcgctgttccccaaccagttcgtcaacgtccgcctgcaactgggcgagcagcgcgcgctgctgattcccgatgccgccgtgcagttcggcagccagggcaactacgtgcatatcgtcgacaaggacaacaaggcacagcgccgcaacgtggtgctcggtccggccgatgatgggcgcgtggccgtgcgctccggactggtggccggcgacaaggtggtgatcgaaggcatcgacgggctggaagacggcacggcggtggagatcatcaccgaggaggccgcgaccagggccggcgcatga

SEQ ID NO: 503373 - DNA, 414 bp, Stenotrophomonas maltophilia
atgaaatcctgctggatgctgatgttgacgttctgtatccccctgtcggcctgcgcccagactctgccaccgctgcagcacgggcagatcggcagcgccgccgaactggccgcacagcgcggcccggacacgcccgagcccatccacctgcgccgcgaccaggtgccgcccgatctggtcgacctgattccgctggccgaaaaatggggcatcggcgatgacctgctgcgcgatgagatgcaggaacatgccaccgacgcggaaaagcgcgcgatagctgatgcgctgaagcatcggcatgcgcgcatctccgcctggctcgacagtttcccgcagggccagccgatgaccgacgaagcggccgcgttcatgtacatgcagctgagcgtcgacgaaatgggcctgatgcagtag

SEQ ID NO: 503374 - DNA, 438 bp, Stenotrophomonas maltophilia
atgcgtgctgccggcaaagcatggatctccgtcgtcatgctggccgcgggcatcgcactgctgcctggcctgctgtacctgctcgggctggcgctggtggaaggccggccgaagccggcggaccgcgcgcccagtggtgtggctgcgtgcagcagtgaacaacgggtgggattccagccgatgaatccatggagcttcacgacgcggttcttcgatcctgaagcattgaagaaggcgactgatgtcgagcgcgaagcgttctgggttgcacgccgccacctgatgcggcagccaaggcacgacatgctgcgctggcatctcagcagtaccgcactgacaatctggatcacccggcattggagtaccgcgcagattgccgatgccgcgaggaaggaggatttctgccgcacctggtcgaaacggcgggtggcccgatga

SEQ ID NO: 503375 - DNA, 747 bp, Stenotrophomonas maltophilia
atgaaccgagtgatctggctgctcctggtgctgctgcccggaagcgcgttggccgaagagggcgtgatctaccgctgtacctccagcagcagtgacgtccctaccctgcagcgcacgccgtgcgccaccggcagcaagcagcaggtgctgcgcatccccgacccggccaactcgcagccggccgccgctgcgcctgtacccgccgaacctgcatccgcgcccgttgaaacacccgcgccggtgccggccggaccgggcgttgcccctgcggccccagcaaaaccacgacgcgcggacgaaggacgcacgatcatggaagcaggcatggtcgaacacgcaggagacgaccagatcctcgacagcgcgacgctgcggcgcgatgccgaggcccgcgccgccgcaggtgacggtccaccgaagccgccgcttcctccgatcttccagtgcaccgacagccagggcggcggctacctgtacgagtacgaagccgcgcccggccgctgcgagctgatgacggtacagggccttggcggagtgacgccggtgaatgccgccagctgtgaagtggtgcgcgaccactgcgaagcgcttcccgaagcgcagcgctgcggtggttggcagcagcgcttccgcgatgcccgcggccgtgagcgcttcgccgcgccggagaaccgcgataccgcgcgcggtgaacgcgaacggctgcagggcgtgctggaggccagcaactgcccggtaccagggtga

SEQ ID NO: 503376 - DNA, 678 bp, Stenotrophomonas maltophilia
atgaccctgctgcgcgccaccttgagcctgtgtctgctgctgccgtggacggcacccgcggccgaggacgtgcgtgtctaccgctgcgttgccagcaacggtgccgtcgccctgcaggacaggccgtgcaacagcggccgccagcaggtgcgcgacctgcagcgcccgcgcgatcccgctccacgggtggtgcgcagtgatgccacgcctccgccgcccagcgaaaccccggtcatccgcgagcgcgaagtccgccacgtctacatccagccgccgcagccgatgtacgagtgcgtgagcgaggacggacggcgctataccagcgacaacaacgaaggcaatccgcgctgggtgccgctgtggaccagtgtctggctgccgcacggccatcgtggtccagcctatcccggaccacgcccggccatcggcacgccgatcggcgaaggcacgggttatcgccgcccctcgatcggcatggacgtgcaggtgccggccggcagcgtgctggtccgcgacagctgccatgcgttgccaccacaggaagtctgcgcacggctgagtgaccgccgctgggagctggatcgccgttacaacagcgcgctgcagagtgaacgcaccgccatcagcaacgaacagcgcggtatcgatgcgcgcctgtcgcgcgattgcgaacgctga

SEQ ID NO: 503377 - DNA, 1722 bp, Stenotrophomonas maltophilia
atgctgaaagcccacgcgtcgtgccagacgtggttgttggtggtgatggccctgctggtgctgggggccggcctgggcctccgtgatccgtggccctcggacgagccacgtttcgcgctggtggccaagcagatggtcggcagtggctactggttgttcccgcatcgcggccccgagctctattcggacaagccgccgatgctgatgtggttgcaggcggcgatgtacagcctggtcggccactggcgggtggcgttcctgctgccctcgctgctggccgcgctgggcacgctgtggtgcgtggtcgatctcggccgccgcctgtggacgcggcaggtggggctgtacgcgggctgggcactgctgttcgcgctgcacttcaccttccaggcgaagaaggcgcagatcgatccgctggtggtgctgttcatcaccctggccaactacggcctgctgcgccatctgctgttgggtccggcctggcgctggtggtggctgggctggttctttgccggcatcggtgtgatcaccaagggcgtaggcgtgctggcgctgatgatgatcgcgccggcggcagtcgcatccgtgctgcactggccgcgggtacgcctgcacgtgcgcgacctgcgtttctggctggcaccgttggccttcctgctggcggtgtcgttgtggctggcgccgatgctgctggcaggcttcgccaccggttcggaaccgtaccgcgcctacatggacgacatcctgttccggcagaccgcgcggcgctatacgcagtcctgggaccatcaccagccgtggtggtacttcctggcgatcatgccgtcgatgtgggttcccgcgttcctgctcctgccctgggcgcttccggcctggttccggcggctgcgccggcgcgatgcgcgctacctgctgccgttggcctggtggctgctggtcgtgctgttcttctcgcttccgcatggcaagcgcgacgtctacatcctgccggcattgccgatgttctgcctggcgttggcgccgttgctgcccgggctgctgaggcggcgcgatgtgcagcgcgtgctgggcgcattcaccgcgttgctggcactggcgctggggctggtgggtgcgctggcgctgctgggtgatccggatttcgaagtgcgccttacccatggccgcgggttgcttcccggtgccaccgatgcgctggcctgggcggcgctggcgatggcggtctggtcggccttgagcctgtgggtgtgcgggcgccagcgtcggcacgttgccctggcctctagcctggcaggagtctgggtgctgtacagcctggtcggctatccggtgttgaacgactccagctcggcccgtggcctgatgcgtgaagtgagtgcacgcatcggtccgcaggccgagctgggactggtggcatggaaagagcagaacctgctgatggccgatcgcccggcggccacctttggattcgaagcacgttggcatcaacagctgcaggcggccgtgcgctggcagcggctggttccgcagcaacgctggctgctggtgaacgaggatgcgatgcaggcctgcattgatcgtgcgcgggccgagatggcgggcatttccaatcgtcgccgctggtggctggtgcctgccgatgcggtcgccggcgactgccggccgtcagtggcggaactcgagcacgagcgccgcctgcagggccccggcatcaccgattga

SEQ ID NO: 503378 - DNA, 1122 bp, Stenotrophomonas maltophilia
atgaaaatcctgtacaccaacttccactacggcgacggtggcggccacaccacgtacatcgtctcgctggcgcgtgcgctgcacggccagcacacgctccacgtcgccgcgccggccgacagccgcctgttgcggaccatggccgctgaaggcattgcccgcacactgccgattgcgttcggcagcggcctgccaacgctgccccggcagctggccgaacagcgcgcgctgcgcaggctggtccacgatgaaggcatcaacctgatccatgtcaacggtgcacgcgaccaccgcttcgtgatgcaggggctgctgggcatgcgccgcccgccgatcgtgctgaccaagcacaacagcaaacccaccaatacctttggcaatgcgctgcgcgcacgctgggccaccgatcggctgatcgcggtctcggccgacaccaagcgcctgctggaacagggcccgtaccgtcgctgcccgatcgacgtggtccgcaatggcgttgacctggagcgctactcaccgcagccggccggcaccggcagcgcgctgcgccagcagtggacgcaggatccacaggcgctggtgctggtcagcaatgccggcaccgatgattacaagggctggatcgacctggcccgggccatcgcacggctgcccgatgcggtgcgtccgcatgtgcacatggccgtggccggccacctgcccagcgcgcagcagcgcgaacaggtgcaggcgctgggcgaggtggccgcgcaggtgcacttcaccggcctgctggccgatacccgtgtcctgatcgcggccggcgatgctggcttcgtactgtcccatgacgtcgagacgatctccttcgcctgccgcgagatgatggccagcgccaagccgatgctggtcagcgactacgcgggcctgccggagaacatcgaacaaggcgtcgatggctgggtggttgccacacgcgacatcgacgccatcgccgcccaggtaaaggcgctgtacgcacagcgcgatgcgctgccggaacagggccgcgcagcacgccgccatgcacagcgggagttcggcctgcagacatttgccgacgccacgctggccagctatcacgccgccctggccagcacctga

SEQ ID NO: 503379 - DNA, 1407 bp, Stenotrophomonas maltophilia
atgcacatgccacgcgctcaacgcccacaggtactggatctgatcgctcagctggcccccggccagccgttacctgccgcggcgctggccgagcgtctgggggtggaccggatggcgctcagccggctggtggccgccagtggcccgcaggtggtgcgcatgggcagcacccgggcaaccgcctatgcactgcggcggcccacccgggccggcagcgaatggccgctgtaccggctgcgcgaagatgcgacgctggaggagctggggcgggtaattgcgctggtaggaggcggcttccacgtcgatgccgggcctgactgtccgaacctgcgacgcgcgcccgaaggtgacgttgccgccttctttcctgacttgccgtggtacctggatgacctgcgaccgcagggatttcttggtcgcagcttcgcccatggccgtgcgcaggcgctcggcctgccgaaggacctcaagagctggcaaccggacgatgtgttgatggccctggtaaccgctggcgggactgaagcgggcgatctgctgctcggtaccgccgccgtggaggcggcgatggagacgttgcaggtgccgatcgatcgggttgcggccgacgatcgtcttgcacagtatcgcgagcgtgcgcgtgctgcgctggacggagaggacgtgggctcctcgccgggtggcgagcaacccaagttcaccgccaccgtagaggcctacggcaggcgccgctcggtcctggtcaagttcgcgcagcccgatgaaggcgccgccgcccagcgctggagcgatctgctggtctgcgaacatctggcgcttaaggccctgcgcgagtccggacaagccgcggcgtccagcgaactgctgcagtcgcccacgcacaccttcctggaaatcgagcgcttcgaccgcacgcccgatctgctggggcggcgaggcctggtctcgctgctgtcgctatcgtctgcgttcaccggcgaggtcaccccagcgtggccggttgcaggcgccgaactgcgtgatcaaggctggctgacggccgacaccgtgcaggcgatgggccgacgccatgcgttcgggcggctgatcggcaacagcgacatgcaccacggcaacatcgccttccacttcattgatcgcggcccgctgccgctggcgccggtctacgacatgctgccgatgtcgctggcgccgtcaaagctgggcgtgttgcgcgcggacgagccgctgtcgccggtcgcgccgctgggcagtggtgatctgcagcatctgcgctgggcggcaccggtggctgaagcattctggcagtgcgtggctgttgacgggcggatccagtcgccggcaatgcggtcgttggcgggggcgaacgccgagcgggtgcgggagatgggcgcgcggtttgggtga

SEQ ID NO: 503380 - DNA, 258 bp, Stenotrophomonas maltophilia
atggctgcttctgaggtgaccattgaggccacgtatggcgggattccagtgcaggacaacgcgcccacgtacaagatctgcgccggcatcgacacattgcacgcacttggtgacgccagcctttacgtcagttttgtgcgctccttcttcagaacttgcatggagaacgactcggttccctcgttcgatgatcttgccgttctagatcatctcctggagcagtcccaagcactccgccgtgcatcgagggccgactaa

SEQ ID NO: 503381 - DNA, 216 bp, Stenotrophomonas maltophilia
atggacgcgacagcgatggaagggcgtctcactgagctgcgccacgcgctcaacgatgcagtacaggctatatgggatatccaaggtgtaaccgatctgctcctcaactccggcgagatgggagagtcagcgatccctcctgcggttcgggctgtggttagtttggtcaacgagagagccgcgtctgctgccgagaagatcgaggaggttctgtga

SEQ ID NO: 503382 - DNA, 201 bp, Stenotrophomonas maltophilia
atggtcatctccgcgaacgctctcgaccccctgctccaccgaatccccgacgcctgccgccggctcagcgtcagtcggacgaccctctacgagttgatcaaagcgggcgagatccgctcggtcaaaattggaactcgatccctgatcccggaggtcgatctccagcgagtgctgtcctccagactggaggccgtgcgatga

SEQ ID NO: 503383 - DNA, 1455 bp, Stenotrophomonas maltophilia
atggccaccttctatgattctttcgctcaaggcatgcagaacggtcttgagcgccaaaaggcagtcacgcaacgcaacatgctggcagagttgcagcagctggcacccaaggtcatcgcgggagatttgtccgcgaccgatcgggcgtttgcccttgatccgaagaccgcgcagtcctatcaggccgaaggaaatcgacagcaagacaagctcgttggcttggcgaagtcgctcaccaagttcgcgggcaatccgcagatgcaggctggtatttaccgaagtgcagttccgtatttgaagcgcagcttcggcgccgagatcccggacgagttcgacgcggcctcggtcatgccgattgtcgatcaggtgctggctgtcgccgctggtcgaccgacagctcagggcgagcagttcacgctatcgccagggtccaagcgctttgacgcgacgggaaacgtggttgccgaagcccccttcgccccgaccaatgctgatgtgattgatgtgcctgacggtcgaaacggatcctacaagatggtctgggacccaaggacgcgccagctctcgccgctacccggtgcgcaaggtggcaatcccacggccggcacttcttcagccggtgcaactgtgttccgggcgcccaatggtgagctggtggatatagagcaggtcacggagcctgcggtgcgtgaatcgatcctacggaatcctgaagagtggggtctcgttcccgacggtagccatgcgcagctgcccgatcggagtgtctcccctaccggggccctaggctacacacctccgaagccacagagcgcgcctagcggatacacgtaccagggcgacagcttagtgccaatccctggtgggccagcagacaactcatcaccccaagccgtagcaagcggggagcagagtctgcggaaggaagtgacccagaacctcaaggatgaccaaggcgtcctctccatgtaccgcaatgtgcaatcggctgccagtcgacctagcgcggctggtgatctcagcctgatcttcgccttcatgaaaatgctggatccgggctcggtggtccgagagcaagagtttgcgaatgcgcagaacgctgcgggcgtgccggatcaggtccgtaatgcctacaacaaagccattagtggccagcggctgaatcccacgcagcgtcaggatttcctcaaccaagccgcgcagctcgcaaccaatgcggaagggcggatcactggaaccacccgaaagtatcaggacattgcacgccagtacggttacgacccagtgcgtggcacgggcatggctgacttctccggagtcacaagcagcgtcagtagccgtcccgaagcagccgctggccctgcgcgtcctcagacggaagcggactttaaggctcttcccagcggctctctctacatcgacccggacgatggtcgaacctaccgaaagaggtaa

SEQ ID NO: 503384 - DNA, 975 bp, Stenotrophomonas maltophilia
atggagccggtgccgagccgagctgacattgagcagaacctgagcgccaccttgggcaacatggcagacgggacgctgccgtatcaggcccttaaggaactgcgctcgaaggttggcaagcaagtcggggcgacgtacctgacccgtgacgctgcccatgctgagtggaagaagctgtacgcggcgctttcccgagacatggaggctgccgccacgacgccggaggcaaagaaggcgttcgccagggcgaacaactactaccatctcagggagcagcgtttggacgctatcggcaagatcgtccagaaggaagggggcccggaggctgcctaccaagccatgttcactggtgcgcggaatggcgctactcccctgaagcgtgtgatggactcgctccctgcacaggtgcgcgctgacgtcagtgcatccttcttgcagcggatggggcgtgctagcaaggccaaccagaacgctgccggcgatgccttctcgatggagacgttcttgagcaactgggcggacatcagtcccgaagctaagaaacagctattcagcaatgcgcggttcgggacggactacgtccagaacgtaaataagctggctaggatggccgactccattcgcagcggcagcaaggtgttcgctaacccgccgggcacagccaaacagaccgccctcggcgtgacacttggcggcacaggactcatcgcggggcagaacgcgttgcagggaaatctgggccaggcggcaatcaccgtcgcgtcgactctagccctggcaggcgccaacaacctgctggccagaatgatgaccaaccccaagacggtccgctggctcgctcgaaacaccgagcgggatagcggcgacattgccggtcagatcaacacactgctgcagattggcagggaagaggacgacgacgaggtggttgagctggctcagcgactgaaggccgagacggccggaggccgttag

SEQ ID NO: 503385 - DNA, 192 bp, Stenotrophomonas maltophilia
atggactggaagaccaacaactacgatccccagaagagctgggacgccatgaagagcgaggccttcaaccagcgctacccggaagggaaggctggcggtaaatccatcgccttggccatcatcgccgtccctctgggcctgtccgcagtcgctgggctggtgtactcggttctaaccttcttcggcggctaa

SEQ ID NO: 503386 - DNA, 402 bp, Stenotrophomonas maltophilia
atggacagactgttcccgttggcgctcgcctttatggcgctcttaacgacaccctgtgtcgcctccgcccaggcctatcagggcaatgagggggttctgtatgcctgcgtccgagacgggctacggacatacacttctacgcccctaccaactgacagtgcatgccggaccatcaagtaccgctgggtagatgagcgctctgtacagcctgatccgcctggcacctttatgggctacaagtgctcctcagactgcagcgggcacagggcaggctatgcttgggcctcagagcaaggtacatcctcggtgcagaactgccgagggagctccaagtcgttcgtggaaggctgcatggcctatgtgacatccaagaccaagcgcaacggcgccaagaccaactaa

SEQ ID NO: 503387 - DNA, 672 bp, Stenotrophomonas maltophilia
atggacccaagcatcgccgagctgaagatcatacgccgcccaggccaatcggacgaggagctccatgccaagcaactgacagatggggtgaacagcaacgcgttcctggcccttctgtttgcgcagcattctggctttgccaagggttcggagattggcgagcttgtaggggctactcagcaggcagtggagcgagccaagcggggaggaaccgagcaggcagactcacttctcaccagtcaggccatagccctcaacgcggtatttctggagatgagtcggcgagcggctctcaacatgggtagccacctgagggcgaccgagacatacatgcggctggccctgaaggcacagtcccagtgccggacgactctggagaccctggccgagatcaagaaccccagagccgtggcgttcgtgaagcaggccaacattgccggtgaccaccagcaggtgaacatccttgccccggaaagtcccgctccggtcccggaagaggccgggcgcgcgggaacaaaaaggcggccgaacggactattggaggagatctcagatgcgcaatggctggaccccagagcggcgccggcggcaggcgcaggcaatccagagctggcgaccgtgggagcaggcgaccggcccgcgcagcgtcgaaggaaaggccaaggcggctag

SEQ ID NO: 503388 - DNA, 483 bp, Stenotrophomonas maltophilia
atgagctacccggcagaccttttcgtgcctgcacacacttttgcacttgaacctggtgggcttgtcttcgacgaggagctgtactcactggcagtgcaggtcgaagaagaccatgacaaggacatctggctcctccggctagaaggcgagcttcagtttgctacgcagtatccaggtgcgcaccggaaatgttgcacgctaaatccaaagtaccgcctctcggccaaggtttcgggcaagccacaggtcgtgcatcaaagctaccgagtaggacagctggtttctgtcaaaggtctccctcctttggttgtctcacaggtgatccggggcgcgacgttagcctactctctgagcggggagcaaagggatctaaggtccggagaggccgttgtttggtcgagctgggaactgtggatcacggatagcgaggagcgcgctgtgagtgacacaccattcatgcaattcacggtgcgccagccgtag

SEQ ID NO: 503389 - DNA, 369 bp, Stenotrophomonas maltophilia
atgaagactagtagcagtgatccggaacgccttacgaaactcgccgcgatgctgagtattcagcacgtgagccttttgctgagtgcttggccagaggcagaccgcaatccaggtgcctacactgtagcttctgttctggttacaaacccaggcctcggcaaccttgttctggaatgggcgaacctccacggtttcgagcccggggacaatggctcttccctccctactaattttggagactacgaagcaaagctgaaggctgctatgcccaaaatactggatccccatttggagcagttcaaacagctggttccgaaggcggttgagcttcaggattcggtcaccagaaagcacgggcatggtccgtga

SEQ ID NO: 503390 - DNA, 195 bp, Stenotrophomonas maltophilia
atgagcaactcgatgtggaacgcgaatgcgttaggacttgtctctgtggcggtgcttgctcttgccatgcctgccagcggggtcgctctcgcatcccacctcggggtcttcgagtcgcgcgcctgcaccggattgtcccaactgcaggaaggctcttgcgagtacgagcacaggttcactcaatgcatgcggtaa

SEQ ID NO: 503391 - DNA, 522 bp, Stenotrophomonas maltophilia
atgctggttgaagccgagaactacttcgctttgatagtcgagccaacctgcgccgaatacttcgagcgaccgtgggagttccgccgagggatcttgtcactgatcgtgacctctcacatggtcgattactgggtgatgggcagctacgcgggaagtcaatccagaaaggcgatgggcgacgcagtgagccacggccgcttagctctgacggatcttcacccagacttgcagctactcgccgacgcagctgatgcagccaagcatggaaggctcgcatcacttcagaatagggcccggcagatcaccggagccgatcaactacaatcgacccctagcatctttaacgctcctttcggccacggtgtgtttgccgaggcgatggaaatctacttcgatatccccgacggtcgacgcgtgagcatccggagactcctaacgcagaccttggacttctggcgcggccagttgggaattcaatccaagctccagccaagtgctccaggtcaggaaatccctgactag

SEQ ID NO: 503392 - DNA, 318 bp, Stenotrophomonas maltophilia
atgcttccaagagttgtcggtttcgatgtgccacagctacatgagcgcgtcgattcctctactgatgaggccatcattgcgttgttggatcttgcgccgggtgtccgctggactgagctcttcgtgaggaagtgcgacgcgctggcgtctcagctctccctggcggaagtccgggttgaaggctcgaagatctacttctacgggtcaatcagcgactcaagagcgctcgccgatgcggtcatgtccatcgttcacgtgctgaatgatcagctcatgcgagaagggaacgacgcagcctcgcgggaagaagactcctag

SEQ ID NO: 503393 - DNA, 225 bp, Stenotrophomonas maltophilia
atgaacaacacttcccagaaccagagcgacagtcgcaactcagatgccgataagaagctccgggtcagcagggccaaacagacgggaagggtctcggcgatgaggatttggccggaaagcaagggcagcaacagcagcagccgaacggcactgagcctgggcagccaggccctggtcaggcccaaaaggtcagtgtcgatcgcgacgatcgtcgttgatgcataa

SEQ ID NO: 503394 - DNA, 216 bp, Stenotrophomonas maltophilia
atgcaccgcggctacctcaaggcgatggagtatgcattgcgaatctgcgtactgacccaccctacacccaacgacctctccgacgcatggcatcaacttctgccaaacattgtggccaaacaccggggcgacagcagcgatctcttcgccgcagccttcgaacaatcgctgacggttctgaccgagaaaattggtgcgccagatagcccttcatag

SEQ ID NO: 503395 - DNA, 615 bp, Stenotrophomonas maltophilia
atgagcatcctcaacgttctgctcactcgtgaccaccttgtcgtagccgtggataccttggcagaggatgcccgaacaggagcgctttccgcgggggcgaagctgcttctgatccctcagcacaacctggcactggccactcgcggctccacgcagttcttcctccgcatctacgagctagcgctgcaagccagtttccgcgcggacttcacgctggagcagctttccgccgagctggggttggtggtggaccaactatggccgaactaccagaaggcagcggccgaggcaggcctgccgctagagcagctcggaacagagttagtgctgggcggctggtcgccgaagaacgggcgaatgatggccacggcgtatgccaagagcgacagtcagcgcccgactcgagtccagccgatcggcgggcagctggcatcgcccggcgaaccgctccaggcggtgactccgagcatgtcccaggccgatttaatggcccatgcgcgcctccaggccagctaccttaatgagcagatgggccggcaggtggcgggcggtcggctgctggctgggttcctgcagatcgggcaggccgtggtcaaggacctaggggcgatctga

SEQ ID NO: 503396 - DNA, 1614 bp, Stenotrophomonas maltophilia
gtgataggtggcggtgacgccacgcgcatcggtagcggtcttgcgattgccggccgcgtccacggtgtagctgctggcactgctgtccgggctgacttgcccggtcagatcaccgaaaccgttataggcataagtagtgtgcagacccttcgggtcggtgacctgggtgacctgatccagcgcgttgtactggctgcggatctccgcggccacgccgccgacgtcctgcagggtctgcgccaagcggttcagcgggtcgtactgctggctggtcacgcgctgcagtgcgtcggtgatcgtctgcgggttgccgttggcatcgtaggcaaagccggtggcgtggttgcctgcgtccttcaatgcggtcagctgaccaagcgtgttgaaggtgcgtgccaaggtgcgacgaagggtgccagcagcatccagcgtgtcctccctgaggcggttgccggcgttgtccagcgcatagtgaatggtgttgcccgcactgtccgcgatgtccgtcagccgctgggcggcgtcgtagagataggtaacgctgctgccgtcaggctcggtgatctgttgcacctggccggtcggccagtagctgatctgggttacccggtgctcggctgtggtggcaccgcgcacggtgaccgaggtcggccagccgcgcgcatggtaggtgtaaccagtgaccacgccgttggcgtccttgaccgacaacggccgcccgaacgcgtcgtaggccaaggtctcgaccgtctggcccagcgcattggtcacgctgcgcaggtcgcccttgcgataactgcaggcgccattggccgtgcatcccgcgtcgtccgcggtgtagtaggcataggtggagacatccgccacatcactgcgcgggccatccacgcttcgcagcagtcccaccagcggacactccggcccttcggcctcacagtaggcctgcgtggtgacgcgggtgtcaccggtcaccatgtcgcgcacggtaatggtggttggctggaggcgcgcattgcgtgtgatgcggatctcacggttaccgacggtctgctgcaccagccgattgctgtccatggccacgcgcgtttcgctgacgcgctggtccggagtaccggccgcttcggtggtggtggtcacgctgacagcacctgcggcagcgtcgctggcctccgcataggcgtagttggtgacgacgccacggcggtcggtcaccgactgcagccggcgccggaaatcggtgccctcgggcagataggtgcggcttatgctgccgttgctctcggtgatgccattgaccttgcgcggaagaccactggagccgatggcggtcaaggcgtaggtgctctgcttgcccagtgcgtcggtgacgatggtggttcctgccagggtgtactccaggcgcacgccatcaatgcccacgtcggcctgactgcagtcgccggagtgacggctgcaggtgacccgccccttggcgtcgtagccgaaccagctgtagcgccgggtgtcttcggcggtcacgccggtcaggtaacccgggaagcgggtgtcctcatagtgataggcgcggctggcgccgtctgcataagtcgctctgatcagttcgccgaccggtga

SEQ ID NO: 503397 - DNA, 1407 bp, Stenotrophomonas maltophilia
atgaacgcctacgacccgctggatcacatcatccatcttcgtgatggcacgttgcaggaatcagaccttcgccggattgtcggtcgcgcgctgcaggccaggtcaccttccggaatcgtcatccatgtacatggcggccgcgtttcgcagaagcgtggacggcgcatcgcagaaaccctgcatgacccctatgtgcgggcacaggcctaccccttgttcttcgtctgggaaacgggtgacatcgaagctccgttgaacaacctgggcgagatcctgggtgcagtactcgccaaactgctcttcaggaaagtccagaacaagatcctggaaaagctcggcggtgaacaggcgttcacgccaggcatgaagatcctcaacgccgcgccacccgacgaggatagcctttcggcagatctcgcacaggagttcgctgaagatcccgaggtgaaccaggccattgccgaggcccgtgaggattacagggaggcgacgctggcgcccgccaacaagatgctggcacacgaaccgccagtcgaacacgcggccatcgtcaacgagcgcacggccagggaactgtttggcactccgtcacccaacaaggccatggcattgaactggatcgcgctggccatcaaggtggccagactggtgatacgcgtatggcaacgccagcacaatggccgggggcgtccaggtgccgtctccgccgtgatcgtggaagaagtactgcgagagttctatctcgatgacgtggggcgcatcggctggtggaatcccatgaagaaggatgcacaggattcattcgacggcccggcatcgggtggcgtcagattcctgcgcgagctgcacaggcagttgcagtccgaagcctctgttccccgcatcacgctcgtcggccacagcgccggcagcatcttcctgtgcgagctgttggaccaggcagcgcagatccttccggatctgaagttcgaccttattctcgaagcgcctgcggtgacgtgtcgtcggttcgcgcgtgccatctcgaagcacgaggaccgcatcgggaggttccggcaattggcgatgagggatgccgacgaagccagcgagcgttcactgttctttcccggttcgctgctctacatcgtgtccaacatcttcgaagatgctgccgatgagcctctgctcggcatggaacgcttcttcacccgggagagcgtctatcgcaactctgcggcgtgggcagacatctcggcctgccaggcgttcttcgcccggaaaggagaaagcgcggtgagctggtggacccttgatgacctcaatgccgaccagcgcgaaggttggggccacggctacttcgatgacggtcccttcatcctcggcaaggtgaccgcgttgatcagcgaaacaccgcacacgccttga

SEQ ID NO: 503398 - DNA, 1890 bp, Stenotrophomonas maltophilia
atgaacccgtccttccatcgttacgacgtcatcgtcatcggcggtggccacgccggcaccgaagccgcgctggccgcggcccgcaccggcgtgcgcaccctgctgctgacccacaacatcgaaacggtgggtgcgatgagctgcaacccggccatcggcggcatcggcaagggccacctggtcaaggagatcgacgcgctgggcggtgcgatggcgcatgccgccgaccgcgccggcatccagtggcgcacgctcaatgcctccaagggcccggccgtgcgcgccacccgctgccaggccgaccgcaacctgtaccgcatggcgatccgcgccatcgtcgaaggccaggccaatctgaccgtgttccaggccgccgtcgatgacctggtcattgaaggcgacgccgtgcgcggggtcatcacccagaccggcctgcgtttcgacgccgaagcggtggtgctgaccgccggcaccttcctggccggcaagatccatgtcggcccgacccagtacgccgccggccgcatgggcgacccgccggccaccacactggccgcgcggctgcgcgagcgcccgttccaggtggaccgcctgaagaccggcacgccgccgcgcatcgatggccgctcgctggactacagcgtgatggacgagcagcccggcgattcgccgcggccggtgatgtccttcctcggctcggtggacgagcatccgcagcaggtcagctgctggatcacccacaccaccgaacagacccaccagatcatccgcgacgcgctgcaccgttcgccgctgtacagcggccagatcgaaggcatcggcccgcgctactgcccgtccatcgaggacaaggtggtgcgcttcgccgagaaggccagccaccagatcttcgtcgaacccgaaggcctgggcatcgtcgagatctatcccaacggcatctccacctcgctgccgttcgacgtgcagctggagatggtgcgcagcatccgtggcttcgagaacgcacacatcacccgccccggctacgcgatcgagtacgacttcttcgacccgcgcgggctgaaggcctcgctggagaccaagctggtcaacggcctgttcttcgccggccagatcaacggcaccaccggctatgaagaagccgccgcgcagggcctgctggccggcctcaacgctgcgcgccaggtgcgcgggctggacggctggtgcccgcgtcgcgacgaggcctacctgggcgtgctggtggatgacctgatcacccacggcaccaacgagccgtaccgcatgttcaccagccgcgccgagtaccgcctgcagctgcgcgaggacaatgccgaccagcgcctgaccccgaccggccgcgaaatgggcctggtggatgatcgccgctggagcgcgttcgagaccaagcaggccgccgtcgctgccgagcgcgcacgcctgggtgcgctgtgggcaaccccggccaatgcactgggccgcgaagtgaacgagacgctgggcgtggcggtcagtcgcgagaccaacgtgctggacctgatcaagcgccccgagctggattacgccaagctgatgcaggtgccctcgctgggcccggcggtggccgatggcaaggttgccgagcaggtggagatcggcgtgaagtacgccggctacctggaccgccagcgcgaggagatcgagcgccagcagcggcacgaagccacgccgatcgctgaagccttcgattacgcgacggtgcgcgggctgtcggccgaagcgctgcagaagctggagcgcgtacgcccgcagaccatcggccaggcacagcgcattccgggcatgaccccggcagcgatctcgctgctgctggtgcacctggagcgcgcacgccggggacgcgtggcataa

SEQ ID NO: 503399 - DNA, 612 bp, Stenotrophomonas maltophilia
atgatgttgctttcctttgcgctggccactgccctgggcacgtcggcagaaccgtccaaagcccccgactgcagctacgaccgtgccgcgatgctggcgatggaaccggatgcgttcgatcaggacatggaaggcggctggcgcacgctggccgaccgtggctgccaccgcgaagccgctgaccttctcgccgcctatgctgcgttgccgaaggctgcaggcaactccatgattctgtggcatgaaggccagatgcgtgcggaggcgggccagtacccgcaggcggtggcgctgatgcagcgcacctacaagcccaccgacaccgatcccggttactggaacgcctacgtggacggcacgatcgccttcctgcagcgcgatcgtgcggcgctggagaaagcgcgtgcaaggttgatcgcgattcctgcgccggagcagattgccagggcgctgaaggatgggcgctatcacttcacgaccgccggcgggcagaaggtggatgcgccgtggccgccgaacctggacgtgctcgatggcttcctgcgctgctttgatcgcgattaccacaatgcgatgggcaaccagtcctgccggaatccggagggcggttga

SEQ ID NO: 503400 - DNA, 786 bp, Stenotrophomonas maltophilia
atggcagatcagacaaccaccgcattgattgacccggcgctggccaatgccgccgacgggcctgcattgctgggggcgcagctgcgcctgccgggtccgcgccgcacggcacgccaccagcacgcccgcgggcagctgctgggtgcacatcagggcctgctgcggatcgaggtcggcgacctgcactggctgctgccggcgggtcatgtcgcctggataccaccttcgctgccccacgcactggccagtaccagtgcgttcgacggctggagcctgtacttcagcgcgcaggcctgcaccgacctgcctgcagcccctcgcatcttccagccggggccgctgctgcaggccgcggtgattcgggcgctgcagtggccgcatgttccactggatgccacacaggcacgactggccggtgtgatcgccgatgagattgccgccagcaagcctctgccgcttgccctgccacaaccgcgcgaccgtcgcctgcgacggatcgctgccgcacttgcacgttcaccagacgatcttcgcagcgtcgaggactgggcggccgcgattggactgtccagccgcagcctggcgcgccattggctggccgagacccacatgacgctgagccaatggcggcaacgcctgcgggtgctgctggcactaccacgcctgatggcgggagagccggtgatcagcgtcgcgctgtcgatgggctacgacacacccagtgccttcatcgccgtgttcaagcgcgagatgagggtgacgcctgcgcggtatgccggcggatga

SEQ ID NO: 503401 - DNA, 891 bp, Stenotrophomonas maltophilia
gtgagcgccgcgttgcagaccaacgcgttgccggcgcgggtattgatcctcggcatgggctggagcgggtgcgtgctggccacgcatctgcgggcgttgggcgtacacgtgaccggcacggtgcgcgacccggcgtcggcaccgcacgatggcctgctgcgccatcagctgcgagctgacataccaccgtcgcccgccctgctcgatgagatcgcgcaggccgaggccgtgctgtgcagcgtgccgcccgatgccgagggtgacccggcactgcgtctgctgctaccggcactgcaggaaagtccggcacttcgctggctgggctatctgtcatccacgtcggtctatgccgatcgggccggcggctgggtcaacgagaccagcgtggccgatgccactgaaacgaccggcatgcaacgcagacgcgccgaggaccagtggcgtgcgctggcggagcagcgcggtatcgcctcggcggtattccgcctgcccggactgtacggaccggcgcgcaatgcgctgctgcagctggcgcagggacgtgcgcgccacgtagtgcgtcctgggctggtattcaaccgactgcacgtggatgacctggcaacggccgttatcgcatcgatgcagcggccgtgcgtggatgggctgtatctgccggccgacgacgagccggcaccgccgcagcaggtactggccttcgccgcgcagctgggcgggtttgcgatgccacctgccatgccctgggacgatccggcgctgagcccgacactgcggcgcttctacgagagcagcaagcgcatcgacagcaccggtacgcgcgaggcgctgggctgggagccgagcttcccgacgtatcgggaagggctgcgcgggctgctggaagcactctga

SEQ ID NO: 503402 - DNA, 321 bp, Stenotrophomonas maltophilia
atggctggtcccaagaccggccatgcgccggaattcgatcgtatgcaaggacatgaattgttgaagaaagtcttttacatcgctgtcgcggtgctggtgctggggcggttgatcgattttgtgttctacggtggtcatgcccacgatctgatggcgacggtagggtttgccgtgctgttcgcgggtgcccttctggaggaacgttcgcgcaaggccgacccgccggctgcaggcctgcggcgccgggccaatgtcatcgccgcgtgcggcatcgcactggtgctgggctcgttcctgctggaatggaaggttttcagctga

SEQ ID NO: 503403 - DNA, 216 bp, Stenotrophomonas maltophilia
gtgagcccatcgaccgaccctcgcgatgcggaagaacgcgcgctggcgcaggcgttgcgtgagcagacacagcaggaagaaacgccggatgtgagcgaggcgctgcagaaacgcattgccgctgaatcgcgcgatagtggcgtgggctatgtggtggtgcaggtgctgttgttgggggcgttggtggcggcggctgtctggtatttctggcactga

SEQ ID NO: 503404 - DNA, 1122 bp, Stenotrophomonas maltophilia
atgcgcttgctgacccttctccccgcgctgctgctgttcgccgcgctgcctgccgccgccgatgcgctgcgctgtggcgaataccgcagcaccgacggtggcatggcgctgatattcacatcacccagcaccggctaccgccacgacgacggcagcgagccggagccgctttgggtcgatcgcagtgcggcgcaggcccgcctggtcatgctcgacgatggcgtggcgctgccggtccagatcagtgccgatgggcagcgcatcgaagacgaggttgtggtggtctacacgctgcgccagtcccgggactgcgccagcgaacccgccgcgattgccggcagctgccgcgccgccggcagccactgcattgcgcagctgcccgcggcttcgcccagccaggcccagcgcgcgtgcagcgaaggcgttggcgcgggctgctcggcgctgctgcgacaactgcgggatggcagcccagcaaaggccaccgacgacgtcggtgccacgggctttgatcgcccacctgcctgccgcgaacacacgcccgggcatgacccgcaggcctgcgaggcgctgaccaatgatgcattggctgccgccatgcagcgggtgaatcaacgcctgctgcaggaagacgaagacacactggattcgccgcttccggccgctgcacgcgatcagctgcagcagcggtgcctgcagcaccgcagtggccgcttctgcgtggaagtggccgctcagcaattgaacgcgctggaacctgcgttggcagtgcaggccctgcaggtggtctgcgatgcaggccgcgtcagtgcctgcggacgtaccgcaccgctgcgtgaactcggcaccgacctgcgcctggtgccgttgcagcgggtgccgtgcggccgctatcaggcctacggtggcgtgatcgacatgctcgacttcggtgatggcgcgcatgcccgcctgcacgaaggcgccgtccagctgcagcagaacggcgaaacccttgtgctgcgccagctcggcaatggcgacctgctcggcatggacaaccagacggcctaccagcgttaccagctcgtgcccggcacggcacaatgcacgcccccgcgcgagggccagggttcgccgtag

SEQ ID NO: 503405 - DNA, 1617 bp, Stenotrophomonas maltophilia
atgcattcacccgcaccgcgccgccgctggctggcctgggcgttgctgctggccgcgccgatggctgccgcacaatcgccgcaatgcggcctgttcaaggccgatgaaggcagcagcacgctgcgcatcagctcacccaaccgcggcgagcagaagcacttcggcagtgcgccgtctccggtcgcgttccagcagatcgacggaaagctgcagctggtgaacctggagtacggcctgcccagcgcgctgcaggtgcgcgatcgtggccgcacggtcgaggtggatggcacggtctacctcctgcaggcccccgcacagtgcgccgcagccgccacgccagctgatggcagctgcctggccgatgcggccgcgtgcctggacaaccgtcgcgaagcgaccccggccgcgctggaagcagggtgccgggaaggcgtgcccggcatgtgcttgcaactggccgatcgttggcacgaggaggccaaacccacggtcgaggccgatcccgccctggcaaaggcagcgctcgacgccgccttgtccggcatcaaactccccgccgcctgtgactacggtggcttcgaacagggaaccccggcgtgtgccgccgcactcgaggccgacccggcagtgcaggagcagctggtcaaggccgcgatgacggccgccatgaccgaagccatggtgacgatgacggcgccgaccgtgccggtgatcattccagctgagcggcggcaacagttgttgcggttgtgccgcgaggtagcgcacggcggcttctgcacccgcgtggctgagctgtcctgggacgcgggagatccccagcaggcggtgcaggccctgactgcagcctgcacccccggcaatgacaccgccacctgcgagcgcctgccggcgttgcaggcagtgggcgcatcgctgcgaccgcagcccgcaactgcattgccctgcggcaactaccggtccgacggcggcctgatggacacgctggacttcggcgatgccggcctggttggcgttggctggagcagccatcttcgcgcacgcgtcgaagcgggcgacatccgcatccaccacgaccgggacggcgacttcgtgctgcgcccgctgcccggcggccagttgctgggcctggataactggacccgcttccaggtgttcgtccccaccggcgagggcccgacccggtgcagtgcaccgaagcagttcaaggtgctgccactgccgcaggattgcccgatggcgctggccaacgagggcggtgccgaagcctgctgcgcgcagggcaagctgcagggctgcaacattctcggcaaccgccttgcgctgtccggcgactggctgcaggctgccgagcactacaccacggtctgccgcgccggcgtgcgcgaagggtgcgagaacctggtgaccgcgcagggcaacggcgcggaactggacgcacgggcaaccctggagcagctgtgcaaggccgaccgtagtggcctgcatgtggcctgcgacgtgctcggcacccagaactgggagctgatcacgctgggtggtgctctgcagaaggcggttgacgaggtggtcgaggacgacgctccggcgccgcgcaactccaaccgcaagcgctga

SEQ ID NO: 503406 - DNA, 1521 bp, Stenotrophomonas maltophilia
atgcctgctgctgtttccctccgcctccgcgctgcgggctggcgctccctgctgttgctcgcactggcctcggccagcctgccggctgccgcgcaatcgatggcctgcggcacctacaaggacagcgacggcactatcacgttgaccatcgagagcgaaggccacgccttcctgtccggcccctaccaggccaccgaggagctgcgcatcgcccgccaggaagacgtgctcggcaccggcaacctgtccacgggacgcctggaaaactggttcttctcggacaacgaccgcacgatcaacacgccctatcgcgagttcacccgtgagcacgccgccgcctgcaagacgatgcccgagcccatcgaagatggttgcgtgatgaacacctccgagtgcctggaggcgctgcccgaggccgcaccggtgaagctgcacgcctggtgcgtcgagggcgtgggcgcggcctgctcccagctgttggagacctaccagcagcaggccaaggacgctgccccggcgcctgcacgggccgagccgccgaagccggagatctgcaaggaggattccgcgtccttcaacgccgagggctgcagggcgatcgccgaggtggtcgggctggagatgatcggcaagtccctgctcgggctgcagcattcggttgatcccgtgttgccgtccgcgcagctcgatgagctggccgcactgtgccggcagcagcacggcgagaccttctgcgccgacgttgccgaggtgctgtggagtggcgggcgcctgttgcaggcccacgaagcgctgcagctgtcatgcgcgcagcgcgcggacggcgtggcctgcggccgcgccaaggcgcttgccagcctggccgctgcgccggtcgcttcactggctccggtgccggccactgcgctgccgtgtgggagctatgaagccgagtacggtgtgctctcgcagctgcgcttcctcgatggcggcctggttgaggccgagggccgcgaccagcgcctgcgcgcgcgcctgcaggacggccgcatcctcatccgtcccgatgtcggcagcgacttcgtgctgcaaccgctgaagaacggaaacctcgccagcgtcgacggcggcaaccgcttcgcctactacgagcgcaagcccgccgcaggcaatgccagctgcacgccgccggtgacgttcgtggaaatcccgctgccactggattgccccaccctggcacgcaaggacggcgccaaggcctgctgcaccgagggcaagctgctcggctgcaaggttgccggcgaagccctgttcgaggccgagaaatgggccgcgtcgctgccctacttcgagacgctgtgcggcgccggtgtccgcgaagggtgcctggcattggcagcggtgtattcgcacaccgccgacccgaagatcccgcaggccatggcggcgctctgcgcgaaggatggcaagggcacgcatgtagcctgcgatgtggacgccacccgcaactggccggcactgaaggccgaagccgcgctctga

SEQ ID NO: 503407 - DNA, 147 bp, Stenotrophomonas maltophilia
atgcaggacagcaagccgacaccaccaagaacgctcaggatcatcctgtggagccttatcgccgccttcgtgctgttctgcggcggctattacctgggcaaggatctggcccagcgcgacaacgccaggcagtcagccggccgataa

SEQ ID NO: 503408 - DNA, 336 bp, Stenotrophomonas maltophilia
atgcgccggatcacccgccaactgcgtacgtacctgatgatgctgctgatggcggcattcgtggtcgtgccggtggccgacgcactggtgtgtgcggtggaaccgcatgccagcagcgcccatgtcgaatccctcgcggacgatgcaggcggtgacagcgacagcaagcacacgggtgcctgcacgcataaccactgccaccactccacgctgagcctgccgacgaacgatttcgcggccttcggtacgccgctgccggcgcgctggatgaatgccggcgacgtggcgacctatgcggtcgcccaggatgaattgacgcgtcccccccgggcgtga

SEQ ID NO: 503409 - DNA, 762 bp, Stenotrophomonas maltophilia
atgaatgatgaagccgcagtgacagggccatctgccgccgaggcgcttgccgaccgcatcgtccgcaacgggcagcaccgcgatccagcagacttcgcagcctggctgcagcagtccccggaactgcaggcacccgcggatgccggcgcggtgaaattggcaacctggcaacggctgatgaagggcaccacgccgttcccgcaggcgaacttcgaacagctggccaatcacttcctgtggtatgaccgggacaatatccgcgagtgctacgacatggccgccctcggccacagcatgcacgtgtgctggttgctggtgccaggcaacgaggccgcactcgcccgttacatgcatcgcgagaatgcgccggtttcggtggcgcaggcgcgcattcgtgtcgcacggctcagtggaccctggcacccaatgcgcgcgcgcatccaagcgctgtccgcgcgcacgcggcgcgagatgcatgaaacactgcattatctggtcagcttgcctgtcatggcgcatgtgtcgcccccgcccccattgcagcgcaggcaggtcttgttctgggcggccgcatgcgatgccctgcaccgttccgtgtcgtcccgcaggcgcttcacctggcgaacggtggctctggcactgcttctggcgtgcgccctgctggccaccatcgccatcctctgcggggcgtcttccggctccccgtgcaatgcagaccgtgatcgttcaaacctgctgcccccacaagaggcaaccccatga

SEQ ID NO: 503410 - DNA, 1101 bp, Stenotrophomonas maltophilia
atgagcaactggttggacctgctggagcgcgccaaagccaccgacccgcagtctttcgcggtatacctccagggcctgcacagccagtggtccctggacgagcgcgatgaagcaagcaccagggtgctgcaggcgctgcgcgcgcggcaggcccccatgaacctgtccgcagcagcggcgctttaccaggccttcggctgggacgaagaggactgtggcccggcaccaggcgagctgcacgagctggccgaacacgcctggcaggactggctgcagctacccgcgcagatcgacatgctagcccagcagatggaggcgcgtggcggacgctggaccagccacgatgacgctgcgagccgcctcaggcagctacgcgagccgcgttcggacctgcacaatctgatgtccgcgctgccgctgcgcgtgccgcgccaggccgcagcgttgatggacgtactgggctgccaggaggaccgccctgtaccgcccggcatcgatccaggccaagcccgtttctgggccggcgtcagcgatatcacctacctccctgcggcacagctgtcattgctgcgtgcgctcttggcaagcctggtgctgacgttggtggccttcatcgcgttggccaccacccagatcgccagcatgctgctgccctaccagtcggaggagcagcgcagggcgatcgtgctgggcacggcagtgctggcgccactgctcggcactctgctggccattggcctgcgtcacctgttcgtctggcagagcgcccctgaagaaccgtctttgccaccttcctggctgcgttggctgaccctgccggtcgcctgcgctgccatcgcagcggccggtaccaccgtctacctgtgggtgccctcgccttcgctgtggctggcaccgttgtgctggctgctggcctggaccgtgctgaccacagcgtggatccgctaccaactgcgccggggcaagtccgtccgcatggcattgccagtgtcattcctggtgatgctgtccgtgctcagcgtgctgccggcgctgctgggtacgctgctgctgtggagcttggacctgttcggctaccgccagcggctccgtcgcagctga

SEQ ID NO: 503411 - DNA, 711 bp, Stenotrophomonas maltophilia
atgcgcggccaatggcgcctgcagctatcgcaagggcgacctgcgcagcgtgaccaatgcgctgggccagacggtcgagaccttggactacgacgcgttcgggcggccgttgtcggtcaaggacgccaacggcgtggtcaccgattacacgtaccatgctcgcggctggccgacctcgatcaccgtacgcggcgcgaccactgccgaggatcgggtcacccagctgagctattggccgacgggccaggtgcagaagatcaccgagccggatggcagcagcgtttcctacgtctacgatgctgcgctgcgcttgaccgacatcgaggacaacgcaggcaacacgatccactacacactggacaatgccggcaaccgcctcaaggaagacacgctggacaccgctggcacgctgcgccgtaccctggcacgcacgttcaacacgctcggccagctgaccgcgctgaaggacgcaggcaatcacgctaccggctttgcctacgatgccaacggcaacccgcagacggtaaccgacgccctgcagcgggtgaccagccagcagttcgatccgctgaaccgtctggcgcagaccctgcggaacgtcggcggcgtggcggcggagatccgcagccagtacaacgcgctggaccaggtcacccagatcaccgatccgaagggactgcacaccacctacgcctacaacgggttcggtga

SEQ ID NO: 503412 - DNA, 942 bp, Stenotrophomonas maltophilia
atgaggcgcattcccccgcatcgccgtaccgcactcggcactcgccgttggcgcagcactgccatcgccatcctcactctgctgacgcttcccgtggccaccctcgcctcacccgtggcggatagcacctgtaccctccccgcccgcccgggcgagcgcatcatcgacgttccctttgacgtcatcgacgggcgcatccatgtgcaggtgcaggtcaacggcagcggcccgtaccgcttcgccatcgataccggcgccagcggcatggcccgcgcggacagccgtctggtgcggaaactggcgctacccgcggacgccagcacctgccactccgacggcgtgcggacagcctgggccgatacggtgcgcatcaacgccctcgcgctcgacgggctgcgccacagcgacgtgaccgcgctcacccgcgactacaacgcacggcaatccaaagacgcagtgttcgacggcatccttgcgcgcggattcttcgctgatggcgtgctgatcatcgattacccccaacggcgcctgcagttccgccgcgacatcgacctcctgcccgcgcaaccggacacgctcgcctactcacgcgccttccgcatcccagtgaagattggagcagtgaccacagaggcgcagctggacaccggcgccaacgtcgcgatggtgctgcccacggcactcttccggcgggcagccggtaccgcagcgaccaccggggatcgactgaccctcagccacggcgaggtcgatggcggacgtgcacggctggatgttcccgtgttgatcggtggcctggcgctgcaggggctgcacgtacgggtgtccgaccgctatcccgaagcggtggtgggtgcccatgcgctgcaggacgcagtggtgctgatcgatcagcgcagccaacgtgtggcaatctgcccaagcaggccccatcgcaactga

SEQ ID NO: 503413 - DNA, 504 bp, Stenotrophomonas maltophilia
atgtcccgctccatcttgtttctctgcaccggcaacagcgcgcgcagcgtgctggccgaagccaccctgcgcgcatggggcggcgaccgcttcacggcctacagcgccggcagccacccgaccggccaggtcaatccgttcgcgcttgcacagctgcgcgcggaaggtattccggtggcgggactgcgcagcaaatcctgggatgagttcgccgacgcggctccgatggatctggtgattaccgtctgcgatgcggcggcagcggaagcctgcccggtggtgttcggtgatttcatccgcagccattggggcctgccggacccggccgaggcagagggcagcgatgccgacaaggccgccgccttcgcccacgcgcatgccatcgtcaaggcacgcgtgcaggccctgctggcgctgcccgggcacgtgtggcaagaccgcggaatgctgcagcaggcgctggaccagatcggccatctgctgccggcagcgcgcacgccatga

SEQ ID NO: 503414 - DNA, 627 bp, Stenotrophomonas maltophilia
atgacccggattgccgacctcagcgccgaccagctcgcccaccacgcgctcaacatcttcatcgcccagggccgtcacgtggaaggcgcccgcgtgatctaccgggcgctgcaactggacccacatcatcccgctgcactgcgctgcctgagcgatttcctggcccaccagggcaccgagccgttcgcagcggccacgctggagcacgcgctgtccggcgccgttccactgaatgacgatgcgcgccggatgctggatgacctgcgcttcctcgacatctggtcctggggattctcccggcacgtctccggcgaaaccaatctcagcggcgaagccttccagcagcgcgaggacttcatcttcgatggcccggcctatgcggccttcctcaacacggtcaccgagccggccggttcgctgcagggtgccttccaggcggccgtccgcatctgcgggctgatgtccggactgctgcgccatgcggagaaggacaatccggcattcgatgatgtgctgcgatcctccgccttcgtcgagaccgaggcgtacccggcatggctggcctcgccgaccgacgatctggatgccctcgaccaggccatccaggcgcagcgccaggccggctga

SEQ ID NO: 503415 - DNA, 756 bp, Stenotrophomonas maltophilia
atgcttgaaacgctgctcgtactgttgaccgctcaccttgtcgccgatttcgtgctgcagaccacgaagatgatcgcgcgcaagcaggaactgcatggcctgctgctgcacgtagcagtggtgctgctcgtcatcgccgcgctgaccggttcaatcaacccatgggtctatctcatcatcggtttcagccatgcggtgatggactggatcaaggtgcattggctccccgatggcgtgcacgcattcgtcattgaccagttggtgcatatcgccttcatcgtgttgatcgcgttgatgttccctcacgttgcccgcgatggctggtacgggatgatcccgacccaggtccaactgttgatgtatcagggcatgtcgatcgcgagcggcttgatcctggtggtcaacgtcggcggcgtcttggtggagaagctgcttgcgccgttcacggcaggactcaagatgggaagcgccgaatcggcgcctacgaccgcagccgtgcagagcgacgatcacaagggcatgcagaccgcagggcgctatatcgggcggctggaaagaggcttgatcttcatgttcctgctgctgggccagccggagggcgtggggttgatgctggccgccaaatcggtgctgcgcttcgccgaccggcaggcgcgggcacacaccgaatatgtgatcatcggtaccatgctcagcttcggttgggccatcgccgcaaccatgttgaccaagctcgccatctcgcattggcgctag

SEQ ID NO: 503416 - DNA, 693 bp, Stenotrophomonas maltophilia
atgcccgatacatcgtctgatctgattgccgtgcttaccggcgacctggtcaagtccacggagatggacgcggccaccattgatgacgtccgtgaagtgatttccgttgccgtggcccaggccatggagtggcctttgccgggcattgtcggccccgagttctaccggggcgacgcctggcagctggcggtcacccagccgcacggtttcctgaggttggcgacctggatcaaggccaagcttgccgcgtcggagtcgcgggcgcgcacgcggatcgcgattggactgggtacggtagaggcattggaccggaaggcggtgtcgcgttcgctgggtgaggcattcgtgctgtccggtcggttgcttgaatccatggggcgcacgcaggacatggacgtagccctgccagtacaacgggaggatctgtactggttaccggcagtggtgtctgcctgtgatgttattgtcgcgcgctggacacgcagtcaggctgaggtggcgtcgttgtttctgatccccgatgccccctcgcagttggaagctgccaatgcgttgaaccggcaccgacaatcggtgaaccgggtctatcacgatgctggcgtctttgccttgctggcgctgatcaccgcggctgaacgtgcactgatgcagccgtacgggagcgttcacggctctggaaaagcaactaaatag

SEQ ID NO: 503417 - DNA, 255 bp, Stenotrophomonas maltophilia
atggtgttgatcctggactccggccaggcatcggtggtctgggtcaaccgtccgagcgcgcgcgcgggcaagctggaggtggaggcaaacgtgtatcggctggattttccgccggtcgctggcgccggcaggctgcaggcggtgatcaaccgctacgacggtagaatggcgttgagcgggcccggcacagatgtggccggcgctgcccagccgcagatgtcctgtgaggtacagcctgtgcagcccaaggtatga

SEQ ID NO: 503418 - DNA, 546 bp, Stenotrophomonas maltophilia
atgacactgctgggattgctggccatcggtgtgtgcctgcggatcgcgatcagcgatctgtacgcccgtcgggtgcccaacgcctggctgctgtccgcatgcgcgatcaccgttgtcgtgctcatcgccggacagttcaacgcgccgcgcctgccgtgggcttcccacgttgccggcgcggcgctcggcctggtcgcattgctgcctttccatgcagtgcgttggatgggcgccggtgatgtcaaattcttttcggtactgggattgatgctgggctggcaggcactgctgccgatctggatcgcggccagcctggcagcgggcgcacatgccgcactggtgctggtatcgcgacggttgggcccagtactgcccatcggccttcaaactcatatgcttcgggcaagttcgcaatggcattcgcacccggcgctgcgcgggatgcagagcgcccgccagggacgccaaggcattccctacgccgcctacctggcggtatccgccatcgcctgggtcctgatcagcacgtacggaggcgtggcatga

SEQ ID NO: 503419 - DNA, 459 bp, Stenotrophomonas maltophilia
atgaccgcgacgcccctgacccgacgcctgctgcccgttctgatctgcctgctgccggccgccgccgtgcaggcgcagcaacagccgctgaccgggcagatgcttggcggcagcacgccggctgcgtcggcttcgcagccgctgcagtccgagtcactgcccaccgtggacctggcggccccgccagcaccggtgccgcaggcggcgcctgcagcagtggcgaacaccgacggcagtactgcagccccgcggcccggccgcagccagatcggcgataccacgcgcaacctgttccgcctgcaggcatcggggcaacaggccggacagcatctgccgatcctcggcgaccaggcgacgctgagctacgcccgctacatgaagagtttcgaacacgagatcccggacttctttgaagccgatgtcgccaagtccaagggatcatcctcatccggacgctga

SEQ ID NO: 503420 - DNA, 2160 bp, Stenotrophomonas maltophilia
atgaaacgcccacgccagttcagtttcagccgcccacggggcggcatgtcgatcaccatgatgctggtcatgctggcactgctggcgatgctgggcctgatcgagatcggttacctgttctgggccaagcgcgatgcacagaaagtcgctgatctggccgcactggccggagcgcagcgactggaactgtgcacctcggacaacagcgacaacagtgctgcgcggcagagcgcactcacccagaacaccttcgcaggaagcctggaaatccgctgcggaaactggaacgtgacccgcgccaccgaagggcacttcagcccggtcgtcgatgcagcgaatcaacgcaacgctgtccgtgtcatcacccgccgcgcggtgcttcccttcttcgggcagaacagcagcctgccgaccgtgaccgcccaggcggtggcgcgacgtgcagaaccgacggcggttttcagtgtcggctcgcaactgctgcgcatcaatggcaacacgccactgggaaatgtcctgaaactggtgggcgccgacctcgacaagaccaccctgctcggctacgacggccttgcacaggcgcatatcaccccgaatggactgctgcaggcactgggcattccgatcgacgtcaacatgggcgtggcggagttcaacaatctgctggccggccgcaaggtcaagctgggcaagatccttcaggcgaccgttgacctgctcacccagcagggcgttgcccacgtggacctgagtgcactggagaatgccctggtcgtgaagggcatcgacctcaagcaactggaggtgaaactcggctccgatgacagcggtggcggcctgttcgcacgcgtggtcgcgccggatggaacgatttccagcgcgctgcaggccgatgtcaatgtgctggacctgatcggcaccagcatcagcatcgccaatggcggtcgtgcggtctcggtcgatgaactcaacctgctgggcctggtcaatgccaaagccgctgtggtggaaccgccgtccatcgccatcggtggcgttggctcgcgcgcttacaacgcgcagatccgtgtcttcctcgacatcgacaccaacaacattcccgttgcaggcggcgtgctttcactgctgggcatccgcctgaagctgccggtccatgcggacgtgaccaatgcaatggcgaccctgaccagcctgcaatgtggcagcacgcctcccacggcgacgatcaaggtcgagtcttccgtgctgcgcgcctgcgtcggcaaggtggccgacagcgagcggttctccaagcagaatgtctgtggcgacaccctgcagaaggaacagatgctcacactgctcggcgccccgttgatcaatgacagcatcaaggtcaatacgctgaccgacacgcaaagcctcaccctccccgccggcgcgaccggttcaacccaggtcaactccctggaggtgggcaccgccgtgtccgagctggtcagcgaactgctgcgcgtactgtccggcatgctcgatccgcgcgacgatggcatgagccagggctcgaccgcagcgcagttggccgatcgctacctgaaagcagccaacgttggtcgcaagcgatacgatgttgacgcaaccatcaagctgctggaattcggagacagcacgcagggattgaaaccactgggaaactgggacatcaccaagggggtacctaccagctgtgtgctggtgacctgcatggtcgacggcaaggtctggcaaggattccgcaacgcagtgaccggggttggctcggggctcctcgatggcgtactgggagcgcttgtgggtgggctgctggtcaagcagtgcaacagcctgattggcgcgctggatgacaccacctacaacaattgcatgaagtacaacctgacctcctacctgcagaccgccgatgccggcttcctggaccagttcgccggcgacggcgtcaccgcccccggcaatggcccggtcagttgttcgggcctgctgtgcttgctgctgaagcccgccctggacgtcctgaagccgctgctcaacagcgtcggctccctgctgcgctcgctgctggcgcaggtgctgggcctggaactgggccgtacggatgtgcatgtccagtccatccagtgcacgcccgcacagctggtctactga

SEQ ID NO: 503421 - DNA, 387 bp, Stenotrophomonas maltophilia
atgtcgaacgcgtgttggagcccgctgttgtacctgctgctggccacgggggcgcatgctcagaccaacgtctacaaatgtgtggacgggccgcatccggtctaccagcagacgccgtgccaggggcgcgcggaatggcgctgggaggtgccggcggagccgccctcaacaggtgcgagcgcggccaaggcagcgagcccagcttcaatgcgtccgcgtgtggtgcagcagcggcgtgcgcgggctgcagtgataccgatcagcgcggatcccgccgcctgtgagcgcgcgcggcagcatcgtgggaaggtgctggccaatggcaagcgcatggacttcgtgcagcgccggcaactggacgatgccgtgcatgaggcgtgccgttga

SEQ ID NO: 503422 - DNA, 1317 bp, Stenotrophomonas maltophilia
atgcgatggtgcttgggtgtgttgctgggcgtgctggcgctgcctgcgttggccgatgtgcgggtcattgtcgatgaccatcaggggcgcgctgatcgtattccagccattagggttgagggactggcggcggccgaggtggtgcaactacggttgtcgatgcgggacagccggggccagcgctggcagtcacaggctgcactgcgcgcggacccgcaggggacggtcgacaccgcacgcagcggctcggaacagggcagctatcgaggcgtcgatgcgagcgcgctgatctggtcgatgcagccgcaggaaggaagggccaacgcacttcccctgcagtggcagcgctgcgatgacggcttgggattccagtcgcaggccttcgaactggaggtggagcgtgcaggatcggtggtcgcacggcggaccctgcagcgccatctgatgctgccgggcgtggaggtgcaacgggtcgaaatcggtggccgcgaagcacatctgtacctgccatcgggccagcaggctgatgcacgggcgccagcattggtggcgctgggcggtgccgaaggcggattcgacggtggcgacctctatgccgcctggctggccagcaacggctatgtcgcggtgtcggtggcgtggtatcgcgggccgggcgtgcccaaggatctgatcgaggttccgttggaaaccgtacgcgatgcagtgcactggctgcagcgccatccccgggtggatccacagcgggtagggctgatgggaggctcctggggcggcatcgtgaccatggccacggcggtgcatctgcctgagctccgcgtcgctgtgtcctgggtaggcagtccagccccgtttcgtggcatcgcccgtgacgtggccccggccgatttccgagcggtggaccgttcccccttgagctggcagggcgaacccctgccgtggctgccgtatcgcgaggaggttgactggggcagaccggggccgcagtgggaaccggcattgcgtatcgcgatgctgcccatcgaggacattgctgcacgcacgttgtggatcggaggtggtgacgatcggctgggtgactcaggcacgatgctggctgttgcgcagcgtcggcttgcagccgcagggcgtggtgaccgtgaccgtttcctgtactactcagatgcggggcatctgatcaccccgtttctgcagccgaccacccatcgccatgatgtaggcccgtacattgaagtggggggcacggccgaaggtcatgcccgcgcggaccgagaggtagggccagcggtgctggagttccttgccgaggcgctgtag

SEQ ID NO: 503423 - DNA, 723 bp, Stenotrophomonas maltophilia
gtgacgcgtccgctgagcgtgctgctggtggatgacgtggcgctggcacgtgaccgcctgcgccagttgctggcgggcactccgcaggtcagggtcgatgccgaagccgccaccctcgcgcaggcacgcgagcagcttcaggggcgccgtttcgatctgctgctgctggatctggtcctgcccgacggtcgtggctgggagttgccccagcagcagccggcgctggccgcgcacaccatcttcgtgaccgcgctgccgcagcatgcgctgcgcgcgttcgaactgggcgtcgcagactatctgctcaagccggtggcagcgcagcggttgcgtgaagcgatcgagcgcgtgcgccgcctggcaggcctggcaccgcgtacggaggactgtgagcagaccctggcggtgcctggtagtggtggtgtccagtatgtaccgctggcggagatcgactacatcgacatggccggtcattacgcatgcgtgcacgtggggcagcgactgcacctgctgcgtgagccgctggcgcagctggccgaacggctggcggatggaggactgttgcgcgtgcaccgctcggcgctggtcaacccgctgcgggtgcgatcactgatcgagcgccataacggtgatgcgctgcttgaactggccgatggcgtgcagctgccggtgagccgcagctaccggccggtgctggaggcggccttggcggcacgcgcctga

SEQ ID NO: 503424 - DNA, 984 bp, Stenotrophomonas maltophilia
atgctggccctgtggggggtgttgatcgccaccgccgtgccggcggtgcacctgagccaacagcctggcggtctgattccggcagcgttgttcatccttggcgccgagctgccctggatgctggcgacgccattgttgtgggatgcgtgccggcgctggccactgtctggacgccggcatctggccggatggttggcgctgtgcctgctgctgactccgctgttgacggcattgggatggaccctgggccatgtgctgctgcagctgtggcaggggcaaccctggccagcaccgcagcaggtgttgcgcgcgattggtattaccgcgctgtttgcgttgccgaccttcattgcggtggcgggcgtgggccatggcctggccggactgcagcggttgagggcgcagtcagaggtgctgcagcaggctcgtgaaacagccctgcgccagcatctccagcaccacttcctgttcaatgcgctcaacgccatcggtggcttggcgctgcaacgtccacgcgcggcggatgccgcactggcacagctgtcgtcgctgctgcgcgataccctgcaatgcccgccgcagcgctgcttcgccgatgaactgggcgcagcacaggactatgtcgcgctgcagtcgctgctgcacgatcaggaagtgcatctgcatctgcaggccagcgctgacgcattggcctggacagttcctggcctgttgctgcagccattgatcgagaatgcggtattgcacagtggctggcagccgggggacgggccgttgcggatcgagctatgggccggtgtggaagacggcctgcttgatgtggtgctgttcaacccctgcctgcgtcccggcacgaacgatggactgggcactggccaggctgcactgcagcggcgcgtggcgatgatgggaggccggttgcagaccgccagcgagggcggcggctatcgtgctcgcgtgaccttgccggagtgcatcgcgtga

SEQ ID NO: 503425 - DNA, 1911 bp, Stenotrophomonas maltophilia
atgcgtgtgcgtgccgtcgctgtagccattgccctttgcctgtccagcaccgtgctggccgccgaaaccccgccgatgaccccggatatcagcggcaagcccttcgttgcccctgatgtcggtcgtgactacgacaagcgcgtggtgatggtgccgatgcgcgatggcaccaagctgtatacggtgatcgtggtgcccaagggcgcgcgcaatgccccgatcctgctcacccgcacgccttacgatgctgccggccgcgccagccgcagtgattcgccgcgcatgcgcgacctgctgccgcagggcgacgaggtatttgtcgatggcggttacatccgcgtattccaggacatccgcggcaagtacggctccgagggcgattacgtgatgacccggccgctgcgcggaccgttgaacaacaccaaggtggaccactccaccgacgcctgggacaccatcgactggctggtgaagaacgtgccggagagcaacggcaaggtcggtatgctcggctcgtcgtacgagggcttcaccgtggtgatggcgttgaccgacccccacccggcgctgaaggtggccgcgccgcagagcccgatggtggatggctggatgggcgacgactggctcaattacggcgcgttccgccaggtcaatttcaactacttcgcgatgcagaccgagaagcgcggcaagggcacgccgctgcccagcctcggctatgacgactacagcaccttcctgcgcatcggttcggccggcgactacgcgcgcttcaccggcgtggaccagctgacctggtggaagaaactggtggagcacccggcctatgacggcttctggcagggccaggcgctggacgtggtgatggcgaagacgccattgaaggtgccgaccatgtggctgcagggtctgtgggatcaggaggacatgtggggtgccaaccacgcctaccaggcaatggaagggcgcgacagcggcaacaaccgcaactatctggtgatggggccgtggcggcacagccaggtgaactacagtggcagcgagctgggcgcgctgaagttcgagggtgataccgcgctgcagttccgccgtgatgtgctcaagccgttctttgaccagtacctggtggacggtgcgccgaaggcggatacgccgccggtgctgatctacaacaccggcgagaaccactgggatcgcctgaagggctggccacgcagctgcgacaagggttgtgctgccagcagcaagccgctgtacctgcgtgctggcggcaagctggcgttccaggcaccggcggcgggcgagggcgacttcgaggaatacgtgtccgacccggccaagccggtgccgttcgtgccgcgtccggtgcgtttcggtgaccgcgacatgtggaccacctggctggtcaaggatcagcgcttcgttgatggccgcccggacgtgctgaccttcatcaccgaaccgctgaccgcgccgctgcgcatcggcggcgcgccggtggtgcacctgcaggcctcgaccagcggcaccgacagcgactgggtggtgaagctgatcgacgtgtatccggaccaggaagcgtcgacgccggagatgggcggttacgagctgccggtgtcgctggcgatcttccgtggtcgctatcgcgagagcttcagcgatccgaagccgctggcggcgaaccaggtgctgccgtaccgcttcgacctgcccaacgccaaccacactttccagaaggggcaccgggtgatggtgcaggtgcagtccagtctgttcccgctgtatgaccgcaacccgcagacctacgtgccgaacgtctacctggccaagcccggcgattaccagaaggccacgcagcgggtctggcatagcgcggcgcaggccagttacatcgatctgccggtgtattga

SEQ ID NO: 503426 - DNA, 387 bp, Stenotrophomonas maltophilia
atggataccaccgcagaacacgaagtccaccacctgcacgacaagctgcaggcctggttccgcgccgacgtcggcaccgacgcactggaggacctgatggcgcatttctgcgcggacctcagcatggtcggcatcgcgggtcgcaggctggaccggaaggccgtgcaggcactgttcgcgggtggtcatggcgcgcgtccagggctgcagatttccatcgacgccgtgcaggcggtggaagcgccttcaccgctggcggtgctgcgctatcgcgaagggcatgcgatcgatggcggcgagcccgtatggcgggaatcgctggcggtgctgcggcaggaagaggggcgttggcgctggctggcgctgcatgaggtaacggcggcctga

SEQ ID NO: 503427 - DNA, 462 bp, Stenotrophomonas maltophilia
atgtcgcttctgacactggagccgttcttccgctcagttaatactgaccggctgccgcaaaaggaccagccaatgctcacgagcgcatgggcattcaagcagttgtgtgaaagcgagtcagatacatcatttgcctggcagcaggccgaggatcaaacgtggatggatatccttgcggtctaccctgagttggcgcgctgtgtcgccgggaataaaacaattcctgagttcattatcgaacagctggctaacagcgaagacgtcgacgtgcgttggagcatcgcgtgcaaacgccggctgagtcagggggttatgtcccgtttggcgcaggatgccgatgcaaccgtgcggcatcgtatcgcttgcaatcccaaagtaacccggcagactctagagttgctttccgtcgacccggacaagatggtggcggcctcagcgaagcgaaggctgcagtccatgtga

SEQ ID NO: 503428 - DNA, 801 bp, Stenotrophomonas maltophilia
atgtggcgttctagccgtggctggctgccgctgtgcctgctcgcgctcgcgtcgatggccagcgcgcagccgatgcccggcacggtgctggacctcgccagcggccataccctggacgaagctgcgttcgtgaagcgcgcagcgaacgccccgcgactgctgctgggcgaacgccacgacctggccggtgaccacgctgcccagcgctggctgctgcacgcgctgcagcagcagcgtccacaaggcgcgctggtgctggagatgattgccagcgaacgccagccgcgcctgcagcgggtgcagcgctggcttgccaagggcaaccatgccgacggtgcacgcctgcaggagctgctgggctgggatacacgatggccgtggaccgcctacggcgggctggtgcaggacgccaccgctgccggcatccccttgttcggcggcaatctcgcgcgcgtcgaggtcaacgcccacctggcgtccgctgatgcggtgcggttcccgctggccgccgcccgccaacgcctgtcggatgtggtactggcccagcacgcagacgcggcaccgatgctggaagggatgctggccgtgcaacaggcccgcgacacacgcatggcacaggtgctgaccgcagcacccacacccgcgctgctggtagccggtcgctggcatgtgctgcgcggcaccggggtgccgggctacctgccaccggatacgcctgcgctggtgatcgcattggcctcgccgggtgaaaccgtcggtgctgctgatgccgatctgctgtgggtgctggacgatgagtga

SEQ ID NO: 503429 - DNA, 903 bp, Stenotrophomonas maltophilia
atggataccgcgcgcgagcaacgcatcctgaagttctcgatcggggtcaccctggcggtcagcgcggtcggcttcatcggtggcctgctggtgggatcgcaggccatcctgttcgacggcgtgtacagcctggtcgatgtcgccctgaccctggtgtcgttgtcggtgctgcggctggtagcgcgggaacagagcccgcgcttccagtacggctactggcatctggagccgatggtcgaggcgttgggtggggttatcctgtcgctggcctgcgtgtacgcgctggccaacgccgtgatcggtttgaccacgggcgggcacgaagtgaaattcgggcccgcgctgtggtgggcggcgttgctgagtgccagcaacctggcgatggcggccttcgtcgcgcagcgggcgcggcatctgcgctccgcgctgttgtggctggatgtgcgcggctggctgctgggcgggttgatgagcctggcagtggtactggcctttgtgttggcgctggtcctgcacggtggtgagtggcatcactgggtgccgtacctggattcgatcgtgctggcgttgatcagcctggcggtgttgccggtgccggcgcggggtgcctggaaggccatgcgcgaagtgctgcaggtggcaccggatgatctggaccggcgcgtgcagcgggtgatgcaggcgttcgtcgccgagcgtggctatgccggtttcaccagccatgtggcgaagatggggcggatgcgcttcatcgagatccacgtgctggccgacccggccacgccgctgggttcagtgggcgaggtcgatgcgatgcgtgacgagattgcagtgcggctggatgcgcggggcagcacgttctggttgaccattgatttcaccgcagacccagcgtggacgtga

SEQ ID NO: 503430 - DNA, 804 bp, Stenotrophomonas maltophilia
atgtcgagcgttgggccggtgccgatgccggtggtgttgattctcgtgtgcgtagtgattgccatggccgtggtgcgtctgtggccacgcaggaaggacggcatgccgctgccttctgcacccagcatggttctggacatgctgctggtgggcctgctgtgtggtcgcatcagcttcgtggccttgaacttcgccctgtatcgcgaggcgccgtggagcattctgcagattgccgatggtggctaccacctggtggttgtcctggttgcgggatcggcatgggggctgtggcgggtgcgcccatggcgggcgttgcgcgccccggtgctgggcgcagcgttggcgggtgtgctgctatgggcgggcggtagtcagctgctgtccgcatggcaggagcgtcagatgcccttgccggtactgcaggttgctgatctgcaagggggcagggtggatctgcagcagttccggggaaaaccgcttgtgctgaatctctgggcgacctggtgcgggccctgccggcgcgagatgccggtcctggctgcggcgcagcaggcgcatgcggacgtgcagttcgtgttcctcaaccagggtgaaacccttgaggaggtccagggtttcgttgcgcgcgaacggctcctgctgcacaacgttttgctcgatgatgacgctgcggcatccacggtgctgggcgtgcaggcctatccctcgaccctgttcttcgacgcccaagggcgcctgcgtgaactgcacctcggcgaactgacggcagccggtcttgaacacaaactgcgccggctgcggtag

SEQ ID NO: 503431 - DNA, 1827 bp, Stenotrophomonas maltophilia
atgctcattccaggcttcacggcaggcgcgcaggcgccggccgagctgcatacccgttggtcgccgtggcgtgcgctgcttggcgtgctggcgccgcagcaacgcaccagcacagaggcggcgatgaccgaccgcaccgagctggaagcgcaggtggccgcgctgcatcgcgtgcaggccgtcatcgagttcgcgctcgacggcaccatcctgcgggccaatgacaatttcctgcaggcgatgggttaccggctggaggagatccagggcaagcatcactccctgttcgtcgaccccgagcaggcgcgcagcgcggaataccgcgacttctgggtacgcctggggcgtggcgaatatgacgccggacagtaccgccgcttcggcaaaggtctgcgcgagatctggatccaggcttcgtacaacccggtgctggaccgccaggggcggccgtacaaggtggtcaagttcgcgaccgacatcaccgcgcagaagctgcaggcggccgactcggcggggcaactggccgcgatcgccaaatcgcaggcggtgatcgagttcagcatggatggccgcatcctgtcggccaatgacaatttcctggccgctaccggctacagcctggacgaagtgcgcgggcagcaccattcgttgtttgtcgagcctgagcatcgcagcagcgtcgagtatcgccagttctgggagaagctcgggcgcggcgaatatgacgccggccagtatcggcgcctgggcaagggcgggcgcgaggtctggatccaggcatcctacaacccgatcctggacctcaatggcaagccgttcaaggtcgtcaagtacgccaccgacatcaccgcgcaggtgcacgagaaccaggccatgcagcgcgccgtggcgcagacccgcgaggtggtggctgccgccaagcagggcgatctgacccagcgcgtggccaccgccgacaagaacgggtcgatcgccgaactgtgcgaaggcgtgaattcgctggtcgaggcgatggccgcgatcatcggccagatcaagttcgccgcggacaccatcgcagtcggcgcgaccgaaatcgcacagggcaacagcgacctctcgcagcgtaccgagcagcaggcggcctcgctggaggaaaccgctgtgtcgatgaaaggcctggccgagaccgtgcagcgcacggccaccaacgcgcgccaggccagccagctggccggtggagcggccgacgtcgccgctcgaggcggcactgtggtgcatgaagtggtcgagacgatggcggtgatcaatgcctcgtcgcggcgcatcgtcgacatcatcggagtgatcgacggcatcgccttccagaccaacattctcgcgctgaacgcagcggtggaggctgcgcgtgccggtgaacatggccgcggctttgccgtggtcgccactgagatccgcgagctgtcgcagcgttcggccagcgcagccaaggagatcaagcacctgatcgatgagtcggttgccaatgtgggcgccggcacggcgcaggttgagagcgcgggccgtaccatggatgaaatcgtgaccaacgtgcgccgggtcagtgacctgatgactgaaatcagcacggcctcgcagcagcagagcgacgatatccagcagatgaatcatgcggtcgacctgatcgatcagggcacccagcagaacgcggccctggtcgaggaggcgtcggcggcggcgcgcagcatggaagagcagtcggcgcagctgctgcagaccgtggccagtttccgcgtgcagggcggggccgggcaccggcacggaacagcggggctgcacgcggtctag

SEQ ID NO: 503432 - DNA, 231 bp, Stenotrophomonas maltophilia
atgaaggtctggaacccggttgcgatgcgggcctacgccccggcgatggttggctggtgcctcgcgctggccgcctgcctgcgtgcggaacagctgcgcggcgaccttcacgcgcaggccctgctgccggtactgcagggcggcgcggtcgccctgctggtgttcacgctgtcctgtatcggtgccgccagcatcgtgctgtggcggacgggcaggaacgcggtggagtga

SEQ ID NO: 503433 - DNA, 1443 bp, Stenotrophomonas maltophilia
atgcgccgccgttccctcgcccttgccctgtccttgctgctgccggccggcgcctttgcccaggcccagccgcaggccgcaccggtcgcgtcgccgtccgccgcgcgcagcagcgccaccgtggtgctgaccgccgcgccggccgactggcgcgcgctggatggccagcgcgtgcgcatcgccgtaccgctcaccttggccggtaccgatggcctggaacgcttcggccagctcaccgtggccttcgatggccgcctctggcagccgactgaagtggccgcgccgggtactgccggctacgagcaggtgatggccgacaaccagcgccgccgcctgctgctggacgacagcatcgatgcccgcgatccggccagcgtggcctacctgccgggcaacccggtgctgcgcaccggcatgcagctgcgcaatgtggaaggtgtcgtgcacgtggacgcacagggccgtccgcgcctgcaggtcgagggtgcactcacgttgcccgagctgaagcgtccggcggtgccgacggtgccgggcagcctgcatatcgctgcattcaacctggagaacttcttcaatggcgatggccagggcggtggcttcccgaccctgcgcggcgcgcgcacgctggaagagcacaaggcgcaggtcggcaagctggtggccacggtcaacgcgctcggtgccgacatcgccgcgttgatggaactggaaaacgatggctatggcccgcagtcggccatcgccgaactggtcagcgccctcaacgccggtcttgccgccgacaagcagtgggccttcgtcgatgccggcgaggggccgggcagcaacccgatccgggttggcatcatctatcgcaggagcgcgttcaagccgctgggcaagccgttgaccagaaccgacggtccgttcgccgaacacagccgcgcaccgctggcgcaggccttccagggcaagggcgcaccgttcatggtggtcgccaaccatttcaagtccaagggctgccgtgatgccagcagcagcgatgccgatcgcaacgatggccaaggatgctggaatgccacccgggtggaatcggcaaagcagttgaaccagtgggtgcaggccgaagctggccgcctgaaggtgaaggacgtggtgctgctgggcgatttcaacgcctacgcgatggaagacccgatccgcaccctgcatgacctgggctggcaggacgcattcaaggtcgcccaggtcgagcatccttacagctacgtctacaacggctataccggccgcctcgaccatgcgctgctgagcccgggcatggcccagcgcctgcgcggtgccgccgagtggcacagcaatgccgacgaacaggacgccagcggctaccagggccgcaacgtgcagggcccgtggcgcagttccgaccacgatccgctgctgctgggcttcgataaataa

SEQ ID NO: 503434 - DNA, 495 bp, Stenotrophomonas maltophilia
atgcgctactcaaaagcccaggtgctgctgcactggatctctgcggtcatcatcctctgggccactgtcagtggtttctacgtggcgcttcttgacgtgccgcataccgtcgctgaaaccattggtttcttcaacgtgtccatcacctcggtgttgattccgttgttcgccatacgcgtggtgattgccatctcaaatcaccgggatgcacccgccagcggagcggaatgggctgccttgattgctcacgccgctctgtatcttgtcacgaccgtcgtgctgctgacgggcgtgctgatgatggagcgggagatcaatgtgttcaacctggtgagctttccacagcccatcagcgacccgcagctgaccatggcgttcaatactgcacaccgctatgcatgcgtcgttctgggcgggcttctgttcctgcatatcgccgccgtggtcaagcatcatctgtcgggcaatgcgatcctgaagcggatgagttggtaa

SEQ ID NO: 503435 - DNA, 1506 bp, Stenotrophomonas maltophilia
atgacccgcagcgcccgcacgcttccccgcagttcccatcgttgccgcactgccgtcgttgccacgctggctgcaatcggcctggcgctggcagtggccacccccgcacaggccagcccggctgcactggcgttccagccctacacgctgcagaccaaagcacatggcagcatccctgcggaaatcgccgtgcttgcagtgccacgccggcacagcgagccggatggaccacgcatgcagctgaaagtggtacgcctgcgtgcaaccggcggcaatggtcgcagcgcccccgtggtctacctggccggtggcccgggcggctccggcatcgacactgcgcgcggcccacgctggccggtgttcgacctggtccgccgcgagaccgatgtgctgctgctcgaccagcgcggcgccggcctgtccgaaccgccgccggaatgcccgcaccagacccgattcgatgatgcgcagccattgcagcgcgatacggcgctggtcgcgctgcaggcaacggcagcgaagtgcgtggcattctggcggcaggctggcgttgacttggatgcctacaccacggccgagagcgccgccgaccttgacgacctgcgccgcgcgctgggtgtgccgaagatcagtctgtggggcatgagctacggcacgcatctggccctggctgcggtgcgactgcacggtgaaggtctcgagcgcgtggtgttgatgggcaccgaaggtcctgatgacacactgaagctgccgttgagcagcgacgcgctgctgcaggagctggcgcagttggcacgcaaggatggcttcgacgatctggccggatcgacatcacgcgtgctgcaggcgctgcgtgagcagccacggcagggccgcagccgcatgcatgacggtcgccaggtgaccatcggtgaattcgatgcgcagatcctgcttgccaatactcttggccagcggcatacccagcagtggctgccgttgatactccgcgaggccgagcgcggcaactacgacccgctggccgatctggtgctgatcgtgcgcgcacagttcgcccagtacccggcgatggggctggccatggacgtggcttccgggcagagcccgcagcgcctggcgcgggtggaggcgcaggcacgcgaaagcctgttcggcgacgccctgaacttcccgttccccgccattggcaacggcctgggtctggccgatctgggcgaatccttccgcgggccgctgcgcagcgacgtgccggtgctgttcatcagcggcacgctggatgggcgcacgccaccggccaatgccgatgcgctgcgtccaggcttcagcaacggccgctcgctgctggtgcgcaacgccagccatcacaacgagttgtggacgggcaaccccgccattgcgcgcagcattgtcgatttcctcgccggccgtgcggtggacgatgccgtgctggacgtgccgccgccggttttcgcgaccagcaacagcgggttgccgggcggtggctga

SEQ ID NO: 503436 - DNA, 1710 bp, Stenotrophomonas maltophilia
atgcagatcccacgaaccctggctgtccttgctgtactgcttgcggcggtggccgtctggctgctcgcatcgacgcccccacccgggctggtgcaggtgccgggcgcgcagatggcgcttgcgaacatcggggccaccggcgccgtgcccgcgcgaccgccgcaggatctggactggcagccactggaccagcgcgagctggcaggttggcgcggcccctactggctgcgttggcaggtgccagcgccgaccaccgcggaagtgcatggccgcacaatgcggctgtccctgcgtgccgccagccagctgtactggaacggcaacccgtgggtccgcaatggcgtggtcggccgcagcgctgcggaagagcttccaggacgcatcgaccttgtgcgcgtgctgcctcccgcttcgggcaaccgcagcgacgaactgatcgtgcttgcgtcgagccagcagcagcgcttccatctgcatggtgccgatgcgatggtgctgatcgcacccgcggccgtgctgtacggccagatcatcctgccgtggttgatcgccgccttcgccaccggtgcactggcggcggcctgcctgtacttcctcaccgtgttgcgcggccagacgcaggcacccggggcccgcctgctgctggcactgggcgcagtggggctggcactgcccgtggtcgaggcctggcgctccctgatgggctatccctatccatggcatggcccacgcctggtggcactgttatgcctgcatgtggcggcagcggtgttgctgcctgcctatcttgcacgccgtttcgcggtagccatgccgcgagccgcctaccttggctatctggccgtgatcattgccaccgctgccgcgctgcccggcttcgatacgcgctcagcggccgtactgctgtcgagcctgatcgcctcggcaggggtgctgttgcgcgcgcatggcgagtccgaggaccgctggccgatcctggttttgctgctggccggactgctggcgctgctggccgcaggcggcgccttcctcgatgggccctatttcctgctgctggcggtgctgatggtgttcctgctgctgcgccacgctgcccagttgcaggcactggaccggcacaacgcctggctgagcgaagaacgcgcgcggctgtcattgcagctactgcagcgaggcatccagccacattggctgatgaacaccctgacctgcctgcaggaactgatcgaacaggcaccagcgcgtgccagccgcctggtggaatcactggccgaccagttcgatcgcctgcgcgacagcagcggccggcgcagcgtttccctgcaggacgaactggcgctctgtcgcagccatctggatatcgttggcatggcattgggccagcgcatgcggctggaggtcgatggcgaagacgcgatgctgtcgttgccacccggcatcctgcatgcccaggtggagaatgcactgacccacgcaggtgcgctggcctgcgcaaagcatccgttccacctgcgcgtgcaacgcaccaacgcgcgttggattctggagctgcgcagtgcacggggctccgccccgcaccatggccgcggcactggcacgcgctatatcgaggccagcctggccgccgcctgtcctggcggatggaccttcgtgcagggcgccgaaggagaccactggcgcagccggatcgaactgacatgcgcatcctga

SEQ ID NO: 503437 - DNA, 702 bp, Stenotrophomonas maltophilia
atgcgcatcctgatcgtcgaagacgagccgctggtacgccagcgcctgctgcgcctgtgcagtgaactggcagatacgcgcgcgcgcttcgacgccgttgctgatctggagtcggccggagatcgactgcaacgcagcgtctacgatggcctgctgctggacctcaacctgggcggcgacgatggtttcgagctgcttcggcgcgcggtggccggacgctatcagtgcgtggtggtgtcggcccatcgcgatcgcgcgctgcaggcattcgagcatggcgtgctcgacttcgtacccaagccgttctcgcgtgagcgccttggccaggcactggaacgcctgctcgacaccggcggttcccgccctggccgtgcgcgttatctgggtgtctggcgggcgcagggcacggcgaccgtagaacttgctgacgtgctctggatccgcgccgacggcgactacagccaggtgcgcatgcgcgatggccgcagcgagctgcacgacaagtccctggctggactgggcagcgtgctgcctggcgacttcgtgcgttgccatcgttcctatctggtcaatctgcagcatgtgcgcatgctgcatgcaggatcgggcagccgttactggctggtgttgagcgatggcagcgagctggccgtgggccgcgcgcatgtggcggcactgcgcgatgcgctgggatcggggtga

SEQ ID NO: 503438 - DNA, 636 bp, Stenotrophomonas maltophilia
atgtcagttccaggaaagatcctggccagcgtgctgctggcctcgggagtggccactgcgtgggccgcgccggccgtgccggcaccacaggagttctacttcgacaacgacctggcggcaacgccgatggtggcggtgcagggcgagggcgatgagctggtggcccagctggtcaagctgcgtgagcgcggccgccgcgcggtggaagcgacggtgcagctggcatcggtggccggcgcgcagggccgtggcgagctggccgagcagctgtatggcgaggcgatgaaagaggcgccggcacagagcagcagcggccgcagcgtgcgctggaactacggttgggacctgctgcgccagggcaagccggaggcggcgctggaacagtggctggtatcagccagcaacgcccgtacgaagcccacttgggtgccaccgacctatgcgttggcattgtggcggatggggcagaagcaggaggcggtgcagtggtatgcggctgcggtacgcaccgagccgacgcagtggagtaccacggccaactatgggcagctgctgccgcagtggcgtgaggatgagcgcgcgtcgctggccgaggtgcagcaggcttgggcggccgcaccacctgcctggccctga

SEQ ID NO: 503439 - DNA, 2418 bp, Stenotrophomonas maltophilia
atgcctaccgtgaatgtcgccggcttcccggcagccattgctgtcatggccagcctgctgctgcctgccgcggcctccgccacgggctgcagcacaccgctgcgcatcgcctggccgtccgaccgtgatcctttgtcgtccagcgaacagggcgaagcccgggggctcggcgcggcgtacctgaagctgctgggcgggcaacggccactgcagctgttgcccgtgccggccaccagcgtagaccgggacgagctgccggccggcacccaggcgctgctgggatggccacgctcgcaactgcctgccggatgggtggtcagcacgccctacctgcaactgccacatgtgatcgtgcgccgggaggatgcgccgccggtgctgggcctggaagatctgcgtggacgcaccgtggccagccccagccgggtgccgctgcaggggctgctggccgagcaggcagcgggtgcgcagctgctgccaccggcagcgctggacgatgcactcccgctgctgggtaccggattgatcgatgcggtggtcgccaacctcggcgacgtcgaggcggcgttgcgccgctaccagggcgatgcactgctgatcgccgcgccggccggtttcgatgatgccctggtgctggcgaccacccccgcctgcgccgatgtcatcgccggcttcgaacaggcgctgtcgcagctgaccgataccgaacgcgatcagatccgcgcggcctggctgccggaccggccgcgcaatgctccgtcatcgtcgcccctgcgctggctggtgccggcctcgctgatcctgctcgccctggcgctggtccatgccttcggctactggcgggtccatcgcgagagcgtgcgccgccgaggggtcgagcagcgcctgcaggaggtgaccgcgaacctgccggcggtggtctaccaggcgcgtcgttcggcgggcggccactacagctttccgcagatcgccggcgacgtgcaggccctgttcggaataagcgtggagaccgcgcggatcgatcaccagcggttgttggccgcggtccacccggacgaccgcaaccaggtgatggcctgcgtcgagatggctgcattggcgcgtggcccgatcgacgtcaccttccgcacccgctcgccacagggctggcgatgggtgcgctcgcatggacggccgttgacctgcgacgacagcgacgtcgagtggagcggctactggatcgacgtcagtgaggtgcagtcacgtacccgcgcgctggccgaagcgcgccgcgaggccgagcaggcggcacaggccaaggcgcacttcctggcaacgatgagccacgagatccgcaccccgatgagcacgctgctgggcatgcttgaacggctggcgggcagcaggctggagccgcgccagcagcaggtgctggctaccgtcgatgatgccgcgcggatgctgcggcagatcctcgacgatgtactgcacagccaacgcctggaaggcgcaccactgcagctgcggcccaccgacctggcggcactggtgcgcgcggtgcagcagctgctgatgccggtggccgccagccgaggcctgcacctgcaggtggtgcttgatccggagatgcagccgggatcgctggccgatggcctgcgcctgcgccagatcctgttcaacctggccggcaacgcattgaagttcacccggcagggccacgtggaactgcaggtgcaggtactgcagcaatgtgactggggccagcggctgcgcctgcaggtaagcgacagcggcgtgggcatcagcgaggagcgccagcaggcggtgttcgctgcctatacccaggcggagcgctcgaccacgcggcgcttcggcggcagtgggttgggcctggcgatctgccgcgagctggcgatctcgatgggggcggagctgcagctgcgcagctcgcccgggaagggcaccacggtgtggctggatctggacctggatgcctgtgaggcacccgtggccgcgcccgcggcggcggttgcggacgagcgtccattgccggcggcgcgcgtgctgatggctgaagaccatcccaccaacctgcatctgctggagcagcacctgtgtgcgctcgggttgcaggtccacgcctgtaccgatggacggtcggcgcttgaagcatggcaggcgcagccgttcgacctggtcatcaccgattgccacatgccgggcatggatggcttcgcgctggcacgggcgatccgtgccgatgcctgcccggcgcgtgcgcaggtgccgatcatcgcgctcaccgccagtgtgatggaaagcacccgcgaagcctgtcgtgcggctggcatcgaccacttcctggccaagccggtggagccgcacgcactgcgggcgctgctggcggcattgctggtaccggactcagtgggccagtag

SEQ ID NO: 503440 - DNA, 657 bp, Stenotrophomonas maltophilia
atgggagtagcgctccctgaaaggaaaaggcagccgctgctggcgttgctcgcccttatcccactggccgcatgctcgccctatgctgatgccgagcgcgacgtcgccgctggtgggcgcggcctggccaaactcaaccctgcaccaaagcagggctacgagctggtactgacacttaaggatgcccctggtccattcacggtggtcgagggcgttgcccagtacgacgtcagcaaccacaaggactgcggccgggtcctgagggcgaccggtaccgccagccgtattaccagccaggagctcgtcacgctgcgcaaggtcggtgagaacgagtaccgcggtacgttctacctcgaccgcatgcaggaccaagactattacgatcgcggcgtctgtcattggacactgaccggagtcggtgcgatgttgcgcgccacgaccgacgaagcggacactcgattcctgacgttcgtcgacaaggaacgcatggacgcgaggagcccattgactctctattatccgagggttgcctatcctcgcgccgagcttgctgccaactatcctgccagcggcaaagagaatccttcggagtacaagggagagctgcgcgacgcgctgttctcgaccaccaccactgtgcagaaactcgcgccatga

SEQ ID NO: 503441 - DNA, 1005 bp, Stenotrophomonas maltophilia
atgcgctctcctgcacccgctgcggcgcaggaaccggcccctgcatccgagccaacccagacccaagcggcagcgcccacgtccgcgccgtctgcggcgcccgaatcacccgccgtggtgggcgcccccaatccgccgacgcctcccgcactcgccatcgtgccgttgccgccggaacaggccaccgagcgcgcgctcggcgcccgctgcccggtggatctggccggtcgcctggcggcccagggcgacctgctgatcggtgcctgcgaggggcagatgccggcgcacctggcggccgtgctggtggcacttcccgagcaggacattcacctgccgcgcagctggcgcgagcgtgaggtgcgccagaaggtgtggttcaaggcggtgccgggctttggccagcgtccggacttcattgcgcggatgggggatatctgggtgcgttcgctggagggccgtgacgccgaaagcacgttctatctggtctcggcgcctttcctctgcagcaatccggcggccgggaccacagtgcaggtgcaggagccggtgcgcctgccggccggtgagtgccgcgaagcttacatcgctcagcgcgtataccaggtgcgcggcgatgccgcgccgagggatgtaacggccgaggtcatgccggccatgccaccgttgacggacgccgatcgtgtgcgccagctggctcgcgaaggcaggatcacgctggatcacagcaagctgcagttcggcccggccatgcgctggttcgtgcaatatccggagacagcccagaagggcggtccacgcgcgttcagtgattggagccgcgagcacctggccttcgtggtgtggaccggggatcgcttcgagctgcgcgaaaagatatcgcgcagccagtggccctgcgacccggtggcgccgggggatcgcgcttgtggcggcttcccggattccgggccggatctgttcgtgacggccggaacatccgtgccgatggcagcctccagcccctga

SEQ ID NO: 503442 - DNA, 705 bp, Stenotrophomonas maltophilia
atgttccgcgccgatcttccgcaagtattgaaagtgtgtccaggcggcgcccggatgcctggtggctttaggggagcgtatgttggcgcaggccggtacaccaccgtcactaccttcacgcgaattgctcggcagtcagaggtacatagccgctgcctccaatgtcgtcctggatgcctgatgcgatactttgtcggaatgctggcagtgctggtttcgttctggtcctcgccggtagcggctgagggcaactgtccgtctggtttctacccaattggtgggcagggtgtcagcgggtgcgcaccaattcccggtgcagttggtggaacggtttcaccctctgctcccgctcctgctcagccgttgggggagtggttgacgagatggggagccgtggctgagtcgcctacgtcaaatctggtcggcaccgcagccaatgagtccagcgagctgcgtgcggtggctgtggcgatcaagaagtgtgcggcagagggtgcaaaggacttcaagtcttcggtcacctattacaaccaatgcgttgcattcgctgtgccgtcctcaggaaaggggcagggctccttggatacggcggtggatgcagagaccgtcgctggaaatgcaattggtcattgtcgggataccggaggcggaaagtgcgccgtcgtctattccgaatgctccttgcccgttttccggaagtattga

SEQ ID NO: 503443 - DNA, 843 bp, Stenotrophomonas maltophilia
atggccatgttcgggaccaagctgcagaacttcctgaccggcgatgtgcaggaccagatcacttatattgtgaccggcaagaagtcgaccgccgaggagctgatcgacaagaacctgggctatatgcagctggcgcttacgtcggtgagcgtgctggatgtggccggcgacgtcgcgctggacagcgccaagacgcgagcgatgtggttcattggcttgggaacaggaggtcccgctgttaccgcgggcgcgatgttgctgctgtaccagatcgcgctggcgctgttcatcggattcggaccgctattcatcctgtgtctgctgttcgagcagacaaagtcgttgttccaacgatggttgttctatggcatcggcaccatgttctcgatggccgtgctggcggcgatgaccggcattgccatggaaatggtggcacgcgtggcggcgtcgttctggggcgcgtccgcgctgggtgcactgctggggtcgaacctgaccgagggcatgagcagcatggcgctgcagcagggcggcatgggcctgatcctgacgacgctgatcctgactgcgcccccaatggccgcgatgttcttccagggcaccctgggtaccttcatggcatattcgcagataggtggtagcccggtgccgacctcgccgggtccgaacgggcagccgccgggttccagcgggtccaatagcggaggattctttatgccagcgatgcctcctgctgatacgcagatgcgaacgggtgctgctggggcccagcggtcaggattcaccggcgaagcggcgcctcatgcaggccaacggggtgctgcgaacaacgatcggaactga

SEQ ID NO: 503444 - DNA, 1143 bp, Stenotrophomonas maltophilia
atgatgcacagtatggtgttcaatgatctgttgcacggcacgttgttcgcctcggtgggcgacttcgtcttcttccggctgatcctggattatctgcgcgacgagatcaccaatttcggcaacggtatcctgagccggatgatgacctgggtcggcacgatggcgctggtgctgatgacgctgtgggtgctcatccagggcttccgcatcgtgaccggacggagccgtgactcgatggctgcgctgatgacgaacatggcgcgcgccgccctgatcgtcaccgtcgcaacgtcgatggcgatgttcggaaccaagctgcagaacttcctgaccggcgatgtgcaggaccagatcacctacatcgtgaccggcaagaagtcgaccgccgaggagctgatcgacaagaacctgggctacatgcagctggcactcacgtcggtaagcgtgctggatgtggccggcgacgtggctctggatagtgccaagacccgcgcgatgtggttcatcggcctgggaacgggcggtcccgccgtgaccgctggcgcgatgttgctgctctaccagattgcgctggcgctgttcatcggattcggaccattgttcatcctgtgtctgctgttcgagcagacaaagtcgctgttccaacgatggttgttctatggcatcggcaccatgttctcgatggccgtgctggcggcgatgaccggcattgccatggaaatggtggcgcgcgtggcggcttcgttctggggcgcgtccgcgctgggtgcactgctggggtcgaacctgaccgagggcatgagcagcatggcgctgcagcagggcggcatgggcctgatcctgacgacgctgatcctgactgcgcccccaatggccgcgatgttcttccagggcaccctgggtaccttcatggcatattcgcagataggtggtagtgctgtgccgacttcgccgggtccgaatgggcagccgccgggttctagtgggtcgggtggtatgtttacgcctccggtgccagtctcgaattcaagtaccggtgtgttggccaaccaaggcgcaacaccaaggctccaaggtcagggcgaagcacaatctacttcaggcccaggtttgcggggcaatgctcccaccggcaacacctga

SEQ ID NO: 503445 - DNA, 828 bp, Stenotrophomonas maltophilia
atgaagacgctcgctcatacgaacaaggaaaccgccatgacaactgaaacccgccgcacgccggtgcgtcgccggcgcttcgcgccgatgatggccgcagtattgaccctgggcatgaccatcagtaccggcaccagtcccgcgcaggcgatgaccgtctatgacccgttcaactggatcatgaacttcctgcaggagatgaaggccggcaaggagtacttcgagacggcggcacgctggagccaaacggctgagcagtacggcaagaccatcgacaactggttgtccaagctgcagaactggacccagatcatcgcttcgccactgatgccgccgacgcccacgctgacgaagattcccgagaactggaacgtggccgagaagtgcggcggcgattccatgatcagcatgaacggcctgatggcagtgctcaacatgagtccgggtggcgacatcggcgcgcagcaacgcgcgatctgctcgtacatccaggtgcttgagaacaagaagtacaacgagactgtcgaggtcgtgcagatgtccatgccggcgatggagcagatgcttcagcagctgcgccggatccgcaacgcattcaagaacgaaggcgcgttgcaggaagacatctcgaacaacacggcaacctcggtcgagcttgagaaggccttcaagaaatgggagaccaccatcaaggtctacgaccagcagatcgctgctttgcaggggcgacagaagaacctggccgaacgtgcgttacgcggcgagcgcaatccgatcggaagcgtcatcaaggccggcgcgctgaaggccgcgctttccaccaagtga

SEQ ID NO: 503446 - DNA, 405 bp, Stenotrophomonas maltophilia
atgaagcgatccaatctcgacctcgtgcaggcacagcgcacgctgaaaaccctgctgatggccaccatcttcgttggtgcgctgttcgctccgcaggtcttcgccaaccagggcggcgtgaattatggcggcactgagaagaaggtgtgcggcttcttcgacagcatcaatggcctgctgaacatggcctcgatcgccgtggtgaccattgccgtcatcttcgccggctatcagattgcttttgcgcacaagcgcattggtgacgtggccccgatcctgatcggtggcgtgctgatcggtgccgctggccagatcgcgcgcatgctgctgggtgacgactacggaacctgcgagggcaagaccgccatgctgatccagcaggctgtccagtactacagtgcataa

SEQ ID NO: 503447 - DNA, 2130 bp, Stenotrophomonas maltophilia
atgcccctgcaacgcgccctgtgcctggcactgaccctgcccctggcaacccttgcccatgctgtcgagccctccactgccgcgccaaaggacctggacaaggtcgaagttcgcggacgtgcacagaccctgtaccgggtggacgatgctgcggtcggcacccgcacggatacaccgctggagctggtcccacaatcgatccaggtcatcccgcgtgaactgatcgacgatcaggccgcgcgtcaggtgaccgacctctatcgcagcatcagcggcatcagctacttcagctatgccggggtgaccctgcgcggcttccgccaggagaacgtgctgtatgacggcctgcgcggcgacccgtatgcaggtttctcggtcccgcagttgttcaacatcgagcgcgtggaagtgctgaagggaccggcaggtgcgctgtatggcggtggtgatgcaggcggcgtcatcaactatgtaacccgcaaaccgaaagccagcgccggacgcaacatcgagatccagctgggcgacaagaacttccgtgccggatcgatcgagggtaccgggccgttgaatgcctccggcagcgtgcgctatcgcgccgggctgtatgccgacagtgaaaagggcgtgcgctggaacaccgacagcgaaagcgtgatcggcgacgcctcgctggccttcgacatcggccagaccggcgagctggtgctgcagttcaccgacatcacccagaacctcggcggcaaccgcctgcgcggcgtgccggtgaatgatgcgggcaccttcctgaccgaccgccgctggaaccacaacgaggccagcgacttcctcgacatgcgcgccaaagtggcgctggcgcagtaccgcttcgcaccacgcaacaatctggatgtggacttcgccgctcgctggttcagcaacaacgagcaccagatgtaccacgagccgatgggcctgatcgatcgtgaccgcgatggcgtggccgagtggatgacccgccagctgcgcaaccagatccgcgacaacgaagcattcactgccaacggcaatgcagtctggcgggtgacgaccggcgcggttgagcacaaggtgttgttcggtgccgatgtgtaccagctggatgcggatttcactgcacagaccgccaacagcgccgaccttgcccgtggtacggggccggtgcgcggcatcgacctgttcaatcccgtgtacggcgccagtacctggcacgactacaacctggtggccctgccctggcgcagcacgtccacccgcagcaagcgctatggcggctatctgcaggacgagctggcactgggcacacgctggcatgtgctggccgggctgcgctgggatggcttcaaggacgacgaccgcattgccggcagcagtgtggacggcaacgacctcagctggcggctgggcagcacgttcaccgtgcgcgagggcctgaatgtctacgccaacgtggccagtggtttcgtgccgcagagtgccgccaaccagaatccggccgctggcggaccgttcgatgccgagcgcagcaagcagtgggaagtgggcatgaagtccctgctggccgaccgtgtgaccttgaacatggccgcctaccggatcgaccgcagcaatatcgtgcaggccaccggcgaagtgatcggtggcgtgaaccagttggccgcgctcggcctggtgcgcagtaccggcatggagctggatctgctggccgacctcagcgagcgctgggtgctgaatctgacctacgcctacaacgatgcgcgggtgaaggatgcaggcccgaatggcatcaccaacgcttccggcgaccgattcgccaatgcgccgcgcaacaagctggggctgtggacgcgttatgaccttccggcgatcaactccgccatcggctttggtgctgaccatgtgggtgagcgcgtcagtctggacgggcagacggtcaaggcttacaccgtgttcgacatgagctggaagaccacatggaagcagtggcagttccaggccaacgtcaagaacctgttcgacaaggtatatgcagccagcggtttcatcgcgcgcaacggacatttcccgggtgagccgcggcgggtgtacgtgcaggccgcttacagcttctga

SEQ ID NO: 503448 - DNA, 666 bp, Stenotrophomonas maltophilia
atgttcgctgcacagcatcggggtgtggcacctaccgtgccaccgcgttccgatctgacaggaagcctgcatgtgacccagggagctcctccaccgtccccttccacgcgcactgtgccaccgcggaattcgccgggccttaccgctgccgcgtggaatcgccgcccgcgtagtggccgcgcgctcggcctggaacattggccgctctggctgcgggaagttcccgaagccgagcgcgcaggtgtattgatgcggctgttcggcgccttgttcctgctgctgcccggcattgcactggtggcttcaacgtatcggcacgcgagcgcagcggcggccgctgctgtgctcctgttcgttgccgtgcatgccgcgctgcatgggttggcggcatggcgcgcggcaacctcgcgcccgatgccaccactgctgcgcgtcctggatggtcatgccgctgggataatgattgccagcgcgctgctgatcagcatcggtgcagggatgacgaagctgcctgttccagcattcttctggttgtcggccggcgcggtgagtcaactcttcgctgcgcgattggcaggtcaccggctgcgcaatgcactgctggttctcggtagcgccctgcagttcatcgccgtagcattgctcgcccttcctgccgcacgctga

SEQ ID NO: 503449 - DNA, 1191 bp, Stenotrophomonas maltophilia
atgagcgccgcaccacgcaagcgccgccgcgcgctcatgattgctaccgccctgctgtgcagcgcgctgattctgtttgcatggttgcggcccgcaccacctccgcaactgcaggttgcgccggtcgttcgcggcaacatcgaacaggtggtggaagccactggcacgctgaagccctcgcggctggtcagcgtgggtgcgcaggtctccggccgcatcgacaccctgcatgtgaaactgggcgacaaagtgaaagccggcgatcccatcgccgatatcgattcgcgcacgcagcgcaatgcattgctgagcgcacaggccgcacagcgcaccgcgcgcgccaaccgcgatgcactggcgaccgacctgcgccagttcgaattgacactgcatcggcagcagcaactggctgccgcgcaactggtggcccgcgccgacttcgatgcagccaaggccaaggtcgacgccacccgtgaacagatcgccgcgttgaacggtgaagttgcgcgccgacagaccgacgtcgatgtcgcgcagaccaatctcgagtacacccgcatcaccgcccccaccgacggcaccgtactggccgtggtcgcgcgccaggggcagaccgtgaatgcggtgcagagcgcaccgaccatcgtgatgctgggcaatcaggacgtgatgacggtgtacgccgagatctccgaggctgacgtcgtacacaccgctgttgggcaggaggcgttcttcaccattcttggtgatgccggccgccgctacagcagcaggcttcgggatatagcaccagcaccggaatcgatcaccaacgaagacagttccagcctcgccgcaccggcggtgtcgggtggcagccgcacggccatgtactacaacggccagttcgacgtggacaacgccgatggccgcctgcgcagctacatgaccgcgcaggttcgcatcgtgctgggccgcgccaacgacgtactgaccattccctcggccgcattgggtgcgcgcaacaccgatggcagctacagggtgcaggtccgtggtgccgatggccgcgccagcacgcggcgcatcaccaccgggctggatgaccagatccaggtggaagtacgcgacgggctgaaggaaggcgaacaggtcgtgctggcgcaggccaacgtcgaagccgccagcgcacccgctcagcccaaatga

SEQ ID NO: 503450 - DNA, 378 bp, Stenotrophomonas maltophilia
atgaccaggatcactctattgatcgcgctgtgcgctgctccgttgctggcccaggcctcaccgaccgacccgaagcaggcctacatcgacgccacattcaccgccatggatgccaacaacgacggacgcgttgacaaggtcgagtacgcgaaatttcagcaggaacgtttcagcaagcaggccgattccatcgacgccgcgttttccgcgatggacaggaacaaagacggcaggatcagcaaggaggaagccaacgtggtgccggagatcgcgaagtacttcgcgggcctggacatcgatggtgatggctatctgtcgctgaaagagatgcaacaagccatggtggccgctcagactgcagacgcgccaacaaagtaa

SEQ ID NO: 503451 - DNA, 321 bp, Stenotrophomonas maltophilia
atgtcaatgactgcactcgcacttgcgaccgctctttccggcctgcccgacattgcctgggagcgcgagcgcggcgaagacgcacatcagctgatgctctgccagatccatcgcgatgagctgatgcaggatgacgcgaagagcgatgcctaccagcgcgccaaggcggtctgcgatctcctggcgcgtgagtacaggaacaaatgggatttcgatgcgcaggaggcattggcggcatcggcagtggatctggatgagctgatccggcggggagacctggttgaggtgcctccaactaggcaggaccgcgtctacgagtga

SEQ ID NO: 503452 - DNA, 210 bp, Stenotrophomonas maltophilia
atggaaatcgactggaacagcgtgggtaccttgaagcacaccgtcggcggctacgatatccgcacggatgcactgaagattctggtgaccgctgcaatgcaggggcacgaaggtgatgcctcgcagatgcgcatcgaaatggaggacggcgtcgtgtttctgccagacgagatcaggcgcctggcactggcgcggagtcgcatccgctag

SEQ ID NO: 503453 - DNA, 1437 bp, Stenotrophomonas maltophilia
atgtaccgcacccttgctgccgcattgctctgtgccctcttcgccgttccgatcgcttctgcacgtggcgctcccggcactctctctgctcagctcgacacccaactgcaggccaaccgcgagcgctacggcatcgccggccaggcggtactggtcgcacacaacggccaggtgctttatcagggcgccagcggcgaacgcgatcccgctgcccatgcgcctgccactgtcgataccatcttcgccgcgcaatccatggccaagctgctgaccagcacactggtgatgcagctggtcgaccagggcaaggtggatctggacgcaccggccagccgttatgttccggacctaccgacggcatggcaggcgattcacgtacgcgatttcctcaaccacagctccggcatcggcgagtactacgatcgcgtggacaaccgctgggtgagcaagggctaccccggtgtggcgcctaaccttggcgctgcactgaaggtggccggcgcggcaccgatgcagttcgccaccggcagccgcgtgcagtacacccaggccaactacctggtactgacggcgttgctggaagcgcactgccgcaagccctacccggccatcgcacgcgaacgcatcctgcagccgctgaagatgacccgcacttcatggggagcagccagcgtgccgccgcagcgcgcagcggtgccgtacatcggcaaggacggtcagctgcaaccagcaaacgaagacccctggccggactacggttggggccacgccgacctgcagaccaccgtgggcgacatgaaccgattcctgcaggcgctggcgaccggcaagctgctgcgcacgtccacgctggaaacgctctggcagccgcagaagctgagcggcggcggcagcaatttcttctccaccggttgggacaccacccgcagcgacggctacacccaggtcggccacgatggcggcacccgtgtacgtgcgcggctggcctacaagggcacgctggccaacggctactgggtgttcgtgtacctgaccaacggcagcacccgcaatgtctggtcgagcacgctggtcgagagcacgatggcggtggccgcacccgaggagtttccgcatgcggcgttgtccgagcgactgatcgcgtatgcgctggatgacagcgccggctcggccgaagcagtgcatcgctggctgcgcgacagcaacaaggttgctgccagtgaactggaacgcgcgatcaatgccgatggttacgcgatccgcgaaagcctcggggcacgcaaggcagtgaaggtgttcgcgctcaacaccgagctgtatccggattcggcaaatgcgtgggacagcctggcggaatgccatgcggcgctgggtgagaaggaagcggccgatcggctgtatgcaaaggccaaggggctggcgaagccggctctgtag

SEQ ID NO: 503454 - DNA, 366 bp, Stenotrophomonas maltophilia
atgggaaaaaaaatgttagcagaagtcagcgcgacccaatacgctcagttggatgagtttgtcagtgctctgtcaaatcgagatacagatacactgatgatcaagttcaatctgtccgccccagtgatcagtgagatattcgaggcgttgctggtgtacttttcgccgagcgcaaaattgtcagcgccaccgctagcgagccagtacgaagagtttcctctaatcgttgcgtacgaaagcacagcgggtgacatttcagcggagttcttcgtgcttgaaaacgacgagcccagcgaggctatgttacatgttgtttttttcggcgcagcgccaaacgagctgtgctacgaattcataaactcatag

SEQ ID NO: 503455 - DNA, 507 bp, Stenotrophomonas maltophilia
atggcccccgccgtatccgagaccacttcgccctccccgctcaatgccgagcagttgctgctgcgcctgctggacctgatcaaggccacgacctccacccgcgagctcaccgctgagcgcctgtccgcagcgatgcaggcgccggcgcaggtcttcggccccggccacttcggctatggcggcacgctgacaccggaatggggctatggactggaagtgcagcgggccggcactgccgacgcgcggctggacctgaacttcatggacaccagcagcgatcgcaaggcctcggctgcggcgatctgccaggtcgacttcaaccacttcgcttccgcactggatgccgccggcttcaagcgcgagacggtgcgcggcgaacacggccgggtgatctacgaccgcttcgatcgaccgcagctgagcatcaaggtcgacaccatgcccgagaaccctcacgccctcggcgacgccacgcatgcctgcgtgcgtcttgtcaccgtgcagtaa

SEQ ID NO: 503456 - DNA, 1422 bp, Stenotrophomonas maltophilia
atgacgatcctttccgcagaaacggaacgcctgctgggcgagttcgctggcaagaccgacgtcaccagcgaccaggtcgacaacctgcgcaacgtcatcgcgggctcgcccgtgctggcaaagcaggtggacgccgccatcgcggcaggctatctggaacgcttcgaactgttgcccgccacaagcaacgcgggcggcacctacgagaccggcacgaaatccatcaacctgcccgccaacagcttgtcgaccccggcggccccggacaggttcgacgcggccgaggttgcctttgtgctcggtcacgagatccagcacggcttcaacgatgctgatgtcgagcgcgcctacgtgcagttcgaagccgacgtggagcaggtcgcgggccgtacaacgagccatgattacaccgaggccatcggcaccctgctcgcggccaaccgccgcgatgaggcttcttcgaacatcgcaggctggaatgcgctggtcagccaggtacgtgccaacaacccggacgccaccctgcgcgacctgtatgaagccagcacccgctcgacagatgtcatccagtcgcgacccggcccgccgatcacctatgccccgcacccggagctgaccctcaatgcggacctgaccatctcccccaccgcagccaacatcgagggaatggccaggcactattacgatcagggcgtcagcacaggcctgggccatcatgggaattcggactaccagaatttctacggcgccctggcgatcggactggccagcgaattcgaggccgcgaatccagcgcccgatggcgtcagccggatggaagtgaacatgaagaagctgggcctggacgagcgcctgctggagcagaacgggctcaacctcggcgagggctcgcccccgcgccagccctacttcgataccagtacctcgccgtcgacgctgcattacttcgaccacactgagggcacgcatacgcatgtgccgatcaccacacagcatgcggtggagggcgatggcttaccgacgctgcttgcggaagggcgtgaccgcaccctgcacgaacagatccgcggcaaggtagcggagctggatgctgccaacggacgcagtttcgatgcgtccagcgagcgcctgagtgccagcctgctggtgctggcccgcgaaaacgggctggaccgggtcgaccatgtggtgctcagccgccagaccgagggtgcgggcgcggcgcagaacatctttgtggtgaaggggccgctggatgatccggcctcgctgcgcgcctcatcacccactgccgaggccgcccagcgtccggtgcaggacagcctggatacgcttgccgtggtcaatcagcggcaggccgatcaggccacgcaggaacaggtccgcgtgcaggagcagcagcgcggcgcgctgacgcactga

SEQ ID NO: 503457 - DNA, 657 bp, Stenotrophomonas maltophilia
atgacggcccttgcccgcgcaccgcgcaggaaccgttaccgcatggctgcaccgaaaaagaccgctgcccgtgggcgaccgcccaccatcacccgcgagcgcatcgccgacgccggcattgccatgacgctgccggggctgagcttcgtgggcgtggcggcggcgctgggggtcagccacatcgcgctgtacaagcatgtggcgaatctggcggcactgcgcgagctggtggccgaggcgatcttcgagcgttggcaggcaccggcactggatgccgacgccgatgtttccatcgaagcggacctgcgcgcattccagcgttcattgcgggcgctggtggatgccaatccgggcctggcgcccttcctggtcagccacggcgcgaagacgccggagatgctggcccgcatccagcgccaccatgccgagttcagtcgcgtgcacgatctgccgctggagcaggcagcgtggctgctgtcgaccgtggcgtatcacgccgtggcgttggccgacaccgtgtattcgcggcatgcggtggtagataccacgcgacgcccgttggatcggaaggcacaggaggccgagttcgaccgcagcatggaggcgttgatcttcggtgcattggcgatgtgcgggcgcatggcaggcgcgagataa

SEQ ID NO: 503458 - DNA, 837 bp, Stenotrophomonas maltophilia
atgtccgcgtcccccacttcaatcaccccggccgggccgctgcgcggcgccgaccatgatcgcggcctgcaggcgctgcaggtccaggtggtcgcggttgcacagccgtgcgccagcctgctgcgcctcgtggtccagctgccggaacatgcagaactcgcgccctggcagcgtgccaacaccgccgtgcgcatccagctcggcgccacgttcggcgatgtgtcacggatctacaccgtgcgcagcctcgatcccaacacccgccagttcaccctggacgtagtgctgcacgaggcgccggggccgatgctggcctgggtacgtgcgctgcgccccggtgatgccttcgatctgaccggaccgcgcccccatctgcaggtaccgcagcgcgagggcacctgcgccctcctgttcgccgacccaagcgccatccctgccctgtttgcattgctgcagcagtggccggccgacctgcgcgcagaggcctggatcgcctcggatgatgcattcccggtagacgaattacccgccattgaaggtgtccgcgtgctccacctcgccaccggtgacgcgccgttgctgcagcaggcgcgccaactgcggccggaacccggcagcacggtctgggcggccggcgagcgcgaggaaatgcgtgccctgcgccgccacttcatcgaaacggtcggcctgccacgcagcgacgttgccgtggccggctactggaaacgtggcgagaccaccaccgagaccgaccagcgtcgccgccgcaactacgagcgcgtgctggcacgcggcggtggcctgcaggacctcgacgacctcgccgacgatatctga

SEQ ID NO: 503459 - DNA, 2178 bp, Stenotrophomonas maltophilia
atgtccctccccctgcgaaccctgcccctcccacgccgctcggcgctgtctctggccgcccgtgcggcgttgctgcccaccctgctgatcgccactgccgcccacgccaacgacgcgcccgatggcgcccgccagctgcccacggtgaacgtacgcgccgacaagaccgcgcctaccgatgcctacgccggtggtcaggtgacgcgcggcagccgtgtcggcctgctcggcgacctcgatttcatggacacaccgttcaacaccacccgctacaccgccgaattcatcgacaacatccaggcgccggacctggtgcgggtcatcgcactgaccgaccccagcgtctacaacagtggctccagcggtggcatcaccgactacttcaacatccgcggtttcggtgtcgcctcgtcggatatcggctttggtggcctgtacgggctgatcccctactaccgcgtcactcccgaactggccgagaacatcgaggtgctgaagggtccgtccgcgctgctcaacggcatgccgccgggcggctcggtgggcggtgcggtgaacgtggtgcccaagcgtgcaggcgacacgccgctgacccgcttcaccgccagctacggcagcgacgcgcagtggggcggtcacctggatgtcggccgccgcttcggcgcggacaagcagttcggtgtacgcctcaatgccgtgcaccgcgacggcgacaccgccaccgaccaccagcagcacaagacgcagctcgcatcgctcggcctggactggagtggtgagcgctcgcaggtgtcgctggacctgttcagcagccgcgaccatgtggatggcctcaaccgtggcgtctcgctggcgcccggcctggccgtgccccgccctccgaaagccagcaccctgtttgcaccggattggaccttcagcaccgtcaaggaccaggccgccgcactgcgctggtcgttcgacatcaatgaccacctgcaggcgcatgccagctacggccacggccataccgatttcgactccatcgccagtgccaccacgctgatcaccaacaccgccggcgacttccgcaacaacttcgcccaccagcgcttcatctacagcaaggacaccgccgaagccggcttgtcagcgcgtttccgcaccggcgcggtcgatcatgcgctggcgatcagtgcggcctggtaccagcacgaccagaagttcggcttcaagcgcaacctgctggcccgcgattgggtaaccaatatctacaacccgcagtggggccctgccatcgaccgcagcttcagtgatgcgtcgctgccgaagaccgcggaagtgcgcaccaccagcttcggcatcgccgatacgctgtccttcatcgatgatcgtgtgcagctgaccctgggcatccgtcaccagaccgtgctcagcgatacattcgatggcggcacaggcaagcgcaccgcacgctacgacgccagcgccaacaccccggccggtgcactgctgttcaaggccagcgaccgcctgtcactgtatgccaattacatcgaaggcctgagccagggcagcaccgccccggcaaccgccgccaatgctggcgacgtgttcccgccctacaagacccgccagcgcgaggccggtgccaagttcgacttcggtcgcctggccagtgcgctgagcgtgtacgagatcgagaagcccggctcctacaccgacccggccaccaacgtgttctcgttcggcggccagcagcgcaaccgtggcgtggaatggaccgtgttcggccaggccaccgaacagctgcgcgtgctgggtggcatcggctggctgcagccgaagctgacccgtacccagggcggcatcaacgagggccggctggcgacggccacaccgcaatggcagggcaagctgggcgtcgaatgggacgtcccgaccgtgaccggactcactctcaccggcaacgcggtcagcctttccaagggctacatcactgctgacaacagccagtgggtggcgggccgcaccgtgttcgatctcggtgcccgctatgcgacgcaagcggccggccatccgctggtgctgcgcgccaccgtgcagaacgtgaccaacaaagcgtactgggcgggcagcctcggctcggggctgggtacgccacgcaccgccctactgtcggccaccgtcgatttctga

SEQ ID NO: 503460 - DNA, 300 bp, Stenotrophomonas maltophilia
gtgagcgtttcccgtaccaccgccgtgctggcctggctgcccctggtctcacgcatcctcgccgcgctgttcggcggctatgtgctggccgcgctgtgcagcatcgccgcactggcgctgcccatcgatggccgccaggccgtgttcaccggcatgctggccagcttccttctatatgcgggcgccgtagtctgggtgttcgcggtgcgctcggcgtggcgcgcgtggatgggcctgatcgtcgccgcgcttccgctgtggctggttgcacagatggtcggcaacggaggcggtgcatga

SEQ ID NO: 503461 - DNA, 1611 bp, Stenotrophomonas maltophilia
atgagcaaggtcgagcgcagcccgaagccacgcggcatccgccagaccatgtccgacctgcacatctgggtcgggctgctggccggctggatcctgtacgcgatgttcctcaccggcaccgccagctacttccgcgacgagctctcgcgctatacccgcccggaaatcgccacaccgtccacgttgccggatgccgctatcgtcacgcagcgcaccgtcgccacgatcatggccgacacgcctgcggccagccagatcaacctcagcctgccgagcacgcgcatgccgtgggtgtcggcgatgtgggccagcccgggtgggcgtggccggcatggtttcgactcgggcctgttcgatgccagcaccggcgcgccgctgcaggcacgtgacaccggcggcggcgacttcttctatgccttccatttcaacctgcattacatgccggccatgtggggtcgctggatcgtcggcctgtgcgcgatgttcatgctggtggccatcgtcagcggcgtgatcacccacaagaagatcttcgccgacttcttcaccttccgttggggcaagggccagcgctcgtggctggacggtcacgcggcactctcggtactcggcctgccgttccatttcatgatcacctggagcgggctggtgatgctggcggtgctgtacatgccgtggggcctggccaagctgcctgacaagcgccagcaggccgaggtggtcagcgagatgcgcctgttcctgccgccgcagaaggccgcgggccacgctgccccgctcaccgacattggtgcgctggtgcaacaggccgagcagcgctggggaaccgaatcggtgggcagcgtgcaggtgcagaaccccggcgaccagaacgcgcgcgtggccgtggtacgtgcgcagtccagccgtgtttccaccacgccgaactacctgctgttcgatggcagcagcggacagctactgcaggtcaaggagcactcgggcgtcgccgccgatacccagggcgtgctgtacggcctgcacctggggcgcttcgccgatgccgccctgcgctggctgtacttcattgtcagcctggccggtaccgccatggtcggcaccggattggtgctgtggacggtgaagcgccgcgcgcagctgcccgatccgcaacgaccgtacttcggcttccgtcttgtcgagcgactcaacattgccacggtcgccggcctgtcggtggcgatgaccgcctacctgtgggcgaaccgcctgctgcccgttgccatggacgcgcgcgcggcgtgggaggtgcatgtgttcttcctggtctgggcgggcatgttcgtgcatgcaacgctgcgtacacccaagcgcgcatggatcgaacagttcctgctggcggcgttgctgctggcgctgctgccggtgctgaccgcggtgaccacgccgcatccgctgtggcgcacgctggcctcgggcgattgggcgttcgcagggaccgacctgaccctgctggcattggccgccctgcacatacttctggcctggcgcacctggcaacatgctccgaaggtgaaacgcgcccggccgtctgccgcatcacgcaatgcggtttccgaggccagcgcatga

SEQ ID NO: 503462 - DNA, 279 bp, Stenotrophomonas maltophilia
atgatccacgtcattctatttgcgttgtcgctggccgcgttcgcctgcctggcactggcgatggagcgtcatcagcgggacgtattgcgtcgtgtgctgagcgcgcaggcaacccagcagctgcgggccacaggttgggcgctgctggtgttcagcaccgtgtttgccatgcgcgggctgggcgtgggttctggtgtgaccgcgctgtccggtcacaccagcgttgccgcgggcgtggtggtgctggcgatggtggcgcatgggcggtggaatcggtag

SEQ ID NO: 503463 - DNA, 2685 bp, Stenotrophomonas maltophilia
gtgagtgacgtgaccgcgcgcctgtacacgctggttgacagtgtgcatttcgagtccccggatcgttacgcacccagcgaccagtacggggcggttgtccgcagctgcctgccgtctggatggggagtgcaaccgcgggggttctggaccttctgccgacccccgcaggatgttgcccttccgcatgggtggaagatccatctttcctgcattccggagaatgccgaacagacgttggccgtgatgacaccggtcgtcgttgaagccggtgtttccttcaagttctgttcggatcccttcatgcttggactctcgctcggaaagggatggtcgcgtttccaggctggaaagttcatcacgatctatccgcgggaccggcaacagttccaggaacttctcgagcgcctgtaccaggtgacgcaaggtctttccgggcctcatgtccttaccgatcgcgcataccgtgacagcactgtcgtctactaccggtacggggcccacgcgggtgtttcgcggcccgatccctacggcagcctgcagcagggctacctgctggccgacggtacctggcacgaggatgtacgtggtgccggtttccggctgccgcccggggtcgacgatccattcgttgccgctgccgcagcgccgacgccggcaggccccatcgttctcaatggccgctaccaggtccatggtgtactgaaattcaacggctccggtggcatctatcgtgggcgcgataccacgaccgggcagaaggtggtcatccgggaggtgcgcggcttctcggatgcggatggcgccgagctggtcaatggcatggtcaatggcatcaggcgcgaggccagaattctgcagaagctgtcggcaaccggcctggtgccggtgttcgtggaactgttcaaggaatggaacaactggttcctggtgcaggaacaactggatgcgatctcgctgtgggacagtgcgatggcgttctacttcgcggaggacgaacaacgtgcctgcgacggattcgagcgtttgcgccgcagaatcagccagatcgccgaggcgttgcaggtggtgcacgagcatggcgtggtgctgcgtgacctgacccgcagcaacgtcatgttcaccgctgccggcgaggtgaagttcatcgatctggagttcgcacacgagatcggccacgactctcactgggccaagggctggacacccggctacgcgtcgcaggagcagctgcaggcgcagcggccgaccgtgcaggaagatcaccatgcattgggtgcgctgatcttcgacatgatcaccttctgtgcgtccggactggatctgtcccgtgacgcgctgctggagcacaaattcaagcaggtgctgggagatctgggtctgccgatggatctgcacgatatcgtggtagggctgacgcatcaggatcccggccagcgctgggacattggccgtgcactgcggcacctgcgtacggcaccctctccgcagtcaggcgtgttgatgttcccgacacggtcagcgctgctcgcggcaccgccggccgccgcgcagaccgaaacgcggattgcggctgtgcttgaaggctacgagcgctacctttcatccacctgtgacctttcgcgcgccgaccggctgtggcctgcagggctgcagatgttcatgaccaatccggtatcgctccagttcggagcgaccggtgttgcgttcttcctgctgcgccgcaccggcacgctggccccaggggtgcttgactggatcgagaatgcagccacaccgcagcgctgcccctcggggctgtattccggtcgtggtggtgtcgcattgctgctgatctgcgcgggccggcacgaggcggcgcatcgcctgctggatgaggtcaatgaggatgcatctgcgctcctgctgcctgggctgtactttggtgcagccggagtgggactgttgaacctgcacgcctggcagggcctgggcgatccgacccatcttgccgtggccgcgcggatcggtgacacgctgctggcggctgggcaacgcgccccacagggccgctactggaaagccggcgaccgcacgggcctggggctgggagacggccaaagcggcatcgcgctgttcctgacctatctcggcaaggtgaccggggacagacgttacctggcggccgcggccgaggcgttggatttcgatatctcccatggtcttcgcattgcaggcagactggtctggccgacgcatgttgaaggcgccgccggcgcgccggcgagcccgcacacccgctttggctcggcaggcatcggaatggcatgcctgcgccattacgtcgccacaggcaccgagcggttccgtgatgttgcgctggactgcgcacattccgtgcgcccgcggatcaccaacaagatctggcaggacagcggcaatgccgggttcggcgagtacctgctggatctggcctgcttgctgcaggacgagcgcttcagcaatgcggcgtactaccaagccgaggcgatcctgccgcacgcactcgactgtgagggcggtgtcgcattcgctggaccggcgcactaccggatctgcaatgactacggcatgggcggctcggggatcggcatcttcctggaccgtctgctcagccgtcgcagtcgctttctcatgctggacgagttgctgggcgttcgcgcctgttga

SEQ ID NO: 503464 - DNA, 126 bp, Stenotrophomonas maltophilia
atgaacaacgtacttgccctgcagtcgctggaaatcgagtcgctggaagctgaagctgagtgtgtggtctgcctgtcctggtacagctcgggactgggcatcgatgaaggctccgacaaggcgtaa

SEQ ID NO: 503465 - DNA, 1209 bp, Stenotrophomonas maltophilia
atggcaaacgaatgtcgcatcgccgcaggcggcatgcatgggcgtgcgctgccggcaacggtgctgtttatggcggtgctggggtctgcacatgccgtggagctgaagatcacagcggaattccgccccaatgctctggatccagggcacaacgcattcgtcaacactacgccgcaatcgggcttctgtgcgcagcatggaggcctctgcaagaagggtgatttcaccatcgatacggggatgaacgtggcccagcgccggttgtacggcggcggtacggatccgcgcgagaaatggtatctggccgtggacgggaattggcgggacgtaactgtgcgcaatgcgaacaaccatgagctgaaggcccggctacgcgtgttcctggtcggcatgcaatggggattgccatcggatggctcagcgcctggagccaatggtgcctcaagcggaggctgccgaggccgaaccggcgtggggactggggcgtggtaccgctatgcatgggacgtgccggtgggtactcccgtctgtgtgcgcaatccaagggcggccacagaccgcgtggcgcgctatctggcattctccatcggatatcatctggaaacgcccaatccattgcaggcgcaggatgggcagtacacggggagcgtgacctacactgtgggcaatggtcagcagatcgacctcggccagggagactactcgcactcggaactgacactgcagttgctgctggatgtgttccacgacttccaggtccgcttcgccagcgagtcgcccagcgtgcagctggcgcccgatgacggctggtcacaatggattgatcatggccgccctcctgcacggctgcgtcaggagctgccgttccacctcaccacctcgatggatttcagcatgaagctgcgctgcgagcatgaagcagggcaccgctgcggtatccgcaacggtcgcgatgatgccgtggtgccggttgacgtggacgtcaccatacccagcatgagcaatatgcatgatggacgcccggcgcaggacacgccgctgctaccggatgacgcgtgggcgccacgtttcaccccggatggctatctgatgcagcggcgctcgacactgcgcttcaccgcgggtcgtgaggcggtgacggagatgctgaagtcgcccggctcgcattggcagggcaacatgacggtggtgtttgacgccaatccgtga

SEQ ID NO: 503466 - DNA, 2505 bp, Stenotrophomonas maltophilia
atgaaacgacccgtccgtcccgcatctccggcccttgcgcgattggctgccggcatcggcgccgtggtgtttgccgcgtccagccatgccgccggtcttgcgctgggtgagctgcccagcctgctggagcagcgcgagcgcatgcctgcggagttccgcgagcatctgttcggcaacccgctcaccgtgcgggtggagctggacgggcgctacctgggcgacgccgaggtgctgctgcacgaagacaatcgcgtgcagctgatcggctttggcgaagcccatgacagcccgctgccgcagacggagcgggcgcgctgggtcgaggcgctggccgagccgctggcgctgggcgtgtgcagccagcaatgcaggggcctggcagcgctgcactacagcctgtccaattccctgctcagcctgctgaccccggagggcgcgcacaaggaagggcgccacgtcgcgctgccggagcgcggcagccatggcctgattgtccgcaacagcgtggccgtgcatggcggccaggggcaacagacctccgcgcgctacagcgctgaactgcgcggcagcgtcggccgttggagcacggtcggcagctaccagtactacgcacagccgggcagtcgcgagcactatctcagtgccctgtatgcccagcgcgagctgggcgaccatttcgtgcgtgcaggctacttcctgcccaccttcgaaggcatcatccgccagccgcgcgcacccggcacgcagaacgataccgcgctgggcttcatgctcggctcgtcggacgtgctgctggccgacacgcgcagccccagtgtgtacccggtctatgtcactgccagccgcgaaggcgtggtggagatcctgcgcgacggcaatctgttgtccacgcaggccgtcaaaccggggatccaggagatcgacacccgccgtctgcccggtggcatctacgacgtggaactgcgtgtcatcgaggatggccacgaggcctcgcgtgagaccgcgtcgatccacaaacccagtcgctggagcgaccctacacgccgatggcgctacagcgtgttcgccggccaacagcgtggcctgctcgatagtggtcgcgcaccgcaggagggcaggctggccgcgggtgcggtggtcaattacctggtgcatccgcgggcggtggccggtgccaccgtgcagcagatcggcacgcgccgcgcggcggggctgtcgatggactggcaggccagtgaccgcttcagcacctacaccaacttctatacctccagtgatgccgggcgcggcgtcgacctgcaagggttgtaccgctaccgcgccggatcggtagtggccaaccatgcgcgcagctgggccgagcagcgcgagcgcgtcctgcccggtgacggctcggcgccgcgctgggaaacccgcgggggctggcaggacaccactgccgtgtcgatcacccatcgcttcagccatcgcgacaacgccagcctccgggtggcgcgcagctccggcttcaccaaaggcaccggcatcgatgtgtcctatgggcgccgggagaccctgttcggcaagcacgatgtgaattggagggtctcggcctacgaccgtcccggtagccgattcacgcattaccgccggcagcgcggcgtcgacctgacggtaagcgtatcgctgggcagcgagcgccgcagctacagcggcagcctgggcagccgcaccggcgaggctggccagcgcgacacctatgtcagcgcggcagccacgcagcgtgtggatggcaagctgctgcagagcgtgaacggcatgataagtgccgagcgcagcgccatcggcgccggcgcgggtgcctatctgcagagcccgctgctggaaggtgatgtgcagctgtaccgtggcgcggggtcgggccaagtgagtggcagcgccaatctggacagcaccgtagtgatcggcggtggccgtgcagcgatgcttggccagggccgcagcggcagcgtagataccggcatcatcgttgacgtgcgcagcgactaccccgacgtgaggctgcgcggcgacgacagccggggtggcggcgtggagttgaagccggggcgcaacttcgtgccggtgactgcctaccgcgcgggccacgtgcagtttgacttccagggccggcacgctcctgccgccacgctgcagccgtccaccgtcagctaccacctcaacaagggtggggtgatgcacgccaccgtggatgtgctgcgcaccttcaccgtgatgggtcaggtgctcgatgccgacggcaatggtgtgcgcggcgtccaggtgatcaaccacgcggggcgcagtgtcagccaggaagaagggttcttcacgctggagctgagtgcgcgcgcgccagtggtggagctgcgctatcccaacctggtcagctgcgtgctgacgatggaagaggggcgctacccgcgcgaacgcgatgtattgatggtgggcggagtgggatgtccacggccgctggcgggttcatga

SEQ ID NO: 503467 - DNA, 495 bp, Stenotrophomonas maltophilia
atgtccctgaggaccaccctgctggcagcggccaccgccctgctgatcaccccggccattgccctggccgccaccgaaaccaagtcgatcaccgtcaacgtcaccgctgatgtgccgaacaccgctggcctgcaggtgtccacccccgatggctgggaaggcctgccgcagaacctgccgtgggataccgcccgccaggtgctgggtgagctgaccggccgcgtcatcaacatcaagtcaccggcagcgatcagtgcctacctgtcggcgccggcgcagatggcatcggccgccgacgtggtcgacctggcagtgaagctggacaacgtggtggtgccggccacctcggccgcgaagatcgaagtggccaacgctgcccaggcggccgccggcaagtcactggccttcgccattgccccgaccgcgccgagcggtggctacaagcagggcagctacggcggccagttccacatgatcttcgaaagcgacatctga

SEQ ID NO: 503468 - DNA, 735 bp, Stenotrophomonas maltophilia
atgcatcgtcttctctctttgattctgttggtcatcctgtctggtagcgcgcaggcatccacaccgcagatcaatgtcggagtgctgttcgactatctgcagccctcgcacagcaacctgctcaagcgcatccgcaacaccggtgatgccaccgcctatgtgcgggtggaagtcacccagatgcacttcgatgccgacggcaaggcccgtgagacgcgggtggataccagtgctctggtacgcaatgtgcccgatgcgcagggcgtcatcgccagccccagccgcctgattattgcaggcaatggccagcaggccacgcgcctggtgtatcgcggcgcgcgcgacgaagaacgttactaccgcctgcggttcgtgccggtggcgcccaacgccgcggagttcgcgctcagcgaggaacaggcccgcgaggccgaggagctcacctcggccatccgcgtgttcaccggctacggcacgattttcttcgttgcgccggagaacccgcactacgacacgctcatcgagcaccagcaggtacgcaatcgcggtaatgccaccgtggtgctggaaaacctgcgccagtgcgagcgcgaccgtcccgatagctgcacgccgggaatcatcgcccatgtgcgtcccggcaacagctacgcgctgcaggctgccgagcaccagttcctgcgcttcgagcttcgcgaaggcgacagccaacgcagcatcgactcacgccgttaa

SEQ ID NO: 503469 - DNA, 546 bp, Stenotrophomonas maltophilia
atgagcgtgcatgtcgcactgctgcgagcagtcaatgtcggaggtaccggcaagctgccgatggttgaactggtggcgatgtgcgaagacgccggcttcaccgacgtgcgcacctatatcgccagcggcaacgtggtgttccgcagccgacttggcgaagccggcgtgcggaaagcccttggccaacggctgcaggcctatgccggaaaaccggtgggtgtattggtgcgctccgcagccgagatcgcggcggttgccgccggcaatccattcccgcacgccgccggcaatcgtgtggtcgcgctgttcgtggatgaggcactgcccgccgatcccttgatcggggtgaccggcctgcacgatgagcagctggcgctgggtacccgcgagatcttcgtccactatggcgacggcatggccgactcacgcctgcggattccctatgcccagcaaggcaccgcccgcaacctcaacacggtcggcaagcttgcggcaatggccgccgcgctcggccaggccacctcaggcggtagagggcggcggtag

SEQ ID NO: 503470 - DNA, 525 bp, Stenotrophomonas maltophilia
atgtcccagccgacacttccccgcccacctgcgctgccgctggtgacctcgctggtgcgccactacgaggaactggtggactacctgcatcgccggttccgctcgcccgggctggcccgcgaagtggtgcacgatgtctgtgtgcgcctgctggaacgcccggccgcgcatgacgcccgccaaccgatcgcgctgctgcgcaggatcgcccacgatgcggcggtcgaccgctgccgcgccgaggatctgcgccggcactgggtggagccccgcgccgagctccccgaaggcgcctgcgagcgccccggacccgagcgccaggcgcagggccagcaggcgctgcagcggctgaccaccagcatcgagcgcatgccctgccggcggcagcaggtgttcatcctgcacaagatccacgagctgccccaggccgaggtggcgcagcggatgggcatcggcctgaaggcagtggaacgtcatctgcgcctggccatggccgactgccggctgcacggtgcgctgcggtga

SEQ ID NO: 503471 - DNA, 852 bp, Stenotrophomonas maltophilia
gtgagtcctgcatcacccgatccggcaccgccgtcgcagcccaccgaaccgtccgccgaggacacgctcgatcagcaccgggaggcactgaaggagcgtttcccgttgccaggcccggaacagctgcagcggcgccgcggcggatctggcgcgaaacgggtactgccggtgctgttgctggcggccgccgcgctgctgctggccgacccggcctggcaggtgcgtgactaccagaccgccgtcggcgagcgccgcgacatcgagctgccggacggcagccgtgtgctgctcgacgcaggaacccacctgcaggtccgtcgccatctgcattcgcggcaggtgctgctggcgcagggccatgcgcgcttcgaggtgcagcattcagcgtggcgccgcttccaggtcgatgctgggccggtaaaggtacgcaactacggcacggtgttcgatgttgaccgccagggcgatctcagtgaggtcacgctgtggcgcggcgaggtcggtgtcagcgtggatggcggcggcaccgagcagcggctgaagccggggcagcgcctgctggcccagccgggctcgctgtctccgccggaagccgtggatccggaccgggccgactggaccaccggtcggctgcagttcgaccgcatgccactgagcgaggtgctgcgcatcctgcagcgctatcacgaccgtccgatcgtgctggacgacccggcactgggtccgctgcaggtgtcgggcgtgttcgatgccgatcgtgccgagacggcggtcgcgctgctgccggagatcctgccggtccaggtgcataccgccgccgacggcagcctgcatctgcgcgcccgcgattga

SEQ ID NO: 503472 - DNA, 2430 bp, Stenotrophomonas maltophilia
atgacccgccctgttccgcccgccgcgctgcgccggctggcccccaccctgctcgctgcctgcctgtgtgcggcgctgcccgccaccgcgcagaccgctgcgtccgcacccgtcgaactgcacctgccggccggcccgctgcaaacttcgctcaactcgctggcgcggcagagtggcatccagctgctgttcgcggccgacagcgtgagcggccgcaacgcgcccgccctcgacggccgctacaccccgcacgacgccctgcagcgcctgctggccgggcaaggcctggcgatgcaggagcgctcgccgggggtgttcgtggtgagtgccacgccggcatcccccaagccccgcgctccggcccgggccgcgtcatcggcagcgtcccaggccacgaccacttcgctggcccgggtcacggtatcggcctcgaccgcgcgcatgccgcagggcgagaccgcgatgcccaacaccatcaccgtgctgacccgcgaggacattgcgcagcagctggcgctgggctcggatgtctcgcgcgtgctgtcggcgcagatcccggcgtttgccccggcgcgcgagaagatgtccaactacggcgaaaccatgcgcggccgcggcatcctgtacatggtcgacggcgtgccgcagtcgacgccgctgcgcgatggctcacgtgattcgcacaccatcgatccggccatgatcgaacgcatcgaggtcatccacggcgccaacgcgctgcaaggcatcggcggtaccggtggcatcgtcaacatcatcacccgcagcgcgcccagcgagcccggcgccttcctgctcgacaccaacgtcagctacagctcggccctgcccagccgccgtgatgacaacggccagcgcggctcggcactggtcggcgtacggggcgagcagttcgatctggtggccggcctggcctatgagaagcagggcctgtaccacgacggtgagggccgttcgatcggtaccaacgcgcagggcgaactgatggattcgacctcgtcgaacgtgttcgccaagctgggctggaacattgccgagggccaccgcttgcagctgatggccaaccgctacgagctgcgcgggctggacaactacctggcggtgaacggtgattaccgcaccggccgcccgaccatttcggtgcccggcgatacgccgctggatccaccgatgaaccgctcgcgttcgttgacgctggactacagcgccgccgatctgctcggtggccgtttccaggcacaggcgttcgcggtcgacttcgaaggccgctatggcgccagccagtgggatccgtggggcaacaccggcgccaacgccgcctgggaccagacccagaacgaatcggacaagcgcggcttcaagctgacccagagctgggcccgcatcgccgacaccacgctggacgtgaccctgggcctggacggcctgcgcgaccgcacccaccaggtgctgctggccagcggcatgaactgggtaccgcagaccacctatcaaagcctgtcgccgctgctgcagctgcactggtggccaaccgaccacctgatgctgtccggcggcctgcgctacgaaaagggcgagctggaagtaggcgactacaccaccctgccccgctacggcgcacgcaaggtggctggcggcaagccgaccatgagcgagaccctgcccaacttcggcgcggtctggtacatcaatgaccgtctcaacgcctacgcctcgtattcggaaggctacacagtggccgacgtcggccgcgtaccgcgcgcgatcaaccgcgacggccagcgcgtggacaatctgattgatctgtcaccggtggtgtcggacaaccgcgaaatcggcctggagtacgacgatggccggttcagtggcgatattgcgtactacacctctgaatccaagctgggctcggtgctgatctacgatccgggcatcgacgcctatgcggtgcagcgccaggccacccgcgtggaaggcttcgaaagcaacctgcgcctgcgcctgggcgacagccggctgggcctgggatatgcacgcgccaacggccgctacgatgccgacgtcgacggccgcctcgacagcgacctggccggcgtcaacatcgcgccgaaccggctgaccgcgttctgggaacagagctggacaccacagctgagcacccgcctgcaggccagccacgccttcgaccgcaacttcgacctgcgtggcgcgcgggtggcggagttccagggttacaccgcggtggacctgctcgcgcgctacacgctggacaagcacgccttcaccctgggcgtgcagaacctggcgaacaagcagtacatcagctattactcgcagaccacaccgtcaaacccgagctatttctcgggccgtggccgagtgctgacactggggtggcagtaccggtactga

SEQ ID NO: 503473 - DNA, 615 bp, Stenotrophomonas maltophilia
atgaaccgtagcgtcctgatcggactgacctgctgcctgggcctgttggggtgtacgcaggcgggtgggggagccaccaccggcgccgcagcaccggcacagccggccacgaccgaggcgcccatcgaccgctgggatgcactgcggcccgacgaagtgacctaccagcgtccgccgccgcagatcggcctgtcacgcaatggcatggacggggtgggcgggctgatcgatgacaccggctcgggcacgccaccggggcaggagatcgaccattccagcccggatcgcgccaagcagttcggctcttcgcgcgtggtcgacgctgtcgacggtcgcgcggtggatctggatggctacgtggtgccgctgggcaccaacgacgcaggactggtcgacgaactgttgttcgtgccgttctacggggcctgcatccatgtgccgccaccgccgccgaaccagatcatccatgtgaccctggccacgccgatcgcactgggcaacctgtgggatccgtaccggttggccggtcgcctgcaggtcaagcgcttcgatgcggatatcgccagcgcgtcctacgacgccacagcggcgacgctgacggcgatccacaactga

SEQ ID NO: 503474 - DNA, 681 bp, Stenotrophomonas maltophilia
gtgatcgccctggaggatgtgcagttcggctatgcaacacgcctggtgctggatatcccgcaactgctgatagagcagggcagcagcgtgctgttgcgtggagtgagcggtggcggcaagagcaccttgctcggcctgctggccggcgtcctgcttcccggcagggggcgcgtcgaagtggccggtcacgcgctgcagatgatgcggggtgccgcgcgtgatcgcttccgtgccgatcagctgggcgtgatcttccagcagttcaacctgctgccgttcctcagcgtgcgcgacaacatcgcgctgggcctgcgcttttctccggtgcgcagtgagcgcatcagcgggccgctggacgacgagatcctgcgtctgctggaagcgctgcagctggatccggcgttgtccaagcgtgcggccggtaccttgagtgtcggccagcagcaacgcgtggccgccgcacgcgccctgatcggccgccccgcagtactgctggccgacgagccgacctcggcgctggatcgccaagccgcgaccgccttcctgcagctgatgtccgcacagtgccgggccgccggtaccacggtgctggtggtcagccacgatgaaagcctgcagccgttgttcgaccgcaccatttcactgtccgagatcaaccaggcaggtggcacccatgcttga

SEQ ID NO: 503475 - DNA, 534 bp, Stenotrophomonas maltophilia
atgaagcttcctgctgctcttttcctgctgctggctgccaacgcggcgcaggcacacgatgtccgccagcacgcaccgcacgtgcacggccaggccaccgtcgatctcgcactcgaccagggaaccctggagttcgccctgcaggcgccgggtatcggcattcttgatttcgagcgaccgcccgccaacgcgaccgagcaggcggcactgtcgcgcgccacggcattgctgaagggcggcagctgggtcaccctgcccaccgccgccaactgccgcctggccagcagtgacgccagtgccgaaggcttcgctgcgaccgccgctgtgccagcggccgggcaacatcgccacgccggtttcactgccaacctgcagtatcgctgcacgaatccgagtgcactgcgcgccctggtcgtgcgcctgccggtgctgttccccgggttgcacgaagtcatcgtcaacagtgcgaccgccaacggccaggaccgcagcgtgctgagtgccgacaacctgcgcgtggtgctggcgccgtga

SEQ ID NO: 503476 - DNA, 2190 bp, Stenotrophomonas maltophilia
ttgaagtcgtccacgcctgctgccgcgctcatcgcagcatccctgctcgttcctgccttgcccgcccttgcccagcaggctgacccggccacgctcgacggtgtccgcgtcaccggttccaagcgcgataccccttacctgaagagcgatctgtcggtgacggtgctcgacaggcaggccctgaaagaagcgggcgtcaccgagttccgtgacctcgacaagctcgcgccgaacgtcaagttcaatgcgatgggccagctcagcaacatgttcatctcgatccgcggcatcgagtccaatccattcctggtcaatcgtgcctcggtctacatcgatggcattccgttccgcgagctgagcaatgccgtgctcaaccaggtcgagtcggtggaggtgctgcgcggcccgcagggcacgctgtacggcgccaacagcgaatccggcctggtactggtgcgcacacgcggcccggctgatgcacgcgagggcgagatcaatgtgcgcagcacctggttcggcaacggcaatggcaccgctctcgacggcttcctggcagggccgctgaacaagacgggcagcctgtccggctcggtggcgttcatgggctccgatgaggacgcctacctgaagaacctcacgccttccggtgcgcgcggcaaggtcggcgaaggctacctgcagggcaagctgcgctggcggccgagcgactacgtttcggtgaacgcgctggcctatcacctgcgcacccgcgcgccgggcatgttcgagtatgaatacctgccgctggataccggcctctacaaccgcacctacggcacatcgctcaatggcggccgccgtgccggtgacttcacctacatcaacgacgcgcccaagcgcaccgaaaaggacgaaacggtggccggcctcagtgcgcaatggcagctgcaggccggcacgctggacgtggccgcttcctggcgggacgaggaggtgacctcggccggctacgacttcgacatgaccaacagcccggcattggccggtcgcatctacgacaggaagaaggaatggacggccgaggcgcgcttcagctcgcccagcgaccaggcgctgacctggatggccggtgtgtcgacctaccgcaacagcaaggattcgatcctcggcaccttcgtcggcccggcgctgcacgggctggacagctacaacctggcgccgcggcagacctccaagggcgaggactacagcgtcttcgccaccgccagctataccttcccggcggtgccgaagctgaccgccagcgccggcctgcgccatgagcaggcacggcgctccaccgaacagcgtgccggtgcgctggatctgggcgccggtggccgcgtgctgtaccgcgatgccgcgctggcgcataccttctcggccacgctgccgcgggtgtcgctgcgctacgacgccactgacgacgtttccttctacgcggcctcggccaagggctacattccgggtggcttcaatctggctgcggcgcagagcgatgtggtcaacgacaaggtgctgcgctacgagtccgaacgcatgtggagccatgagctgggcttcaagatgaacctggccggcggtcgtggccatatcgggggtgcgctgttccacatcacctcggacaactggcaggagatccaggtggccaccgatgccaacggccgcccgatctcgtcggactacgtaggttcggatgcctcgatccgttcgcgtggtgccgagctggagggcgtgttcgaagtgctgccgggcttcaccctgatggcgaatgtgggctacgtcgatgcgaagtacaccaagctgtgggtcagcgtggaccagaacctggatggcaagcgggtcaagctgacccctcattacactggctatctggcggcgcgctatcagttcgaatcgggcatctatgctcggctggaatcgcagttcaccggctccagtgcactggatgaacgcaaccgcgcgttccagccggcagtggccgtgctcggtgctcagctgggctatgagaccgggccgtggagcgcgcgggtgttcgtgcagaacctgaccaacaagcgccgcatcaatggcctgatcttcgacaacctggccttcgggcgcgacggcaactattacggcccggtcgacagcccgcgcatcttcggcgcggaagtgggttaccgcttctga

SEQ ID NO: 503477 - DNA, 855 bp, Stenotrophomonas maltophilia
atgcccgccctcgccgaccagctgctgcaggaaacccggtcgcaggcccctgcggcctacgccagcaacgatggtgcggtggtgctgctgcgccatcgcttcgatgccagcgaaggcgagatgggacatccgcaccagcttcgcctgggcctggccgtggacggcggcggacggctgcagcagcgcaccctcaacggcctgctgcaggcgccgtggcggcccagccagttcaatctggtgctgccgggagacaccggcacctatgccagccccgcggtcgatctgctcggcatcgccatcgatacccgcctgcatccgcaggatccgcagcggttgcaacacctgcagccgctggcggcgcggctgcaccgcgacccggtgattacttcggtgctgcaggcgttgtggtgcagcgcgcaggctgatgtttgcctgcccggcttcctcgagcatggcgcgcaggtgctgctgcaccgcctgggtcagcttgccggtcagccgcgccaggcgcgtggcacggtgtccccactgtcggcccgacggttgcggcaactggaggcctacatcgacgcgcaacacggccaggcgctgaccgttccacagctggccgctgcagtgcagatggaggtcgcgacgttcggccgcgcgctgcgtgcggccactggcctgccgccctatgcgttcctgaccgagcaccgcatgcagctggcgcgcgccgaactcgcgcagggccggcgtgtcaccgaggttgcgctggccagtggctacgccaatcccagcaagttcagcgcggccttccggcgtgtggtcggttgttcgccgtcagcatggatcgcgcagtcacgggcccggtag

SEQ ID NO: 503478 - DNA, 885 bp, Stenotrophomonas maltophilia
gtggccgagctttcgccgtatgcgctgcggctggcgctgtatctggccctgatgctgctgttcgggcggatgctgttcgtccgccccggactgccgcgcagcgtctcgctggccctcgttctggtggcactggtgctggtcggcatcgatgtggtcacccgtttgtccggcgtgcttggcatatcaccggtcgacatcgatggcgagacagcgcgctggtttcttaccggtacgccggtgggcgaggcgggactgctgcgcatcctggccctgctggcaatgctgccgctgctggcagtcaatcgcccggtacagggcctgcgccgccccgcactgctggcactctcggcggtgaccctggccagcctcgcctggaacggccacgccgctgctggcgatggggtcgctggccggctgcgtcttgctgccggcatcgtgcacctgctggcggccggtgcctggatcggtgcgatcgccgccatcgtacagttggcactgcggcggcaagggccgagcctgcgcgagcgcacccacgaactatggcaggccgcgcacggcttcgccctgcccggcacgatcatcgtcgccctgctggcgatgaccggcacctatacctatgtcgatctcggcggttccatacagaccctgaccggcgccgcgcatggacgctggctgctgctcaagctggcactggtgggtggcatgctgggcctggccgcgctgcatcgctggcggctggtgccggcgctggcggtctccatccggggtggctggcagcccaggccactgcgttcgctccgccacagtctggcctgcgaatcggtactggccgtgctggtgctggcctgtgtcgcgattctcggcacgctggatccgctggcatga

SEQ ID NO: 503479 - DNA, 324 bp, Stenotrophomonas maltophilia
atgccgttcatgcgtgatcaccttccgaacgagcccacctctgcgggggtggcggcgcaggctgggtggcaggtgctggagttcggtgcgccctggtgcggtcattgccaggccgcgcagcccgcgttgcaggccttcgtcgaagcgaacgatctgccgcattggaagatcgaggatggcaagggaaggccattggggcgagcgttcaaggtgaagctgtggccgacagtggtgctgctgcgcgatggagaagaggtcgcgcgggtggtgaggccgctgcacagcgcggacctcatgtcgttgcagtacgcgattcccggttga

SEQ ID NO: 503480 - DNA, 228 bp, Stenotrophomonas maltophilia
gtgcacgctggctcactgttccacgtctgcttcgccaccagcctggccattgccggctgcgccggatgcatccaccagttcctgcagggccaaccgtttttcgccctggccatcatgctctcggtgcttaccatgatcggcgccgcactggtcacgcggaaactggcactgccgggcgccttggcgatggcctgcacggtgttcggtttgctggcgaagtcggcctga

SEQ ID NO: 503481 - DNA, 447 bp, Stenotrophomonas maltophilia
atgcagcgtgtgccgcgtggtttcaccctgctggaactgatggtggtgctggtgatcatcggcatctgcacggcgggcatcggccttggcctgggcagcctgctcgacccgggccggcagctgcggcaggaaggcgaacgactggcgcagcgcctgcaggtggcgcgcgacgaggcccgcatcgatggccgccccctgcgttggcaggccgacgcagccggctatcgtttcagccgcctcgaaggcagccgctgggtcaccgttgaacgcgatgatctgctgcgtccacagaagtggcaggctgcaggcatcgcggtgcagcccaccaacgccatcgagctgagcccggagtggatcggtaccgcctgggagcttggactgtcgctggagggccgcgcactgcgtcttcgtgatgatggcagcggacaattgcaggtcgtgcagtga

SEQ ID NO: 503482 - DNA, 12399 bp, Stenotrophomonas maltophilia
atgtctcacccgcattcgcccaccgcccgtttccctgctgccttgtggcgcagccatccgatggcctgggccgtcgcagtggccctgggcagcgtggtggctccggccactcaggcccaacaggcgttcagccccggctggttcgccgagcgcggtgcggcgcagggcgcggcggcacagagcgggcgcatgcccaatggcgtgccgatccagttccagctacccgcgcagcagcaggatgcggcacggcagaagctgcagcagtcgatcgacaaccttggtacggccgcgcaggccatcgccctgcagcaacgcctgcaggaacaggcacggcaggcgcgccgcgaggcgggcttcgtggtcgccgatggcctgggcaaggatggcctgaaggtcgacgagaatccgctgacccgcggctggatcaacgcccgcgaggcgatccagtcgcaggccgccgacgggcgggtgctggtcaacattgagcagacagccgaccaagcgatcctgaactgggaaaccttcaacattggtggcaacaccacactgaatttcctgcagaaccccgactgggccgtgttgaaccgggtcaacgatcccgccgcaaggcccagccagatccttggccagctgaaggccaatggcacggtgttcgttgccaaccgcaatggcgtggtgttcggcaacaacagccaggtcaatgtccgcaacctggtggcggcggcagcgcgcatcagcgacgcgcagttccgtgagcagggtctgtacagtgccgacgcgaacacctcggcgctgaccgacgccgtaggcaaagtcatggtcgaacgcggtgcgcgcatcaccacgcacgagccgaccacggcaacgcggggcggtggttacgtgctgctggctgggcacagcgtggagaacgcgggccagatcgagacgcgcaaaggccagacccagcttgccgccggcgacagtttcgtgatccgccgtggcgtgggcacggcgcagaacactgcatcgaccacccgtggcaacgagatcgcaccgcgcttcgtcgctgacagcacggccggcagcgttcgcaacagcggtctgatccaggcacgcgagggcgacatcaccctggccggccgcatggtcgaacaggctggcgttgcagtcgcgtccaccacgctaaatcaacgcggtacggtgcacctgttgaactcggcgtccgatgcggcgggcagtgtgaccctggcctccggctcgaccactgcagtactgctggaagacgatggcaagagcagggcgctggacagccagcgcgacgcgctcatcaaggagtccaccgagcaggacaagctgcgcggttccagcaacagcggcaccttcgacaatctttcgcgcctgcaggatcgccgcgagcaatcgcgcatcgaagtcgtctccggcggcgatgtgaacttccaggccggcgcactggcagtggccaccggcggccaggtgatcgccgacgccagccggcgcagctatctggatgatggcgcgcgcgtggacgtctccggtgcggtgggcgtgcaggtggcgatggaaagcaacaacgtcaaggtgaaggtgcagggcaatgagttgcgcgattcgccagacaaccgtgacagcggcaagctgatcagcagcgagttgtggatcgaccgccgccagttgaccgaagtcgccgccggtaccggcggctatgaaggtacgcgctggtatgccggcggcggcctgctggaagtggggggctacctggacaatcaggggcattcgatcagcgaatgggcagcgcagggtggaaccgtccagctggcaggcaaggaagtcgtcagccacgccggttcgcgcatcaatctggccggtggcagcctggatgtgcagtccggtgtggtgcagcagagttggctgcgtggccgcgacgggcagttgtaccggcttgatgatgcaccggccgagatgctgtacgacggtctgtatcagggctatgaagtgaagcaggaacggtggggggtgaccgaatcgttccgcaatccgctggtggcacccacccagcgtttcgacaatggctataccgtgggacgcgatgctggccgtctgctgatctcggcgcccacggctgtcctgcagggccaggtggatacggtggccttccagggcctgcagcagacccgccgcccggaccaggcgcaggaagggtacgtgcaggcacagacggccgcggcccgcaacgcccagctctggctcgggcgtttcgacaacaccggccgaagtgcagtgttcgattcgcagatccgcatcggagcgctccaggccgacacccggtcatggacgttgcaggcgccgatcggggaaacacagcgcaataccgtgtggttggacagtgaggtcctgagcgctcagcgttgggggcaggtggaccttgcttctgcgggccgtatcgacctggatggcacgctcaggttgcaggagggcggtcggcttgggctcactgcaagccgcgtcagcttcggaggaacggtgcagattgccggcgggcaggtggaggccggcaacctgcttccggcgctcggcgggccctcggccctgctgaggtccggacgaggcgcggtggatgttgcggcgggcgcacggatcgatcttggcggcagttggagtaacgcgcttgctgcgccggatggcgaccccgcgcaggcgtggatcgacggtggacagatgcgcttcaacagcagtcacgacatccgtgtgggtgaaggggcagcgattcttgtcgatgccggcggcgcgatcgatgccagtggcaaagggcgcgtaggcaagggcggcagtgtcagcctgctcgcggccagcaccgaggttgccaccgacggcagcgggcggatccgtatcggcgatggcgcacgcttcagcgcgctcggcaatggaagcggcaatttcaccctggcaacaggcggtgcggtgtctatcggcgcgcctggcacggatgcatcggcggcgtcgttgcaactgcagtcagcactgttcaggagtggcttcgccggctatgacatcgccgggcacaacggtttgacggttgaagaaggtacccagctgcaggtggaacgaccggcgctgcgcctggccgagggcgcacagcaggcactgtcccgcgagcagggcgttcaggcctggacgccgtcgctgtatgaggcggatccggccagcgggcgtgtatcgcagcgcggcggcgcgagcctggcactgcgcgcagggcatctgctgtccacggccgagctgcgcgttggcaagggcgcaaggatcgaggtcgatgccggccagacgatcgaactgttcagcgccggcaacctggacgtggctggcagtctgaaggcggccggcggccgtatccgcctggacgaggcattcgatccgaccggtgtgcgtggcgatcaacgccgcgaacgtcgctggacgattgccgagggtgccctgctggacgtgagcggcgatagcgtttccctgcccgacgcgcgcgggacattgcgcggacaggtgcgcaagggcggaatgatcgagatcgggggggcgttggactgggaagaccaggacaacgtacgccacttgccgcccgataccttcgtggtggtggagcgcggtgcgcggctggacgcgtccggtgcttcggcgctgctggacattgatggcagcgggcgcacccgggtggacagcgacggcggcagcatcgtgctgcgcgccggcaatgcgctgtacctgcagggcgacctggacgcagcagcgggcggcgacggcgcgcgcggtggcaccctcggcgttgccttcggtggcggaacctacggcagaacggcaatgaacaaggaagtgctggcgccgagggtgatctcgctgacccagcacgccgcgcagacgaccgacctgcctgcacgccttgagtacggccatgcggcactgtcggtggagcagatcgaggccggtggtttcgatcatctggccctgttcggcgacatccgcgcccagggagatgtcactctgcgcatggaccagagcctgcgcattcagggcttgaacgagcgttacctcggcctcgtcccgagcaacagcgagggcggccgcctgcaactgggcgcgccatatgtccgccttgcgcaggggcgctggtggcagccggccggggaaggcacgttgcgcccactggaggcagcgttcgacagcggccaccagcatcgcctggacgtgagcgccgatctgatcgacctgcgcgacgtcacctggctggcgggatttgatgaggtcgcgctgcgcagccgcggtgacattcgcatgctggccgcggtcgccagtagttcacgggaatccacgcttgcaagcccgggttcgatcgatatcagcgccgcacgcatgtatccggcggcccgggccaagggacgtatcgtggcgggcgtccccgacatcggtccttcaggcctgccgttctggcagaaccccgacgccgtactgcgcatccatggcattgcaggcggcgcgcaaccggcaccggactctgcgttcggaagcctggagctggtggcagcgacggtggtgcagggcggcaatgtgcaggcgccctggggccatgtgcagctgggtggcagggaattcaacgctgatgcggccagccgcgtcgacctgcttgcaggcagcgtgacgtcggtgagcggtgccggcctgcagctgccgtttggcggtaccgtggatggtgtgggctggcgcctcaacggtgccgacttcgatgtgctgggccccggctcgaccaacatcccgatcggtatcgacatcgtcgccaacgccgtcgatggcgtggtgggcagcgtgctcgacgtgtccggcggaggcgagctgtccggcgctgcattcgtggccgggcgcggtggctcggtggacatcctgcggcatgcgctggcggatgcgaacccgcgctaccgcttcagcggcagtgacaatgcggtctacgcgatcatgccgggacgctctggcacgcaggcgccgcaggcggttgctgatggcagcgcggacccgcgcatcggccagcagatcgtcatacctgcgggggtccccggcctcccggccggaacctacacgctgctgccggccagctacgcactgcagaagggcgcattccgcgtcgaagtcggcgccgaacgcgccgtcggcagcaggcaggcagtggcgaccggcacaggctcatggcgtgtcagcgggcaccgggcgcaaagccttggcggtgcagtgtcgccgctgctcaccgatctggtgctgacgccagcggaagcggtgcgccgccatgccagctacaacgaaacgtcctacagcacgttcgtacagggcgtggccgaacggcgtggcgaagcgctgcgctggcggcctacggacgccggcaacctcaacctggcactgggtgagggcgccggacgttcgagtgtgccagccgcgatcttccaaggcgtgtcgcgcttcaacgccggcagcaatgacggacgcgggggcacgctttcggtcaatctgctcacctccaatgacgcgatgttggagattgtcaccgaaggcggcagcgccggcagcggtagcggcgccaccgtcttcgactcggcgctcaatgcgttccgcccggagacgatgctgatcggcggcgtgctgcggcgtgacgcgacgacccattcgctggagggcagggcgcagcacatcgtggtgcgcaacggcgtcaacctgacggcgcaggaagtgcttctgtcggccgcgttcggaggcaagggaatcctggtggagcagggcgcttcgatcgataccttgaccggggcaaatacctcgcgcgtggcacagcccacggcgccctatctggtgtcgggcggcctgcttgccgtgtccaaccagcgcttgacagcgctcactgcgcagggcggcagtgccgccggtccggtggcgatcgacatcggcggatgcgtggtggactgcaatggccagacccggttgctgtcggcaggcagcatcaatgtggtcaccgacggtgccttgaacattggtgattcggtgagctacggcacgcgccagctcggcctgggcatgtcggcgctcaatctcggcagcgccgaggccattgcggcggcagcggcggccggcgccctgccggcgggcatgaccatgaaccaggaggtgttgcagcgattgctgcggggaaacaccgccaccggcgcgccggcgctggaggccctcagcctgaccgcgcgcgatgccatcaatgtcttcggcagcgtggacctggacacccgtgagggcgcaaccggacgcagcagcctgcgcagcctggtgctgggcgcaccggccattcacggttacggcaccgctaccgatcgcgcacgcatcttcgccgatacgctggtctgggacggtacgctggccggcaccacgttgcccggcggtgagcagacccagccggctggcgaggcgatggttggccagcttggccaagggcagctggaaatcaatgcaagggcgctggagctggggcgtgcgccctttacccggcccagttcgtcggtggccgcggatcgccaggtgctcggcttcgccggcgttaccctggcagcatcggatcgcatgttgttctccggcaagggaagtctggatgtcttccagcggcagggcgattacgtggcaggcagcggctggcagttcagcggcggcgcgctggatattgttaccccgctgctgaccggcagtgcgggcgcgcagctggcaatccgcaatggcggtacggtgcagttgcgcggtgctgcggcaacagcgggcagcgatgcgttgggtgcggagttgtccatcacggccgaacgcgttgtgatcgacagccgggtggcgctggcgtccggccggttcgaagccaatgcccgccagggcgtggcgcttggcagcaatgcagtactggacatggcggggcggaaggtcagcctgttcgacgtggacaagtacagttggggcggcgacgtagcgctgtcgagccgtgacggtgacatcgttgccgacgcggcgtcgcgcatcgatctttctgcccgcaacaaccgcggcggccgcttgacggtcgctgcgctgggcgcgcagggcggccgtgtggatctggcaggtacgttgcttggcggagccagcggccgctacgacgccggtggcactgaagtgccctacgacggcggcgagctggtagtgcgtgcacgccagttgcaggacttctccggcctgaacacccggcttaccgccggtggcattaccggtggccggacgttccagttgagcgaaggcgacctggtgatcggcgatgaagtgaaggcacgcaacgtggatatcagcgtcgatggcggcagcctgctcgtcaatggccgcattgatgccagtggcgaacaggtcggcagcattcgcctgtccgcccgcgatgtgctgcgtatcgacggcacattggacgcgcatggcagcgccttgcgcgtcgatagttacggcaagatcatcgacagcccgaaccgggcgatgatcgaactgacctcggccagtggcagcctgcagctgggcgcgacctcatcgatggacctgcgcgccggcacctcggtggccacgggtagcagccctggccagaacgatggccgcgcacgcggcagcgtcaagctcaacgtgccacgcgtgggcagcaacgacgctgcgattgacgtggccagcggactccgcatcgccggtgccgccgatctccaggtcaacgccttccgcagctatgattcggcgccgttggcaagcgctccggacgtgcatggccatcgtccgcaggtgatcaaccagcggtggctggacacggtggtggacccggacaacagccaatggatgaacgccgcgctgaccaatgcgggattgcagcagcgtactgccgcactgggcagctatcgcctgcgccccggcgtgcagatcgtggcgcggaccagcagtgacaacccgcgtggcgatctggtcgtggccggcgatatcgatctgtccggctaccgctacggaccgcagtcgaaccggaccgatccagcgcgccgtggcttcggtgaatcggcagcgctggtgctgcgcgccgaaggcgatatcaacgtctacggcagcatcaacgatggattcgcgccgccgcctgccaatcccgatgaggacggctgggtgctgctggaagggcgcagtgccggtacgcccaacacggcgttcggtggcgacctgatcgtgcccggtgagggtgtccagttgcagcgcggcaccgaattccgtgccggcgccacgctgaactatgcactgcccttcgaggccgtgaccctgccggccggaaccgtgctgcctgcggagatgcggctgtcgggaccgttgctgctgccggccggtaccgtgctgggcgcagcagtgacgacggcgggtggcgaggtggttgcggctggaaccgtgctggcccaggcattgtcgttgcaggcgggtgcgcgcctgggcgccggcttccggctgcgcacgccggcgccggtggccgcacaggtgtggccggccggcgtcgcgctgccgatggcgatgaagctgtcaggcgcactggacctgcacgccggcgccatcatcccgtcgatgaccaaggtggagctggccggcgatgcgccggtgaagctgcgaacggccgacgccagcgggcgccagggacgcaactgggcgctggcggcgatgctgcccgaaggcaccacctcgtgggatctgactgcagtggccggtgccgatacgaccgctgccgatccgcgtacccgcagctggggaagtgacggcagcatcgtgctggccgacagccactacagcaccatcgggacggtgaccaagacgacggaatggaagggtgatcgaatcgtcaatttggaaggttctctgtactggtggggcgatgagagtctggccggaaagtcacctgccgaggtggccgcgatcatcgggaccaccgaggcggagatctgtggcgcaggcgccttctgcggcccggccccgcgcctggtggacaaggaaggctcgctggcatggtggggcgatgaatcctgggtcggccgcccggctacggaactgggcgccgagatgggcatgtcggaggaagagatctgcgcggcaatgggctactgctacggcggcggtacgcttaccgaggtgaccacctacggcaagcgcctgggctcgccagcttggagcgtgctgcgtaccggcaagggtgatctggcactgctggccgcgcaggacgtgcgcatgaagtccggcttcggcgtgtacaccgcaggtgcgccgacgctactgggcgatggcagcgacccccagttcaatccggtgcgtacggctgcgccctggcactcctcgctgctgggcaggaaccaggtctcgggcaactatgatgcggcgctggccagttaccgtgcgtggtatcccgaccatggcggcgatgtcagggttgaagctggacgcgacatcatcggcgacgcctggaccgcccggtccgaatccggtacggcgcagcgcgaccaggccgggcattcaagcgcagccgtgggcggctggttgtggcggcagggtacgggcaccaccgaaggcgtccaggcaacacccacgagctggtggatcaacttcggcacgtacagcaccgtgggcgccgaagcggacgcagctccccgcatggtcgggttcaccggcttcggcacgttgggaggcggcaatctgtcactggaagcgggccgccacgcgggcgtgctcgacccgatgggcaatgccctggggctgttgaccgcgcctcattccagcgcgattgttgctgcggtcgggtcgaccgggcgcgtcagcaatggtgagctgcatctgaccggtggcggcgacctgaccctgcgcagtggcggtgcgttgaatcctggcctgcgcgccagcgcgcagcagccggagagtttcctgcaggatctggatctcaatggcgcggtgaccaacctgcgcggcagcaccctgctgcaggcggcacgcatcggtggcctcagcgcgatacagagcagctacggaacgctgggcctgatggatccgttcgtggcggacgccccggtggcgatggcggggcccctgctcattctgggtgattccactgcccgcctgcaggcccgtggtgacattgttctcggtggcgccgcagatgcagggcgtgtaccgacggccaactacaacgacgttgttctgggcgatggccagcatgcagctggcacgacgtggttctcgctctggacccgaggcacggcactggacctgttctcggcaggcggaaatctcgcacccagcctggccggaagtctgcatgcaaccggtagcaacatgttcgctgaaggcatcgcgctgcgcgagcaatccgttcccgccagcatcaattactggctgtatccgtccaggttcagcgcggtggcagccagtggtgacatcatcagcgccccgcttcgaggtctcggaccaggggcgactacgggcgatgtgatcctgctcgcgccttcggccagcggccagctcgatgttctggccggaggctcgatccatgccgcgatcaacgccaccggcattgcgcgttccggtagcgacgcccgcctgcctggtccgtttgatcctgcattcatggcccagcggggcgccagcctgacccgggtcggccacaatctctccgacgatggggtgcagggagcggatccgtcggcgaacctgcccttgttcgcgttcggccccagtactccgaccacgggtgcgctgacgtcccggcccacgtcgcccagccgcttctatgccgttgccggtgacatcatcgggttgggcagcggcgggcgcaggcaattgaggcggaacatcggcgaggagagccggacactgttcgactggtacgaagcgggctcggccgtacagctgcgcgccggtcgcgacgtgatcaatgcgaacgtcaccgcgctcaacaccagcggtaccgatatcagcgggatcgaggcgggccgggacatcatccgcagcaacctgacggtggccggccccggcaacgttgaagtgagtgcgggccggcagctgcgccaggaagaggccggaagcatcgtgagcctgggtggcgtcgtccagggcgatgcccgtcccggtgccagcatcgcagtgactgccggcaatcagggcattgacttcgatgcactgcgcacgcgctacctggacccggccaacctggccgacccggcgcagtcgctggcatcgcagcccggcaaggcggtgaagatctatgacaaggagttgaagcagtggctgcagcagcgcttcggcaccgctgccgaaggtacggatgcgctggctgcgttcgatgcgttgccgcaggaacagcagcgcatcttcctgcgccagatctactacgccgagctgcgcgaaggtggtcgtgagtacaccaatgcagaagggccgcgtttcggttcctatctgcgcgggcgcgaagcgatcgccacgctgatgccggacaaggatgccaatggcgcaacgatcaaccgtactggcgatattctgatgtatggcggctccggtgtgcgcaccgaagcgggtggcaatatcgagctgatggcaccgggcggacagatcgtggtgggtgtgcagggcgtggtgccaccggccagtgccgggctggtgacccaagggcagggtgacatccggctgttcagccaggacagcgtgctgttgggcctgtcgcgggtgatgacgacgttcggcggtgacatcctggcctggtcggagcagggcgacatcaatgccggtcgcggttcgcagaccaccttgttgtacacgccaccgcgtcgcgtctatgacggctggggcaatgtgatcctgtcgccgcaggctcccgccagtggcgcaggcatcgccaccttgaaccccatcgccgaagtgccgccgggcgacgtcgacctgatcgcgccgctgggcaccatcgacgcgggcgaagcaggcatacgagtctcgggcaacatcaacctggcagcgctgcaggtgctcaacgccgccaacatccaggtgcagggcgagagcaagggcctgccggtgttggccacggtgaacgtcaatgcgctggcgtcggccagtgctgcagcgaacagtgccagccaggccgcacaggacgtgatgcgcaagaccaaggacgacgcacggcgcaaccagccgtcagtgatcagcgtgcagattctcggcttcggcggcggcaccagcagcattgcgccgccggcgcgcggcacgaccgccaacagcggctacgacgccaacagcgccttccagttcccgcaggcaagccgcgacgaaggcacgcagcgccgatag

SEQ ID NO: 503483 - DNA, 1188 bp, Stenotrophomonas maltophilia
atgaacttgctattgaaggctttctggctcgccagttgcgtgttggtcggaacgctagaagcaaatgcccaaattcttgtccagggcggcggtgcgacaatgcccgcggccctgtaccaagggagtccggacagcattcttccgacgtcgttcagctatgctcccaggggctcgggcgtcggcaagcgggcattcctgagcaatgacccatcactgttttcgacgacggggactgtccactttgctggcagcgatgcggtactgagcagcaccgagttgtacagctacaacagcaccttcaaccgggctggtgatccaacccgttatggggcattgatccagattcccgttgcgctggctccggtgatcattcccttcaacaagcctggttcagcaattgacctgtcggtcacccggatctgcgggatattctccggcaagatcaccaactggtcgagcatcgacagcgcccgcaccggcactattcgggttgtctaccgtggcgagagcagcggcgccactgaattgctggcccgtttcctgaccagcgcctgccagccggccgatgtctcaggcaccacgctgaagctgaccaacggcgtgccggcgttctcggtgcagtcgaccttcgccaatcttttcactagtgttcccgagaactttgttgcagctccggcgtccggtgacgcggcggtgtacgccgccatttttgcgaccgtcggaacaatgggatacacaggtccagacctgtctcttgatctctcggatgctactcgagttgcacaggtcaagggcttctctccaaaggacgtgagtactcaggcgacactggataacgtgccaccgccggccggtgccgctgccgagaacccagcgaactgggtgccgtggttcggcaacccgagctcaggatatccaatcgtgggtaccaccaatctcctgtttgggcagtgctacaaggatgtactggtggctgcaagaattcgcggcgggcttcttcgaatctatggcagcaccgtggtcaacggtgtcgaacagggcccgcaggatcccgccatcgttgcgcacaggttcattccgctgaataaagcctggcgcgatgcggtccgttcccgcttcgtcaacgccagcaacgctggagcattgaacaatccgagcacctgctcgggaatcggccgtccgctgtaa

SEQ ID NO: 503484 - DNA, 1194 bp, Stenotrophomonas maltophilia
atgaacaagtacaagaccctggccgcgctggttgccaccgcgctgctcgccaccgccggtgccgcttcggcgcagactgccgtcaccggtggcggcgcctcgctgccggccgacctctacaagggttcggctgacagcatcctgccggccaacttcagctacgccgtgaccggctcgggtaccggcaagaaggccttcctggaaaacaactcggcgctgttctccaccaccggtaccgtgcacttcgccggtagcgattcggtgctgagcagcaccgagctgaacacctacaacagcacctacaacgtgtccggcgatgccaaccgctacggcgccctggtacagatcccgtcggtggccacctcggtcacgattccgttcaacaaggccggttcggccgttgacctgtcggtgacccagatctgcggcatcttctccggcaagatcaacaactggagccagctggcgggcctgggccgtaccggtgccatccaggttgtctaccgtggcgagagcagcggcaccagcgaactgctgacccgcttcctgaccagcgcctgccagccggctgacgtgtcgggcaccaacctgaagctggccaacggcgtgccggcgttctcggtgcagtcgaccttcgccaacctgttcaccagcgtgccgtcgaacttcgtcgctgccccggccaccggcggcaccgcgctgtacaacgctgtctatgccgttgacggccgcgtcggctacgtcggcccggacgtcatcccgagcctgaccgatgccaccaaggtcgccaaggtcaagagcttctcgccggatgaagtgagcgtgcaggcgactctggagaccgctgctccgccgaccggcgctgctgcagagaaccccgccaactgggtgccggtgttcggcaacccgagcgcgggctatccgatcgctggctacaccaacttcgtgttcggccagtgctacaagaacgccaccgtgggcgccaatgtgcgcggcttcctgacccgccattacggcagcaccgtggtcaacggtgtggagcagggcccgaacgacgacgccatccgcgcgcacaagttcatcccgctgaccaaggcctggcgtgatgccgtccgcgctcgcttcgccaccgccaccaacgccggtgcggtgaacaatccgagcacctgctcgggaatcggccgtccgctgtaa

SEQ ID NO: 503485 - DNA, 1164 bp, Stenotrophomonas maltophilia
atgagcgtgcagctgagggtgcgcctgccggcgctggaacacctgcgcgccgacagtacggtcgagtgggcgcagatgcacaagggtggggtgctggcccatggccgcgagggcttggccgtgctcgggcaacgtcatccgcaggccgaggtgctggcctgtctcgatccgcaggagctgatcctgctggaactgcagctgccgccactgtcgggccgcaggctgcaggccgcactgcagggcgaagtagaggcgatgctgctggatgacctgcaggaggtcgcgttggcacacggtgcgcaggcggcggacggcacggttccggtggcctggctcggccagcaggcagtcctgcaggcgcaacagctgctggcctcgtgcgcactgcagcttcaggcgctgtatccgacgccgctgctgctgccgtggcagaacggccaggcaacgctgcaggctgacggtgagcatctgctggtgcgctgcgggcgcgatcgtggttttgtgcagtggtgcggtgggcgcgacacggcggcggtgctgcagtcgctcgcgacgcgtcttcagcaatccggggtgcaggccgtgcagtggatcgacagcgtgccgttggcgtggccggagaacctgccggccaccgtggtcgcgcatgaacggcaggccagcggacccgtgccagcgtggtcgttgccactgccgggtcgcagcaggcaggcaccacgcgtggcgatcggcctcgcattggcggcggtgttgctggctgcgcttgggctgcagctgcaggtctcgcgctggcgcagcgagggcgaggcgttgcagcaggacatggtgcggcagttcagctcgcactttccggagatcaccgatgtggtggacccggtgctgcaggcgcggcgcgcgctggccgtgccgttgccggcgccgccgttgccaccggtgcagcggcaggtcgcaacgacgctgcaggcaataccggagttgggcggccaggtgcgcggcctgcactatcaacccggccagctggaactggagctggacgccgatgcgcaggcggtagccgatgacgcgcagcggctggagcagtggcagcaggcggcgcaggcgcagggcctgcagctggcgcgcgaggccggtggacgcctgcgggtgagcgggggcggacagtga

SEQ ID NO: 503486 - DNA, 549 bp, Stenotrophomonas maltophilia
atgaatggaaccatcaacggcatcgtgctggccggcggcctgtccagccggatggggcgagacaaggcgctgctgccgtggcaggggcgcaccctgctggaacacatgcgtggcctgctgctgcaggccggcgccgaacgggtgtgggtgagcggcgactatccggccttcggcggcatccccgatcaggtggcgcgctgcggtcccttgggtggactgcacagcgtgacgcagcagatgcccgatagcccggcctgggtggtagcggtggatacgccgttgctgacgccacggctgctgcaacggctggctgccgaggggcggggcgcgtgcacgatctttgacgggcatccctttcccatgcggttgaatgtggacaatgccactcgtagcgtgctggccgcgatgttggatgatgcggacgggccgtgctcggtacaggccttccagcgccgcctgcagatgcacgcgctgctgctggaaagcgttgacgaagcctgtctggtcaactgcaatacccccgaacaatgggaggatgttgcgtcatga

SEQ ID NO: 503487 - DNA, 714 bp, Stenotrophomonas maltophilia
atgcgtcagacgaaggagacctccggcttggtgctggtggtcgaagacaaccgcaacatctccgagatgatcggggaatacctggaaggtcgcggcttcgaagtcgactatgcacaggacggcctggatggctaccgccttgcggcggaaaacagctatgacgtcgtggtgctcgacttgatgttgccgcgcctggatggcatcgaagtgtgccgtcgcctgcgcaacgatgcgcgcaagtccaccccggtgctgatgctcacggcacgcgacacgctggacgacaagctcaccggcctcggtttcggcgccgatgactacctgaccaagccgttcgcgatccaggagctggaagcccgcctgcgcgcgctgatccgccgcgagcgtcgccaggtcggttcggaagtgctgaaggtcgccgacctggtgctcgatccggtcagcatgcgtgccacccgtgccggtaccgagctgcagctgtcgccgatcggcctgcgcctgctgaccatcctgatgcgcgaatcgccgcgcgtggtcacccgccaggagatcgaacgcgagatctggggcaacggcctgccggattcggacaccctgcgcagccacctgtacaacctgcgcaagatcatcgacaagccgttcgaccgtccgctgctgcataccgtgcagagtgccggctaccgcattgccgacatcgcccagccgatggcctga

SEQ ID NO: 503488 - DNA, 492 bp, Stenotrophomonas maltophilia
atgaagatgaaatacggcctctgtctgcgcatccttctggccagttccccgctgctcaccgcggtgctgcccgcaggcgcccgcgcggcggagggctatgttcctgacgcggtgcaggccttcgtgctggaaacggtgctggctgatgaagcgcaagccttccacgagggccacccgacctatctggttccggtcagcatgtcacgcacgcgcagcgatgccgacgtggtggccgacctgcgtgctgagttcgaccggttctaccggggccaaccgaagccgagaaaggaagtggcgcacatggcgatcctcgtcgcacagaccgcgctgctgctgccggaccgtagcgcctgcagcacggatcgagtgcgttgccaccaagctgccatgggcgtccgcacccgcgatgacgaggccagcctgcaggctaccctgcgtgccttccaggacgccgggctggacctgaccaccttgagtgggccggcgtcctga

SEQ ID NO: 503489 - DNA, 504 bp, Stenotrophomonas maltophilia
atgcgctggccgtggtctgcagcaccgataccccggctcgacgatgcacaggccgatgtgctgctgcagaacctgttgtcgcgcgatgcaacgcgcatcaccgatgccgcgcgtacggtcgctcggctgttcagcgcctcatcgttggacgcgttggttgcgcatgtggatacgatcgaacgcagctgccaaggcgtcgcccttggcggcatgctgatcagcaaccaggcgcacctcaaggcggccctgcaacggctgcgctactggcaggcacgcgaaggctgcctgtgtgcgctctacccatcctatgtgttcttcagccccgagccgctgctggaacaaggtcacgtgcagctgcgtgcacggggcgaagcggaggacggctggggcgaatgctaccggctgacgtgcacctgctgcgcgcagcaatggagcgcgaccgagcgcgaataccactacacctggtgggagtggaagcccgagcccgccctgcagacgccttag

SEQ ID NO: 503490 - DNA, 216 bp, Stenotrophomonas maltophilia
atgcgcgaggcccagcagggaggtgtcgagctgatgctgctgctggatgcgcagggcaagacccaggcgatcatcctgtcccgatccagcggctacccgctgctcgatgcggcggcgctcaagcacgcgcgtgactggcgctacgagcgtgaagcggcaggcaaggcaccaagcatgagcctgatacgcggcacggtcacgttcaagctcaactaa

SEQ ID NO: 503491 - DNA, 1131 bp, Stenotrophomonas maltophilia
atgaaccgcttccgctcccccctgctgtccggcctgctggccgtccttctcctccctgccatggccccatcttccgcgtctgccgcaccatcgcgcgtgctgctcgtcgtcagcagcgaaggccgggaccaagggaagacccgtccgggcttcgagatggacgaatttgcccaggcctggctcatcctcaagcagaacggcttcgacatcgacgtggcaagtccgcgtggcggcgccgtcgaggctgacaagtacaacccctccgaggccttcaacgcagctgtccttgccgattcccaggccatgggcaagcttgccgcgaccgtgcccactgcacaactgcgtgccagcgactaccagggcgtcctggtgatcggcggcaagggtgccatgttcgaccttccggccgacaaggccctgcatgccacgattgccggaatctggcagcagggaggactggtcgcggcggtatgccatggtccggccgcactggcgggtgttcgccttcccgatggccgggccatggtggaaggccgcgccatgaccggattcacggaagaggaagaagcactgttcggcaaacgttgggcgaaggaattcgcgttccagcttgaaccgcgcatgcgcgagctgggcgcacgctggcaggaggcaccgctgatgatgcccaaggtcgtagtcgatggacgcctgctgaccggtcagaacccgttctcgaccgccgcactggctgacgccttcgtgcgcgccagcgggcgtgtgccactggcacgccaggcatggcgcgatgagcgcagcatggcgctggtggagcagcacctgcagcagcgtgatggtcaggcggcgcagatactggcgcagcgcccgtccgaccatcacgtcgagctgatcggcatgctgggtttctaccagctgaaagcagcaaaggacgccactgcaaccgccgacgcgctgtccatcatgcagctggccagcccgcatatggacgagccgaggctgcaggtcgcgatggcagaagcgcactggcgcctgggccggaccgatctggcccgttcgcaggtactggctgtgctggaaaagcagcccggtctggacgaagctaacgctctcctggcccgcatgcagccctga

SEQ ID NO: 503492 - DNA, 690 bp, Stenotrophomonas maltophilia
atggacgccgagcgcctgcgcctgctgttgattgaagacaacctgccgttggcctcggccatcatcgacatgctgcaggcgcatggccatctggtcgatttcgccgctggcggacacgtcgggctgcagttggcgctggcgtcaccgccggatgtgctgctgctcgatatcgggttgccgggcaccgatggtacgacggtctgccgtcggttgcgcgagtgcagtgatcggcacgtccccatcctgatgctgaccgcacgcgatgcgatcgacgacaagctgcagggcttcgctgcgggcgcggatgactatctggtcaagcccttcgacgatgccgagctgctcgcccgctgtctcgccctcgcccgccgccatcgcgtgggtcaaccgaacctcctgcagattgggccgctgagcatcgaccgccgcagcggccaggcctggcgcgcgggattgctgctggagctggcacaggttccgcagcgcatcctgcttgtactggccgaggcctggccgcgaaccgtcacccgcagcgagctcgttcaacgcctgtggggggatgaagcacctccttccgatccgctgcgctcgcatctgtacctgttgcggcaggtactggacaggccgttcgaaggcgagatgctgcgcaccgtccacggtgtcggcttccgtctggaagcttcgccatga

SEQ ID NO: 503493 - DNA, 1293 bp, Stenotrophomonas maltophilia
atgaaaccgcggcccacccagcacctgcgccgtcgactgctgatcacattcacagccttcgcgctgttcaccgccacggtgttcggcacctactcgctggtgttcatgtatgtggtggaagacagcatcttcaacgcccaactggaccgtgaagcacgggctcagctcgcccggcacgcgctcgaaggggactggcgtacacctgccgatgccgcaatccagctgcatcgttcaccctctaccttccccgacgatctgcgcagcgagttcgcaaaggaaccgtggcgctcagagttcgcgggtgtcgatggtcggcactaccatctcaagcggatcgatcccccggccggcgcccgccctgcttggcttgtgtcggaggtcagtgcgcaactggtggtccggccgatccgcgatcgggtcgtaatgctgcttgccggcacagcactgctggtcctgatcgcggcgatcgtcctcggcatctggctcgcccatcgcagcacacgctcgctctacgcgctggtcgaggaggttgaagcgctgcagccggaaccaggccccggcgtgcgcctggcagcacgtttcgacgatgacgagattggcgtgctcgcgcgcgccctggatggattgtccgcacgcgtcgctgccttcgttgcccgcgaacacgcgttcacgcgcgatgccagccacgaactgcgcacacccttgagcgtcatctccagtgcggcaggccagttggccagcgagtcgggcctgtccgagcgtggccgccagcatgtgcagcatatccgtctttcggcactgcagctgcagcaggccattgcggcgctgctggcgctggctcgcgaggaaaccgccagccacggcgctccgccggtcaaacttgtgccgctgctggaacgggtgatcatcgagcagtctccgttgctggctgcacggccggtcgaggtacagctgaccgtgcccgacggggccacgctgcgcgcgcccgaggcggccctgcgcgtagtcctggccaatctggtcggcaatgcgttcgcgcataccgcgcagggccaggtcctgattgcatggcaggacgctcagctgctggtgcacaacacggcaggtgcttcgcccttccttggcaactggcccgagccgcggccattcgacaagcgtgatggcagcgagggcaacggtctgggcctggatatcatgcggcgactgtgcagccactacgggctcgaactggtcatccagcacggcggtggcggggtgatggcccgcttgagggggcagccagccgaggcatga

SEQ ID NO: 503494 - DNA, 1422 bp, Stenotrophomonas maltophilia
atgttgcgactggacgatatagagcttcacttcaacggccgcgcgcttttcagccgcgtggacctgcgcctgcctgccggcgcgcgggtcgccctgatcggcaacaacggtaccggcaagagcagtctgctgcgcatgctggccggacaggcaatgcccagtacggggcagatgcgctggcgcgatggcacatcggttgcctacgtgccacagcacgtgctggatggctcggcgcgcagtggcggcgaacagatgcgccacgccctggcacgtgcgctggacgcagggccggatgtgctgctgctggacgaacccagcaaccacctggaccgcagcgcacggcgctcgctgctcgcccggctacgccagtatcacggcaccttggtgattgcctcacatgacaccgccctgatcgagacgctgtgcgacacgctgtggcatatccacaaccagcgtatcgaggtcttccagggccgctatcacgaccatcagctggaactgcagcgccgtcgcgacgcgctggatcgtaccgtgcgcgacctcgaccgcgcacagtcgcacgcccacgacgcgctcatgcgcgaacaggaacgcgccgcctcctcgcgcaagcgtggcgcggtgaaggtggagcagcgcaaatggggcacggtgcgctcggccaccaagctggagcgcggaaacaccacggcagggcagaaacgccagcagatccgtgaggtacaggaggacatcgccgagcgccgccggcagctgcagcgcgaagaagccatcgcgccgcgcttccagcttccggccggctggcgccgggagggtgtggtggtgcagatcaccgatggcgcgtgcggttacggccctcccctggtcgtgcaacggctccaggtgcgccttgaagtgggcgactgcctgctggtgaccggcgacaacggcagcggcaaatccacctttgcccgggccttgcaggggggcgccgacgtccggcgtgaaggcgactggctgctgccagcaaaggagcaggtggcgctgatcgaccagcactacgacgcattgccagccgaactgacgccggtacaggcgatggccgcatgccagccccaatggacaccgtcggaatgccggctgcacctggccgacttcctgttccgtggcgacgcgcccgcgcagacccctgtgggccgcctgtcgggcggtgaacgcgcgcgcctggccttggccctgatggcggcgcatccccccgcgctgctggtactggacgagcccaccaacaacctggatctgggcctgcgcgcgcacctgctgcaggttctgcacgcctaccccggcaccctggtggtcatctcccacgatgagggtttcatccagtcgctgcagcccacgcagcagttggatctgccagtcggcaacggcgcccgcgcacgctga

SEQ ID NO: 503495 - DNA, 2361 bp, Stenotrophomonas maltophilia
atgcgccgtcattctgcacgcccccagcgctgtaccatgcgccccctcgcccgctgcctgctgttggccctggcggtgcttcccgcaacgcccgtgctggcacgcaacctggatggacagtcggcagccgtgagcaggagcacagcggttgaagcctggaacctgatcaatggctcctctttgacggttgacgggggccgcacggaggagatcaccagcagagactcgctggtaacgctgcgcaatggccgcgtggaagcgctcgccagtggcggcagggcaaacatcgtacttcgaggcacatcaacgctggatatgaccaacagcgcgctgcatgacgggggcgtggaggtcaatgatctttccaatgcacgcattactggaagcaccctgcattcggttggtgccacccgcagtttcagcgtcggcatctcccttgcactgtcgccatccgaatccgatgccaacagcacgctcatcgtcgattcttccttcgtgcgggccgaggcgtcgccaggtgctgtcaacctcagcaacggccacgccgtgcggctgcagcagggcactgccatcctgcagaacggcacgcgcgtggagggcgcaaactccggcgtactgctgttgggtggcacttacagcgctctgctcggccagccgattaccctgcgcgtggacaatgcccaggttgcctcggacaacggcgcggccatctgggtggcgccgcgcaggctggtgcgctacgacatcaccatcgccaacggttcgcagctgtccggcggtgatggccatctgctgctggtgcgtcctgatggcgtagctacgagtgaagccgaagtccatttcaccgtggacgacgcccgtctggccggtgacatcaccttcgataccgaccgcgtcagcggaaacctggacgtcgtgctgcgcaacaaggcgcagattgatgggcgcttcaatggcgtcaccacggccgacatcggcagcgacagcacgtggctgatgaccggcgacagcaccgttggccagctcactctcggcgccgccggcaccatcggcctgagcgacggcaccaccttcaacacgctcaccgtggatgaattcaccggtagcggcggcaccctgctgttcaacaccgtgctgggcgacgacacctcgctgaccgacacactggtgatcaatggggatgccaatggccaagccaacgtacgcgtgctcaatgccggcggcgccggtgccaagaccgaccgcggcatcgagctgatcgatatcggcggcgcgtccaacgcgcagttcgacctggtcggccgcgcggtgggtgggcagtacgagtacttcctggtgaaggacgccaacggcaactggtacctgcgttcggaactcacgactacgccggacccgtgcaagatcgacccgacgctgccggactgcaagcccatcgacccgatcgagcccgtgctgcgcccggaagccggtgcttacctggccaaccagttcgcgctggaccagatgctgcgccatcagtaccgcgaccgccagggcggcgctgcagcggaggatggcattcgtggctgggcgcgcgtggatgcgacccagagcaagctgggcgccgtgaatgaccagctcgacctgcgcgtggaccgctcgcgcctgcagctgggggccgatctgggcgtcttcgacgacggccgcggccgcgtgggcgtgatgggcacgctggcgcagtccagtgccacctcgcgttcgcagctgaccggctacagcgcacgcggcaagctggaaggcggcgcgctgggcgtgtacggcaactgggccaccgatgcgctgtatgtggatgccagcgtgcagcgcggccagttccgcaaccgcgtgcagggcgagggcctggccgaggaacgctatgactcggatatctggcagagctcggtggaagccggttaccgctttggcatcggccagatcggcaacaccgcgctgagcctgcagccggaactgcagttgatctacaccgatgcaaagaccgacgtgcacaccgaaagcaacggcaccgtggtgcgtgccgccggcaacagcggcctgtccggccgcgccggcctgcgcctgcagggtgaatcgcgctcggcagcgggcgcctcggtcagcccgtatctggcggccaactggtaccgcgatggtgcgggcaatggcatcgccttcgacgatgaagtgctgaaggccggcattccgcgcaaccgctatgagctgagtgcgggggcgcgcgtggaattccgttccgggttcagcgcgtggggtgggttgggtgtgatgcgcggcgaccatggctatcgcgaagccacgggtaacctgggcgttgcctatacgtggtga

SEQ ID NO: 503496 - DNA, 510 bp, Stenotrophomonas maltophilia
atgaatactcgatccctacgcctgtgcaccgcctgcatgctgctggcggcagcgcctgtggccctggcagacagcgccacgctcaccatcagcggccgcgtattgccgggcacctgtaccctggccgcgccggccatcacgctcgacccggtcaaggcagatgagatgaccgtgggtgataacaagctcaaggccggtgtcctgaacttcactggctgcgtgggcgttgtgcgggcgcgcctgtccttcgatggcaccgccgccgacggtgacccgctgcgctggaagaacaccgccgccaacgatgcggcggtgggcgtgacggtggcgcttctggcaggcaatgccgggtcgacctatctgaagaagggcgataccaatattccggtggtggtgtctggcaccacggcggcctacccgctgcgcgccggctattacctgcccagcaccagcggcatcaacgccggcctcgtctcgaccgagattgttgtgacggcggactacgaatga

SEQ ID NO: 503497 - DNA, 2508 bp, Stenotrophomonas maltophilia
atgtccatttccctccctcctacccgcgcgcgcgcattggcgatggccatcgctgtggcactggcgcccctgctgacctcgccggccatggcgcaggacgatgccctggaattcagcgatgggttcctgatcggcggtgacgccatcgatctgtcgcgatatgcacgcggcaatccagtcgccccgggtgactacgcggtggacatccggatcaacggcgcgtttgtcgaaagcagcgacatcgcattcatcgaaacccccgccgaagtggccgcgcaggcatgcctgccgcagcggttgctgggcgcgctgtcgctcaagcgcgaactgcgcgaagcactgcgtagcagcgatgcctcctgcctgccgctgcaatcgacagtggcaggcgccacggtttccttcgacagcagcgcgctggtgctcagcatcagcattccccaggcggcgcaggagacgacggcgcgaggctacgtggcagtggaagaccgcgatgcgggcgttaccgccggctttgtcgattacaccgccaaccactaccgcagccgtggcaccgataggtcctatcttggcctgcaggccggtgtgaacctgggtgcctggcggctgcgccaccgggcttcgttcagcgatggcccgcgcggcctgcagcacgatgtgatcagcagccatgcacagcgcgacattcccggttggaacagccagctgtggatcggccagggcaacaccggtggcgaactgttcgaaagcgtggctttcaccggcgtgcgtgtggccaccgacgaacgcatgctgcccgattcgctgcgcggttacgcgccggtggtgcagggcattgccgaaggcaatgcggtggtgcgcatccgccagaacggcaacatcatccacgaaagcaccgtggcccccggtccgttctccatcgaagatctgtaccccaccaacttcgggggcgacctggaggtcactgtcaccgaagccgatggccgcgagcaacgcttcaccgtcaacttttctgctgtgccccaagccctgcgtgcgggtgtcacccgcttttcggccacggccggtgaactgcgcgatggtcgcggcagcctgcagactctgcggttcgccgagggcacctatgcgcgtggcatcagcaatcacttgaccctgctgggcggcgcacagctgggcgagaactacaccgccgtgctggccggcgccgccatcaacacgcccatcggcgcattcggcgccgatatgacccactcgcgcgcgcgccttgatgatcgccaaccgctggctggcaacagcttccgcctgaactaccagcgctatgtggcgcgcacgggtaccaacctcggcctggcggcctaccgttacagtacgcgcggctacatgagcctgggcgacaccgcgcgcgccctgcaggacgattggggctacagcagccgcgcccgccagcgctaccaggtgaacttctcccagcgcgtgggcgagcgcagcacgctctacctcagtgggggccacgtcagctactgggacagttcgcgccgccagaacgatttccagctcggcttccagagcgtggccgggcgggtcaactacggagtttcggcgctgcgctaccggcttggcaacgaccgccaggacacccgctacagcttcaccctcagcgtgccgttggggcgcaccgccaatgcgccgcgcctgaatacccagctcagccatgcggggcagggcaggcaggtacagttgggtctgaacggcacgctgggcgaggaccgcaacctcaactacagcgtgtcggccagcgacgccagcgaaggtgcatcggcacacagtgcctatgtgggctaccagggcagtcacctgaacgcgaatgccggctacagccgaagtgccggcaaccgcagcatcacgctgggcgcggccggcagcgtggtgctgcaccggggcggtatcaacttcggccagccggtgggcgaaggcttcgtgctggtgcaggcacccggtgcacagggcgcgcgcgtgggtaccggtgcggatatccgcatcggccgtaacggctacgcgttgctgccacatgtcagcccgtaccgctggaaccgcatcgatctggatccgtccggcctgccgctggaagtggagctgctgcagacctcgcagcgtgtggcgcctacggctggcggcatcgtgcgggtgccgttcgaggtgcgccgcgaacgcaccttgttcatcgatgccaccgatgccctgggccagccactgccgttcgccgcacgtgtggaagatgacgatggccgaccgctgggcgcggtgggccagggcggggtgatccagctgcgcggggcccacgacgacggcgcattgatcgtcgatccagacgggccgcgccgttgtcggctggagtaccgcatgcctgacgcacccgatgcctatgggctttcctggagccaggcggtgtgtgccccacagccgttgcctgtgcctggcctgcaggccagcgcgccggctgttcattga

SEQ ID NO: 503498 - DNA, 960 bp, Stenotrophomonas maltophilia
atgacgctttcgctgcgagctggcctgtgctctctgctggcgttggctgctgcacctgcgcaggcctgcacccgggtggacccggccgatgccgtgcttgatgatctcagatcactacccaatgtggacctgcccgacaggcccgcgtctggcactcagttgaccgtcgcccccgcattcgactgcggcgcgggtcagcaggccttcatggtgcaggcgtcgctcagcggcctcacctatgaaaaagacatcgtctacgaaggcaccgtataccccgcctaccgcctcagccgccgctctccgttgatcatctttctgcatgtcgtcgatgctgacggcactacttccgttcccctgcgcgttggacagatcgtccgcaaccctggtcggattcttgcagcgccgggcgagctggggcactggctgcaggcgcgctactactttccgggcggcgcgatggaaagcgtgcccagcacttatctgggcaccatcgatatctggcccgaaggcgatccgtcgcaacgctaccgccatggcgtcacgctggggttcaccattccgccgctgacctgcacgctgtcccatgccacgcatgtcctggatgacgtgagcgccgacgagctcgctgccgctggcagcgatgccggtgaatccgcgttcgacatgccactgcagtgtcccagtgccaatgtcgaagtcagcctgagaatgaacgacgccagtggtgccaacggcaccgacgggttacttgccgcggcggcaggttcgacagcgcagggtgtgcagatccagttgctgcgtggcgggcatccggtgcagctcggcgcgggctggctccatggcgattcaagcaagggcagccaggttatccccttcagcgcgcgctaccggcggaacgccgatgcacttcaacccggtcttatccgtggcgaggccgtactgacggccacctatcgatga

SEQ ID NO: 503499 - DNA, 723 bp, Stenotrophomonas maltophilia
atgaccttccgcgcatcgacgtggatgtgcgcgctgctggctgcggccgccgcgctgccggcatcggcggcggtgacgctgcagggcacgcgcatcgtgcacgacatgagcaacggccgcgacgtgaccgtcagggccaccaacagcggcgaactgccggcgatgacccaggtgtggatcgacaccagcgacagccaggcccggccggaacacgtgcgcacaccgttccgcttgaccccggccgacccgcgcctgctgcagcccgaccaggggcaggcgtatcgcatcacgttcgcaccgcgaccgtccgacggcgcactgcccagcgaccgcgaatcggtgttctatttcaacctgctagacataccgcccaagccgaaggacgccgcatcgaagaacctgctgcagtttgcagtgcgcacgcgggtgaagttgttccatcggccggtcggcctgtcgggcaatgcccgagatgcggctggccaactgcagtggcgcgcgcgggcgggcggcctgcaagtgagcaaccccagtgcctaccacgtgacgctgagcacgctgtccctgcccgatggccgcaagctggacgtggacatgattgcccccggtgcgcaggtgaacctgccgcttcctgccggtacagcgatgcccgcgacgctgaaattccagtggctggatgactacggcacgccgcgcgatgccgaagcgaccgtcgttcgctga

SEQ ID NO: 503500 - DNA, 372 bp, Stenotrophomonas maltophilia
atgaaaaagatgatcacgcccctcactcgctacgcgcagttcagcgggcgcgccagccgcagcgagtactggtggtttcagttgttcatcatgatcgtttcgattccgctgtacatgctgagcttctacgccggctacagcggttcgcagggcctggccctgttatcgaccggcctgagcgtggtgatgtggttggcgttcgccttgccgtgcatcgcagcaaccgtccgccgcctgcacgataccgatcgttcgggctggtggttgttgctggcgttcgtaccattcgtcagcctggcgctgctggtgttcctactgctgcccagcactccgggcgacaaccgcttcggtgcgcccgttccgcacgtgtaa

SEQ ID NO: 503501 - DNA, 987 bp, Stenotrophomonas maltophilia
ttgctgactgtgcggacagaacggcagcgcgctgcattttcggacttgttgcatggacgtggcgcgctgctgcaaggattctcatccgctgtccgaagcaacgtcgttactttgatgctcccgcccattctcgtcggcctgctcgccgcgccgctatgcacgtctgccacggcatctggggcgctctcgcttgacagtacatttgaagcatacgtgcgtgtcatcacccaagacgacacgcacgccaaaggcgcactcagagcaagccttcagagagcaggccagcacgggtttcccggcatcgcggaccttgtcgaccagctctacatccatcaggggcctgagggggaaagcggagatcccatcgtaaacgccgtcaaagccagatggcattccatccgatgcgcagaaatcgaccgccatgaaagcgatgcttcagatcgtgtcacgatcagctaccgctgcagtcttcccgatgtctccagcttcttcgaaacctaccgtgagcatcccgagcatttccagacgacaggtggagctgcattcaaccctgctgcgagaggaacgttcgcttctgcactgatccaggctcccgacggtacgtacgagacgaatgccgagttcttccgtgccggcaaggatggcccttgggtcagtaacgacatgatgttcctcgggctggaacttcttcagaaacttctgccgttccgtgcatggaatgaacgcatcctcgcagaggccgtcaccgcccaaacgggcgttgccgcctgtgatctgatgctggacgcacacctcaacagcacacggaggcgggtgccgcctctctccgcgccgtatgaaaagtcgtttcaggacacggtccagcaggcggtgggcgcaatgatgccggaccaggctgctgcgtactgccgcgcccttcatgaacggcaccgcgagaggtggaacaccgatgccagcaaagccgaaccgaggctgagagtccggtga

SEQ ID NO: 503502 - DNA, 909 bp, Stenotrophomonas maltophilia
atgaaaatgaagaaactgttgatgctgccctgcgctctgctctgtactctggccccaactgatccgtccgcccggaccttgccagcgctgcaagaagatgagatcagccagagcattgacgcaagcttccggctctatctctccctgctgctggccgcggatccaatcgcgcgccgcaccctcgatgaacagtggaagggtactttccagccaccaggctatcttgatcgactgcaggaagtgcgggcgcacattggcgatgacgaggccgccgaacgcttcctggtagctgccggctttgaaccacccggcatcggccttgcatcgctggaccggttgagccgcgtggcctgtaccgcgctatccacccgcgcaggccccaccgccaataccgcgacgttgtcctaccgctgctctgtacccgacttgaccccactgtacgcccggcatagggaggcaacaaaggcaggctccacggctgcggctcccgccgcaatggccgacatcttccgccgccagatcgagattctgaagggctccagatcgcgcaccatttccggtgacctggtattttccaggcgaggtgaaggtgcttggctcagtatggatgtcggcagcctggaagcgaagctgctcgatgcattcattccctaccccggctggcagcagcgcatgctggaggaggaagccccaaggcttacaggatccgttgcatgcgattggccgctgcaccggttccgcaactgcgtgagccagcagtcaccccagcgcatcggtcaattgaatgcgctgcagaccgacattctggacgccgcgaagggcatggatccgcacgagcttctggtctactgcaacaatcaggtatcgccgtatcttcattttgagtatggcgggctgacgtgcccatga

SEQ ID NO: 503503 - DNA, 1983 bp, Stenotrophomonas maltophilia
atgcgcaggattgtgctggctgtactgttgggcgcggttgtgggtggggcatcggccgcaacgctggacctggatcgctatctgcggcaggagtcgtttaccgacatcaagatttcaccagggggcgagtacatcgccgcgacggttccgctggaggcgggaaccgcattggcgatctaccgcattgccgacatgaagatggtcggcagcttccgcccgccccgcaacgatcacgcccacaccttcgactgggtcagcaacgagcggctgctggtgggcatggcacagaagttgggcgtgctggaccggccgacgccgaccggtgaactgttcggtatcaatgccaacggcaagggcggcgagctgctggtggggtaccgggttgccgaccagagcctgggcaccaacatcaaggtcaagccggcaggcctggtggccgcctacctcagtgatgagctcaaggacgatgaccgcaacgcgctggtgacggtgatcccgctggtcggcagttcgcatgcgcaggtcgagcgcatggacgtgatcaccggtcgccgcaacgccgtggcgcgcgctcccattcccgatgcggacttcacgaccgatgagcagggcgaggtgcgtttcgcacgcgctgtcgttaccgatggcacgcagaagctctactaccgcacgggcagcaacagcgactgggtcctgctcaatgatgaatccctgagcaagcgcatcgaggcgccgctcggcttctcggccgatggtcgcctggcgtacctgcaggtcgagcaggcagatggacctgatgccattgtcagctgggacccccagagcaatgaacgacgcaccgtgctgcgcgatgggagtgccgacccggcgcgcatcatccggcgccccggcagccgcgtgccggtcggggccctgttccttggcagtgcgccgcgaacggcattcttcgatgacgcctcggacgacgctcgcctgtaccgcagcctcgaagccggcctgggcggagcggtctacatcacctccagcacgcgcgatggcaagacggtgctggtggaaacctggtcaggcagcaatccgggcgatttctatctctatgacacggttggcaagagtgcacggcacctgatcagccgcagcgactggatcgaccccgcgctggcggcggaggtgcgtccgatcagcctgacggcgcgtgatgggcgtccgctgcatggcttccttaccgtcccgcatggccgcgaggcccgtgcgctgccgatggtggtggtgccgcacggaggtccgatcggtgttgccgaccagggcgcctatgacaccgagacacagatgctggcggcggcaggttacgcggtactgcaggtgaatttccgcggctcttccggctatggccgggcccacatgcaggccgcgcgaaagcaatgggggctgtcgatgcaggatgacgtcaccgatgccacgcgctgggcgatcgaacagggcgtggccgacaagaaccgcatctgcatctatggggccagttacggtgcctatgcggcgatgatgggggcggtgcgcgaaccgggcctgtaccagtgcgcggccggctacgtcggcatctacgacctgccgttgatgtacgcccgcggagacatccagagcgacgagtcaggcctggcctacctgcggaactggctgggatcgcccaaggatcttgcagagcgttccccggtgaatctggccgcgcaggtgcgggtgccggtattcctggccgcgggtggccaggatcaacgtgcgccgatcgtgcacagcgaacgcatggaagctgcgttgaagaaggccggcacgccggtggaaaccctgtacgtcaagaatgaagggcatggtttctattcccctgccaaccaacgtgcgtactacagcaggttgctggccttcctctcgcgcagcctgggcggccaggtggccgggcaggccacgcctgcggagaagagcagcgcgccctga

SEQ ID NO: 503504 - DNA, 735 bp, Stenotrophomonas maltophilia
atggctgagtcgctggccaccctgcaacggcgttgggccgaccatgtgcgcgacccatcaatgcccgcgcccgatggcgtcgaggcgcgccggctggcggtgtaccgccgcctgtgcatcgacagcctggacaccctgctggctggcagcctgccacgcctgcaacaccagttgggcatgccgcgctggcgcgagaccgtggagcactactacgccagccatacctgtcgcaccccgttgttcccacggatcgccggcgagttcgcggcctggctggcgatgcaggacgcgctggcactgccggcctgggtagcggaactggcgcactacgagagcacgcaacagtcgctgcacattgaagcgcgcgccgccgggcggccgctgcagcgcgttccggtggacagtgatgtgctggcggtttcgccgctggtgcgggtgcttggctaccagtggccggtacatgtggacgaggacctggagcgggtgttgagcacggctccaacgctgctggtgatccagcgcctcgccgatttcagcctgcaggtcgaggaactgtcaccgctggcctacgcgctgctatcggtcttcggtgacgacggcgcgcctgtggatgaggcactgcagctgctgtccgaaacacatggcgtggcaacggacgcattgcgcgtggtctgcctgcgcgttctgagcgagctgctcatggcaggcgtgctggtcgcattgcctgctttctga

SEQ ID NO: 503505 - DNA, 405 bp, Stenotrophomonas maltophilia
atgtcccatccccgcgcacccatggaacgtctgatccgcgccaatgcggacgagatcaatcggctgcgccaagccatccgcgaagccgctggcgcgcgctggcgtggcccggaagtaatgcagcggcacgcggcagcctgcgcggaatacaaccagcgctatgaacagcttgctttcccggggggctacgccaacgcgctgaagcaacttgccgaacgcgatccagatacggtggatgtcgcgctgaccttccttgaggtgcgcccgtacttcttccgttccggatatatgtggaagacgctgctgaagcgtgtgcaacgggcaccgatgggtgtgaagcagcaggcccggatgcagaagatcctcgatgcctacgctgcctatcgcgccacacgtgacggctga

SEQ ID NO: 503506 - DNA, 504 bp, Stenotrophomonas maltophilia
gtgcttgagattccaaccctgcacaccgtgcgcctgcggctgcgtccacagcagctggatgacttcggcgtctatgccgcgttcctggcctcgccgcgtgcgcggggcatgggcgggccgttcggggaggtggcggcgtgggggcagttctgccatgacctcgccagctggcatctgttcggccatggcgcgttgatgatcgagcgtgccgatacgggagcctgcatcggccaggtcgggatcaatcatggcccgctgtttcctgaaaaggagctgggctggttgctgtacgacggccatgaagggcagggctttgccactgaagcggccggtgcactacgcgattgggcgttcgtggtggtgcggctgccgacgctggtcagctacatggcgccggacaacctggcatcgcaggccgtcgcgcggcgcctgggcggggtgctggatgcgaatgccgcgcgcagcgatgcggatgatctggtctaccgctacagcacccggtag

SEQ ID NO: 503507 - DNA, 438 bp, Stenotrophomonas maltophilia
atgaccattcgccccgtcgttgctgcagcgctgctggccgggatgctggccggctgtagctccacgtcgtcgcagaccgctgcggatgcgccacgccacccctcggttgccgccgacctgagcccggtgccggctttcaccggcggcggtgcgggttggagcattgagatcgcctccaccggccagggcaaccacgatgccagcctcagcgctgacggccgtacccacaagggcacgctgcgctatccggggcagccggccgatgcaccgagctcgctgatcgtgctcaacggcgagcttggccagcagcccgccatcgtcgagatcaagcgtgggtcgtgccgcactgccgaaggtgtggacaccctggccagcgtgcaggtgacgatggaagggcagccgcagcgccgcggttgtggccacctggccgtgtactga

SEQ ID NO: 503508 - DNA, 849 bp, Stenotrophomonas maltophilia
atgaaaaagacacgtcagttgcgcgatctgctccgccagggcagcgtgattgcgccaggtgcattcgatggattgtcggcacgcctggtggagctggccggcttcgatgcggtctatgccagcggcggcgccattgcgcgttcggccggcgtgccggacatcggcctgctcggcctcagcgaagtgcttgcgcaggttgaacggatcgtcgatgcctgcgacctgccggtgatcgccgacgctgacaccggcttcggcggcaccgcgaatgttgaacgcacggtgcgcgcgttcgaaagggcaggcgttgccgccctgcatatcgaggaccaggccttccccaagcgctgcggacatctggatgacaagacgctggtcgacgcgggccagatgtgcacgaagatccgtgtcgcctgccagtcgcggatcgacccggagttgatgatcatcgcgcgtaccgatgccatcgcctgcgaaggcctggatgcggcgatcgaacgggcgcaggcctatgtggacgcgggcgcggacatgatcttcgtcgaggcaccggaaacgctggagcagatcgaggtgatttcgcagcaggttcccgggccgaagctgatcaacatgttccacagcggcaagacgccgctggtgcccgtggcgcggctggccgaactcgattaccggctggtgatcattccctcggacctgcagcgcgctgcgatccgggccatgcagcgcaccctgcaggagatcgcagcgactggcgacagcgggcgtgttgccggcgagctggccagcttcggcgagcgtgagacgatcgtgcgcacggcgcggtatctggcactggacagggtgtga

SEQ ID NO: 503509 - DNA, 897 bp, Stenotrophomonas maltophilia
atggaactgcggcacctgcgctacttcgtcatgactgcccagctgcagagcttcaccaaggccgccgaggccctgcatatcgcccagccgccgctcgggcagcagatccgcgccttggaggaagagatcggcacaccgctgttccaccggcagggacgcggcatcgtgctcagcgatgctggccaggtattctggaaagctgcggaggacatcctcgcgcgcgtcgaccaggccaaggaggaggcgctgcgcgccgcacgcggcgaggtcggcacgttgacattggggctgaccgaatcggcgacctacaacgaggcggtcaccgcgctgatgcgcagcttccagcgggcgcatccggcagtgcaggtgcggctggtagaagatggcagtgaatccctggtccggcgcctcgatgatggcgagctcgatgcagtaatcgtgcgcccgccgttttccaataccggtgaacggatgacacagcaactcagtgccgaacccctggtggcagtactgccggccgatcacccgttggcgtgccggacgagcatcgcgctgatcgagctgcgcgacgagcgcttcatcctgttctcgcggaaatcgggccagggcctgagtgcagacgtcgtcgctgcctgccgcagccagggctttgcgcctaccatccagcaggaagcgccgcaggtggcttcggcgatcaaccttgccgctgccggcctgggcatcgccatcgtgccggcctcgatgcagagcatgcaccgcagcggcctggcttttgttgcgctggaactgggcatgccgaccactacgctgcagttggcggtgcgctgcaagcctccggcaacggccgcccagctgctggcctgcgccagagacgtgtcaacacctcattcgccatag

SEQ ID NO: 503510 - DNA, 396 bp, Stenotrophomonas maltophilia
gtgacctttcgcctgtacccgggtgtccccgacgatttcgaggcgcggatccgcatccttgcgccagaggagggggggcgtcgcagccccgcccggaatggtatccgctgggattttgcctatgccgatgacgccgggacacccgagctgttcatgatctggcccgacttccggcacgctgagggcgacagctggccgactgagctgccgctgccggtgggagagtccctgttggccggcctgaccgtggtcaatgaggtgctgagggcggggctgcaccgggagcgtatccggccgggcgtgcgcttccactgccatgaagggcccaaggtggtggcggtgggggaggttacgcgggtcaccggcctgctgctggatcgccccctgcttcgttga

SEQ ID NO: 503511 - DNA, 549 bp, Stenotrophomonas maltophilia
atgcgcaggttcctgatactgctcgcaccgctggtgctgctggcctgttcccggccgacatcgcaatccgatccagcggatgccacaccgtcggccacggccgaggcggctgcccgcacgaagtcacagaccgccgcagaaggcgatgcaccggccgtgcaggccatcgatgtcgatcccctgtttgccgccgtcgcggccgaggccgagctgccggcgggaatgctcaatgcctatgtcatggccctgctcaatcgcgatcgcaaggccgtcgacgccgcgtggacattcccgcccagcgatgcacgacgcgccgacgatgccgcattgcgccagctcacggacgtgcgcagcctgcgcctgaccagcgaactaccgatcgcgcgcgacggtcaccagccgccgcagctgctggaggttccggtgcagatccgcgcagtgacccctgagggcaccttccgcttcggtggctggtaccgggtgcaaccccgtgccgatggccgcgcctggcagatccagtcggcgcaactgcggccaacgctggactga

SEQ ID NO: 503512 - DNA, 957 bp, Stenotrophomonas maltophilia
atgaatggcctctcttcgctgttgattcgggcggtactcgcggtggtggtgctggcggcctgcgtggctccggcagtcgcccaggaagtggtcgagtacatccacactgatgcactgggttcaccggtggcgatcaccgatgccagcggaaacgtcatcgagcgtacggtgtatgagccgtatggggcggtggtgaatcggccgttgaaggatgggccgggatatacggggcatgtgacggactcggggaccgggctgagttacatgcagcagcggtattacgactcggggctgggtgtgtttcttagtgtggacccaatttccgcatcgagctcaatgtttggacgctacttctacggtaacaatagcccctacagatttgtggacccggacgggcgtgcgcctgaagagaaaagccagaggagatccgcagtggtgggaagcaaaataaagaatgggatggtcgctccaggaagccgtatgggaactctgggagctgcgaatgctgcatcaggttcgaatggaagctatgggcgagagccgcgggcatccgatcctgaatggacccgagatcctaaagtaaagggacagatggagagcgcttggaatgattcgaacccgttcgccccggccgttcgcaggggggagtctgggtctctgaagcgagagaacggcggatgggtcgtccagtttgtgggagaggaaggccatgagttggtaaggtcgcccgcgggaaccagggacagaatgtcaatggagtccactagaaagccttctgaattcgaatgcggatgtatagtaaagggatattttcatacgcatccaaataccagagcagagggttatttccctggtacaaacgggtatgactacgactatcagttacagcagggagtccccggtatgattcgggggcatgagggttatgagttcatccccattccgggaggtcgctga

SEQ ID NO: 503513 - DNA, 2325 bp, Stenotrophomonas maltophilia
atgaacccgatcaagagccgcaagcacgcttcgccgcttcgtaccctgccgctggccaccgccagtcttgccgccggcctcggcctggccaccctgcccgcgctggcccacgctgaagccaccgacaacgcccgcacgctggacaagatcgacgtgcacgccacccggggctacaaagccgacaaggtggcctcgccgaagttcacccagcgcctgcaggacacgccgcaaaccatccaagtgattaccagcgacctgttcaaccagcagggtgccaccacgctgaccgaggcgctgcgcaacagcccgggcgtgggcaccttctatgccggcgagaacggcaacacgaccaccggcgatgcgctgttcatgcgcggcttcgacacctccaacagcttgtatgtggacggtgtgcgcgacctgggctcgatctcgcgcgatgtgttcaacatcgaacaggtggaagtgaccaaggggccggccggcaccgacaatggccgttcggcgccgaccggcgcgatcaaccttgtcagcaagcaggccaacctgcaggacgcgacgtcggccagcatttcgctgggcagcgaccagcagcgccgcgccaccgccgactggaaccagtcgctgggcaccaccagcgcgctgcgcatcaacggcatgtggcaggacagcgaccagcccggccgcgaccacgtgcagaacaagcgctggggcatcgcaccgtcgctggccttcggtctgggtaccgccacgcgctactacctcaacctgctgtacgtgaagcaggacaacgtgcccgatggtggcgtgcccaccctgggcctgccgggctggacgccgcagccgacgctggaagcgctggccgggcacccggtcgatccggagaacttctacggcacccgcgccgaccacgatgacgtgaccgcgaagatggccacgttccgtttcgagcacgacttcaacgacagcgtgcgcctgaccaacaccgcccgctggggtcgcaccgaacaggattacctgctcaccgccttcatgggcaccggcgtgcgcggcgcaggcggccgcccgaccggcaacatcacctatgccaacccggccgacctttccagctacgccatcgcgcgcagcctgccgaccttcaaggaccagcgcaacacgatcctcaccgatcagctgaaccttcgcgccgacttcgccaccggcgcggtcgggcacgcattgagcgctggcctggaattcacccgtgaagaactggacagctacggccaggccgccgctgccggcaccagctggcccgctgcgaacctgtacaacccggactggaacgtcagcggcctgaactgggcgcacaacggcgccgatgcacatggcaagaccaccacctcctcggtgtacctgttcgataccctgtccttcggcgaaagcttcctgttgaccgctggcgtgcgtgcggaccactacaagaccgagtacgccagcgcgtcggtgtgtggtggccgcggcggcccggcgtgtggcagcaatcctgccggcacggtgctgcgcaacccgacgctggacgcgtccgatacgctgctgaactggaagctcggcgccctctacaaggtcggcgataccgtcagcgtctacgccaactatgctatctcgcagcaacccccgggtggcgccaacttccagctgagcagctcggccagcagtgccgacaatcccaagctggatccgcagaaggccaagaccttcgaagtgggcagcaagtgggccttcctggatgacgctctggcagtgaaccttgcgttgttccagacggacgtggacaacgagatcaacaccaccgtgctcgacgatgccggcaacccgacccagaccggcagcaagcgggtcaagggcgtggagctctccgcagtcggccgcctgaccgacaactggtcggtcagcgccggatacagccacctggacaccgacgtaagggaaggcgcgaaggtggccgccgatggcaccaccaacctgacctataccccggacgacacattcaccggctggaccagctacaccctgccctacggcatcaccgtgggcggcggcgtacgctatgccgccggcatgcaccgcggcaccgacggcgcggtgggcaccccgtcgttcaccaagtcctacgtggtgtatgacgcggtcgtgtcctgggcaatcaatgagacgatctcgctgcgcttgaacggctacaacctgttcgacaagcagtacgtggccagcatcaacaagagcggctaccgttacaccccgggtgccccgcgcaccttcctgctcagcgcggacatccgcttctga

SEQ ID NO: 503514 - DNA, 678 bp, Stenotrophomonas maltophilia
atgctgctgcacattcccgacgtgctttcaccccaggacgtggcgcaggcacgcaggcgactcgacgctgcagactggaccgacggtcgcgagaccgtcggtgcacagggcgcgatggtcaagcacaatctgcagctacccgatgcatctcccctgaaagcggagctgggcagggacctactggccgcgctgagccgcagccccttgttctttgctgccgcgctgcccctgaagatcctgccgccgcgtttcaaccgctacagcggtggcggcacctatggcttccatgtcgatggcgcggtgatgaacctggccaacggcgaacagctgcgctcggacatctcctgcaccctgttcctgtccgatccggacgaatacgaaggcggcgagctgatcatcagcgatacctacggcgagcacgaagtgaagctgcccgctggcgacctgatcgtctacccgtccagcagcctgcatcaggtgcgcccggtcacggccggcgcgcgcgtggcctcgttcttctgggtacagagcatgatccgcgacgatgtgcagcgccgcctgctgtgggaaatggatggctcgatcgagcgcctgcggcagaccggcggtgacgccgaggcgatcctgcagctgaccggcgtgtaccacaacctgctgcgacgctggagcgaagtctga

SEQ ID NO: 503515 - DNA, 759 bp, Stenotrophomonas maltophilia
atgaacctgaccatcgacgcaggacagggcacccttgccgcccgcctgacgccctgggatgaacgtgcgctgggctttgccactgccgaagtcaccgccctgaaggtcgagaccattgagcaggcggcccccctgctggcggcgctggagcaatggtgtaccggacaatcggtgcgctacctgttcggccgtatcgatgccacccagccggtggccaaggctgccctgctgcagcacggctacgccttcgtggaaacgtcgctgaccgtgtcgcgcagcggtttcgccaacctgccatcggtaccgcgcggcatgctgccggcgctgcgcccagccaccgccgatgacgtcgccgaactgcgccgcatcgccgccgccgattttgcccacgggcgcttcctggaagatcccgccatcgatccagagcgtgcggccctgcgtaccgccaactggatcgaggatctggtcaaggatgagctggcctacgtggctgaatcacgtggccgcaccatcggtttccatgccgagcgcgtggccactgacaacagcaacgtcgaactgctgctcaccggtgcgaccgcgccgtacgcaatgctggcactgccgctgtggatcactgcgctggagtcccttggcgcacgtggcgttccgcaatgcaccaccctcgtttccgccgccaacaccggcatcatcaatttgtatgcccggctcggcttccatttcaacagcaccctgtttgggttcaggaaattcctatga

SEQ ID NO: 503516 - DNA, 744 bp, Stenotrophomonas maltophilia
atgggtgacgtcgcgcctgtcatcctggtcaccggtgcatcgcgcggcatcggccgagccattgccctgcaccaggccgcgcagcactcacagctggtgctggttgcccgcgacgcgcaagcgctggccgaactggatgcagaagtgcaggcactgggcgcacccgcggcgatgtgcgcgacgctcgacctgactgactccgatgccatcggcaacctgttcaagcaggtgtttgcccgcttcggccacttggatggcctggtcaacaacgccggcttattgcatgaagggctgctcggcatgatccgcgccgaggacatcgaccaggtgctggcggtcaacgtcaaggcgccgctgatggccatgcagtacgcctccaggttgatggcacgcaacggccggggcagcatcgtcaacctggtttcgatcatgggcgtcaacggtgccgccgggctcagcctgtatgcggccagcaaggccgcgctggttggcgccacgcgctcggcatccaaggagctggccccgcgcggcatccgtgtcaacgcggtctcgccgggcttcatcgacactgacatgacccgcaacatgcccgaagccgcgcacgccaagcgcgtcgcatcgattgcaatgggccgtgccggtactcccggggaagttgccgcactggtggccttcctgctcagcgatgcctccacctatgtcacaggacaggtgattggcatcgacggacagatggtggtctga

SEQ ID NO: 503517 - DNA, 1401 bp, Stenotrophomonas maltophilia
atgccgttctggaacctggaacaacatggcgcgcgtattgcgctgatcgatggcgagcagtcgctggacttcaacgcactggccgcactggccgatgcgcacgccgcacgattgccggaagggcgcggcatgggccttttgtgcatgcccagccaagtcgaagcggtagccctttatctcggcgcactgcgcagcggccgccaggttccactgctgttgcagccagacaccgatccgcagctgctggacgctctggtggggcactaccagcccgagtgggtcgccagcccgggaccggccgccgaaggctatcgcaccgtgcaccagggccaggcactgtccctgcatgtgcgcaatgcaggctcaacaagtgaagccctccatgccgaccttgcattgctgctgagcacgtccggcagcaccggttcctccaagctggtccggctttctgccgccggtctggatgccaatgcagcgtccatcgtccagtacctcggcctgaacggtgatgatcgcgcgatcaccaccctgcccctggcgtactcgttcggcatgtccattctcaacagccaccttgccgcaggtggatcggtggtcctgagcgaagacagcctgatgacgcgcggattctgggacagtgcgcgccagcatgcggtgacctcgctgtcaggcgtaccggccacgttcgagatcctgcgccggatgggcctggcccgcatgcagctgcccagcctgcgcatgctgacccaggccggcggccgactgcgtgacgagctggtggcttatttcgcggagtcctgccgtgaacatggcctggaattcttcgtcatgtatgggcagaccgaagcctcaccgcgcatcagctacgtgccttcggcgcgcatcgtcgacaaggtcggcagcatcggcgtggcggttcccggcggcacgatacaggtcgatgccactaccggtgagctggtctattccggccccaacgtgatgatggggtacgcgaccacccgcggcgatctggccaaggccgacgagatgcagggcgtgctgcgcacgggcgatctcgcccgggtggacgaggacggcttccattacatcaccggccgcgccaagcgcttcctcaagatttccggcaaccgggtcaacctcgacgaagtcgaggccatgctctcggccgcactcggccagcagattgcctgctcgggcagcgacgatgacctggtcgccttcagtcacggcgcagaagtggccgaccaggaccgggtgcgccaactggtgcaggagcgctacaagctgttcggcgggcacgtccgtgccctccacctggatgcgctgccgctgatggccagcggcaaggtggactaccagagtctccggcagatggccggacaaggagcatcacggtga

SEQ ID NO: 503518 - DNA, 627 bp, Stenotrophomonas maltophilia
atgccgcagaagaccgatgggttgcacgcagtgctttcatacccggcggtctatgacctgctgcagaacctgcttggagcacgtcggtcccgtaggcggctgatccgcgaccatatccgcccgcgccccggcgatcacatcctcgacatcggctgtggtaccggcgaactgttcagccagttgccggcggggctgcgctatataggcttcgacctgtccaaagcctatatcgaggcggcgaggaagcggtttggcgatcgcgcccgcttcgaatgcatggacgtggccgattatgaagtcggccacgaccagcagcagaaagccgatctggttctggcagtcggcatcctgcaccatctggacgatgcccatgcgcgcgcactcatgcgcaccgccttcgccgcgctgaagcccggcggccgtttcatttccctggatggtgcctacgtggatggccaatcggcgatcgcacgtgcactgatctcccgcgatcgcgggcagagcatccgcacacccgccgcctaccacgcgatcgctgcagccgagttcggcacggtggatggccaggtacgcaccgatctgcttttcgtaccttacacacactacatcatggaatgcgtgcgctag

SEQ ID NO: 503519 - DNA, 1524 bp, Stenotrophomonas maltophilia
atgcagagccgtactcctgtcctggatgcctggatcaactggcgtacgctgaccgtactgctgttggcgatgcctgccttcatcaatgctgctgcctacatctcctacgccggcattccttttgtcacctcggatggttggtacttcgtcgatgcgttcctgcagaagcactaccacgcagggctgtcgctgcaggacttctatgtcaagcgaagtgctgacgaccatgcccagcccgtgcagaagctcctgctgctctggaatgccgaggcgttcaatctggacttcgtcatcgagtcctacatggggctggcgattgcagctgtcgcatggtcgctgatgctgcatgtcatggcgatggacaatcgcggcaacaggcccgggatctggtggttgctgcctgcagtcgccagcgcggccagcttcgtgtccctcagcggggggatggtgttcaactggtcactggtgaccctgggctatctggggccactggccgccacggccctggcggtggcggcgtggacaggcgtggagaagaagcgatggtggccgttggttgccgttgccgccctcgttgcattcacccaggacgcgaccgcagtcatctgcgcgatcagcgtcatctgcgcactgctgcttcgcgagttcaagctgcgcggcacgaccctgcgtccaaccgcggtcgctgtcgtcatcgtggccggctggatcgtggcctacaagctggccagcagcctgtatctgcactcggggctgcccgtcctggcaacaggtgggcaaggcgtgagcgcactcctcgacatgggcgtggagccgattgcgcggatgatgctgaccatcgctgccctgtcggtgtccgacctgccgccgctgcagctgcacttccccggccgcggcgagttgttgcacctggtgctcggtgccgtggtcatcgcttcgcatgcatggttctggtggcgcgccgtccgtgatcgatggaacagcacccagttcctggccgtcgtgctgatgctgttctgctacggtgcagtggcaggcatcatcatcacgcgcgtgtccatgttcgggcccggctacgcctcccagcaacgctacctgatgctgtaccagctgggcacggtcgccatcgcacttctgtcggccggcagcaactggcgcacatggggccttgtgcagaaaggcctcgtctcgatcggcctgcttgcgctgatcgccgcccagctgcctctcagcagagcgacctggagtgacgctccctacgtgcaggtgtacggcaacaacctcggacgacagatgatcctgctgggttccaatccccaggccaagctggccgcgtgcgcaccgacgctggtcatatgcgaggcagaaaacggggaacgcatccgctcgatcacgctgctgcgtgaccatcatctcaacgcctactcggccgagatgctgagccgttactccatggaggcgatcgctgcccccaccggtccgatggaagtcgtcacgcccgcggacgacgcctcgaaaaaatga

SEQ ID NO: 503520 - DNA, 411 bp, Stenotrophomonas maltophilia
atgcgcaccatgaatggattgtcgatcgcagccatggtgctgatgttgtctgcgtgccagcgttccccggcagacgtaacggccgtggcctaccaggtgctgaacgcgcaggccggggaggggtgcgcggtctgtcttgtcccggcccgcacggcgtgcggggacggggcggaggcgggagagctgcgttggaacctgcctgccgggctggatgccaccggggtgcgcatccagttgcttcggaccgatggagaacgcaccgatctcgcagccggcagtacggcgggtgccgcgtccttcactgaagtcctgcatgcaggagatcgcatcgaagtgctggacgaaacgacttcccagcagttgatgtacatccagccggcagtggattcagtctgcccgccagaagactga

SEQ ID NO: 503521 - DNA, 1158 bp, Stenotrophomonas maltophilia
atgagctccgtaaagcgagaagaaccgatgaatgacgcgcgcaagaaggtactggtcgttttcggtacgcgtccggaggctatcaagatggcccccgtcgtagaggccctgcgcaatgcgcccggcatcgagcctatcgttgcggtcactgcccagcacaggcagatgctggaccaggtgctcgagcttttcgagatccggcccgacgaagacctggatgtgatggagccgggccagaccctgcaaggcctgttcagcaagattctgatgggcatgtgcgacgtcatcgcgcggcgcaagcccgatctggtcctggtccatggcgataccagcacgacgctggcttccgcattggcagcgttctacaaccgggttcccgtaggccatgtcgaggcggggctgcgcacgggcgacctctacgcaccgtggcctgaagaagccaatcgctgcctgaccgctccgttgacgtccatgcactttgcacccacccagcgtgcccgcgacaatctgcgtcgcgagaacatcgacgatgggcggatcctggtcaccggcaataccgtcatcgatgcactcctgcaggtgacgaaccgcatcgagcacgacgacgccctgcgcgaaagcctcgcggcacgtttcccgttcctggatccttccaggaaactgatcctggtcaccggccaccgtcgggaaaatttcggtgatggattcgagcagatctgccaggcacttcgcagccttgcagaccgcggcgatacacagatcgtctacccggttcacctgaatccgaatgtccaggagccggtcaaccgattcctcggcaatcatccggcgatcaccctgatcgaaccgcaggactatctgcccttcgtgtacctcatgtcccaggcctatctgctgattaccgactcaggcggtgtccaggaggaagccccgtcgctgggcaagccggtgctggtgatgcgggatgtgaccgaacgcccggaagccgtcgaagccgggaccgtagtcctggtcggtaccgatgcggcgcgcatcgtggccgaggcaagtcgcctgatcgatgatccaacggcctaccagcagttctcgcgcagtcacaatccctacggcgacggcaccgcggcccaacgcatcgccgacgccatcagcaacggctga

SEQ ID NO: 503522 - DNA, 3420 bp, Stenotrophomonas maltophilia
gtgtctgatgacgtaatcaattccaagaattactggaacggtcgtttcggtgaggattgggaagatctcggtggacgcgaacagtcacgcttctttggcgcgcttgccgtgcagatgcttcccgcctggctggtgcgtgccagtagccagcgccgcctgacttggtgcgactggggctgcgcactgggagacggtacccaggaagtagcgcagagcattcccggcgcgatgttcaccggggtcgacttctctgccgttgcgattgccgacgcacagcagcgcttcccaggcttgagtttcatcagcgacgattggcttgcatccaccgcacaggcggatgcgcccgtcttcgacgtggtcttcagctccaacacgctggaacacttccacgaaccgtggaaggtactcggcacggttgctgcgcgcgcccggcactgcatcgtcctgatgctgccctatcgcgagcggcatcgcattgaagagcaccatgcctccttcatgccggagaacattccgcagcagatcgacggcaaggtgctggtgcatgccagtgcccgcgatacgcggaatgatcacccttgcttctggccgggcgagcaggtgctgctggtctgggccgaccccacctggctgggtgagcagtcactgaccctgcaggatctgcagctgggtacagaaccccccagcccgttgcgtccgcttctcgcttcggcaacgcagcttgcgctgcagctcaatggcgacctgggcacgttgcgcagccacgtgcccgctgcaccggagcaggtgcaggcactggatcagctgcgtgtggatctggacaagtggctgctggtgcgcgacctgactgcacagtccaccgggccagcgtggagccacgagcagatggcacgcgaagcgcgcgatgcgcggatcctggagtctgcgctgcaggcgctgcagcccctgctggtcggcagcaccttgctggatcgtctcaacgatgcacatgctgacctggtgcaggtgaggaatgtactgcaggaggatcggaacattcgagccggcctgttggctgataccgaggcgctactcgcacaggcatcggcggcgcgtgtcgaggccgatcagagcgtgggtgcgacgctccgactgggagcggagatcgtcaatctggtgggggccccggcaggtgcgaagctggacgcgcttgcaggcacggatgacgaacagccggccgacgtgcaattgcagcgactgcggttgcgcctgctggccatggaccaggaactggatgcactccaccggagcacgtcctggcgtatcacccggccgatgcgtgtcatccggcgttttctctccagccccatgcaggagcttcgaaacatcggcaagcatgccccgcgctcggtgcaggcagccacgcgcttcggtatccggacgctgcgcaacggacgcctggatccgtcggatcgcgcgcggctggcgcagatcatctcgccttctccgaaggtgaccgtgggcgatccgcttggcttcgtcgattactcccacctgccgaccctcgctgccgccgacgccaactccactgacgtgtttgtctgggctgtgattgactggaacttccgcgtccagcgtccccagcatctggcaatggcgctggctgccaaggggcaccgggtcttttacatatccaacaatttcgtcgacgcctccgaagcgggtttcaaagtcgagccgttggatgacagcggtcgcctgttccaggtgaatctcaacctggccactgcgccgcagatctatcacgcaatgcctggcaatgagcaggtggctgcgatccagtccagtctgtctgcgttgctgggatggacccggtcggttcgctgcatgtcgttcgtgcagcacccatactggctgcagccggcgcagtgccttcctaacgcgaagcttgtctatgactgcatggaccaccatggcggtttcgaagacaacgctgccagcatcatggagggcgagcgccagctgattgagcgggcggacctgctggtcgttacttcccagtggttgcacgacgagctcagcccgcgcgcgcgcaacatcgtgatggtgcgcaatgccaccgagtacgctcatttctgcactccgccggccaaggtcttcgccgatgcgaagggccgacggatcattggctactacggtgccattgcagagtggtttgatgcagagctgttgcgccgggttgccctggacaacccggatgcgcttgtcctgatgatcggtcgtgacacggccaacgttgccgccagcctgcagggtatcgacaacgtgcgtttcgtcggcgaggtgccgtatgccgaactgccgtactggctccatgcattcgacgtctgcctcctgcctttcaaggtcattcccctgaccctggcgaccaacccggtcaaggtgtacgagtatctcagtgcgggtaaggcggtcgtttcagtggatctgccggagctggcccagtttgaagggctggtgcgcctggcaggtgaccacgagggatacctggagcaggtccgcctcgcactggcggaagccgatgatgacagcctgctggcgtcgcgccaggcattcgcggcccggcagacctggctgcaccgtgccgaggccctggatgatgcgctctcctcgatcagcgaaccgctgatcagcatcgtcgtgctgacctacaacaacctggactacaccaagcagtgcctgcacagcctggaggtcaacacggactatgagaacgtcgagatcattgtcgttgacaacgcctccagcgatgacagtcccgcgtacctggcggagtgggagcagggcgcggccaaccggcgcttcatcgccaatcagagcaaccttggtttctcggcaggcaacaacgtaggcctggatgttgcccggggcgactacctggtcgtgctgaacaacgacacctatgtgacgccgggctggctgcgtaccctgcgtaaccagctccgccgtcgcgcggatgcgggtctcgtggggccggtgaccaacaacatcggcaacgaagccaagatccagatcagctacgaatcaatggaacagatggtggagctggcgggccggtacactcgggcaaatgccgggcggagtttcgagatcgcgaccagtgccttcttctgcgtgatgatttcgcggcaggcctacaccatggttggcggcctggatgagcagttcggcgtgggcttcttcgaggacgacgactactgccgtcggctggagcaggcagggctggtgcggttgtgcgcggaggacgtgttcgtgcaccaccatctttccgccagtttcaacaagctcaaggccgaggccaaacaggctctgtttgagaagaacaaggcgttgtacgaggcgaagtggggcaagtggtcgccccacggctatcggtcgtaa

SEQ ID NO: 503523 - DNA, 1353 bp, Stenotrophomonas maltophilia
atgtcatctgacgcgctgatcagggtggagggcttgggcaagcgatatgacatgtttgccaagccggttgaccggctgatgcagttgatgtcggatccggtgcgtcgcggcctaggcatggcacctgccaagcacagcaaggaagtctgggcattgcgtggtgtcagcttcgaggttccgcccggtgaagcgctgggtgtgatggggcgcaacggctcgggcaagagcacgatgctgcagatgctgtgcggcacgctgaccccgaccgaggggcacgtccaagtgcgtggccggatcgcagcgctgctggagctgggggctggcttcaacccggagttcacgggccgggagaacgttttcctcaatggtcgccttctcggcctggaaaccgcggagatcgagagccgcttcgacgacatctgtgcgtttgccgacatcggtgcgtacatcgatgagccgaccaagacctattccagcggtatgtttgtccgcttggcgttttcggtggcgacgtccgtggatgcggacatcctcgtggttgatgaagccctcgctgtgggtgatgcgcgcttccaggcgcgctgcatgaagcgtatccgggccatccaggacgatggcgcctctgttcttttcgtcagccatgacgtggcggccgtgcgcacgctgtgccagcgggctctctggctggagcgcggcgggatgaaagagctggggccggtgctgcaggtcagctcccggtacatggagtccatcttccaggatgatcccgaggcgctgcatccagcggtgggcgtcgatgcgcacgatgaagagggaagcagtgcaggcggggacgctggcgtgcaggacacggcagctcccgacgtaccgacggttcacaaggaaaagcccctggcgcactgggggcagcagatcggcctgatccgcgccgtgaccctggccgcgggtgatcaacgcgactgcgaactgctcgaatggggccagcgctgccgcatcgggatccgggtcctgttgcctcctgattacgcgccggagtcgttccgggtcgcgttctccatcaaggatctgagaggacatgacatcgtcgtatccagtaccgacgacagcagcagcacgccgccggcgcattggtcagcgggtgccgaggtggagatcgagtttgccttcgagaacggattggttgaaggtaagtacttccttgtcgctgcagtcgagaagcgcacggggccggttgtggagtactacgagtacatcgaaggcgtgcggtacttctcggtgatcagcccggttcgtcacttcggcatttaccaacccaaaatcgagcatgtgttcaaggagttgctccgtgtctga

SEQ ID NO: 503524 - DNA, 786 bp, Stenotrophomonas maltophilia
ttggccacccgcgcaagcctggcctgggaaatggccaagcgggatgtattcgcacgctacaagggctcggtgatcggtctcgcctggtcgtttttctatccagtgctcatgctgggcgtgtacacgttcgtgttcggcgtcattttccgctcgcgctggacaggcacgcacagtgacgcgccgttgacttcggagttcgcgctgatcctgttctcgggactggtggtctatggcttcttttccgaatgcctgaacaaggcgccgggcctgatcacggccaatgggcagttcgtgaagaaggtggtgttcccgttggaagtactgcccgtgtcgaccgcgttgtccgcgctgttccacatgctggtcagcctgttggtgctgctgatcgccatgctcctgctgaagggcagcgtcccggtcactgccatcgccttcccggtcgtgatgatgccattgctgctggcgacccttggctgcacctggctgttctccgcgttgggtgtctatctgcgcgacctggggcagatcatgccgctggtcacgacgatgctgctgttcctgtcaccggtgttctatccgattaccgcggttcctgcctccttccgtcatatcgtcgagctgaatcccatcacaggcgtcatggatggggtgcgcgatacgctgatattcggccactggccggacatggggcttctgctgtggcagtaccttgtgggtctgctgatcatgctgtttgggctgtccgtgttccagtacgtgcgtaggggttttgccgatgtcatctga

SEQ ID NO: 503525 - DNA, 1938 bp, Stenotrophomonas maltophilia
atgaataggctgttggcggtgctgcccgcgctcgtgcagagctgggggttgggaatgctgctggtcggcgcactggcggccttcaccgttggcgttggactgggtggctacggcgtgctggcgggctatgtggcggtcgtggtcatggcagccctggcttacagatcgcgtgtaccgctgggccacgaccgctggaacatcctgataccgatccttgcctgctgtgccacgggtgtgtggggattcgcgttcagctcgagccagccgagtgatttcggcgtctactaccgctgtggtgtcgccgcaacatcgtcgatggtgcagtggctggataaatgtcagtccgcgtaccttgccgacaacagcacctactggctgcgttcgtacttctattccacgcttgttgggcgcatcttcggcgagggctacgtgtggttcaaggtcagcaacatcggtctgcactgcgcgacgcttttactgtggtacttcggcgtcaggcgaaatcatggcggcagagcggcggcgcttgccacgctcttgctcgcactgtatccagagtattggttcacgacgaccctgataaccacggacaacgccgcggtcctggccatcgccgcattcctcttgctcattcccgggctcgagggccggtggcccgtcgccctgttctcggcggtggccattgccgccatcgcgttcctgggaaaccagctgagatcgatcggcacgatcttcgtcgttgcattgctgctatgggccctgtgcagaagtattgcgcagcgacggttggccttggtgacattgccgatggcgtcgatcatctgcttgttcgcgatgactgctgctttcaacaaggtaaatccgacaggcttgcccgatctggtcgagccgctgcgcgcgctttcctccatcgacttcagttctgaccagaactttgcggtgaactacaggtgggcagagcacttctggaccgcgacgccagaatcagcccggttcgccaacatggcctacaaggtgtccacggagttttcgtcgggtttctgggattggcccggctatctgttcagaaaatcacaggttgtttttgcaggttccggctactacggcctgtctgccttcaactatccacctggcaacccggattctctgaacaatggcgtgctcagtgacatcccgttcgattccacgctgtttccgtggctgggtctggtcgtgttcgcaggtctgagcttgtccgtggtgggggtattgaagacgaagcatgagggtctttcgctggcctgcctcatcttcgtgggtgcattcgcactgatggtaatcggtgcgggtgagtctcaggccaggtacagcgtagtgattgcgccggcgttgtcgctgctcgctgcgatgtctgtgttcgcccgtgacaatgcggatggccccaggggcaacggtcgtcgttatctggtgggcggagtagggatcgttgtcgtctatctgctggttaccctggtgtccgccgttctgccctcggcggcagacgtcatgaagggtgtcaggcttctgccggtgggagccagcgcaacgggtgcgtgccagcgctccgatgccgtcctgtcgctggatgaaaagcgcgcacggatcgatttcaaggacggaagcgcctgcgccgtgctttccattcctgtcagatcggactccacgtcggttggattctatgtcagcggatcgacgttccctttcaagttcgaagaacgtccggagtcgccggtctcatacacgctgtactccaatggcgtgggtattgcttcgggaagcatggggcggcagactgttcgatgggtcgaagcatcccttgccagcccgcacgaaggagtggtgtaccttcgattggacagaacggcggaggccggggcggactacgtcgaggtgacgctgatccggccatctgtccagtag

SEQ ID NO: 503526 - DNA, 345 bp, Stenotrophomonas maltophilia
atgcgcctgttcctgtttgcctgcgttgctgcgctgtcattggccggctgcgagaagtccagcgaaacctcgatcacccgtaccaatgccaacggcgtggacacgctgtacagcaaacgcaccgtggtcgatggcgaggcgcggttccagtgcatcgccagcagcagtggccactgccactacgtggtgctggaccctgcatgcagcagcggggccgcgtgtgccacgccgccgttgcgtcggttcgcggtggcggtgggaaagaccgaggcgatgcgtgacctgcccaggggcttccaccaatgcgtcagccaggacccgatagaacaatgccaccgtgagtga

SEQ ID NO: 503527 - DNA, 453 bp, Stenotrophomonas maltophilia
atgctggccgcgccggatccgttacccccgctgctggcgggcttcggggcggccgccctggtggggttccgcagcgatgggcccggtggcactggccgttccggcgcactcgcgtcgctggcgctgattggtctggcggtctgggcggcaacgcacccggtcgccgacgccaccctgcatctgctgctcgccctagccactctcgtggtcgtcgccctgctggcactacgcctgcgcgccatcctgggcatggccttgcggctgcaggcccgggtagatgccactcccatggcatcgcgctggagcaagctgccggcggcggtgtccaccctgatgctgcagcagctgcgcggcgcaggtgcagtggaaccgagtctgcggcgcacgctggtgctggccaccctggcctgggctgccaacgaagaggcgcaggacatgcagtgccgacgatga

SEQ ID NO: 503528 - DNA, 1182 bp, Stenotrophomonas maltophilia
atgagcaaccgcaggacctggatcattgccgctacggtggccacattggccgccggcgctggatggtgggcgtttgccggcgccgatgatgccgcgctgatcaccgcaccggcaagggtggcggatctggagaagaccgtacaggcggtcggccgggtccatcccaaggagctggtggcggtgggtgcgcaggtgtccggccaggtcaagcgcctgcatgcggtgctgggccagcgcgtacaggccggtgacctgatcgccgaggtcgattcgcagccgcagcgtatcgcgctgcgcagtgccgaggcggccaccaacacgctgcgcgcccagcatgccgccagccaggcccgctatgcgcaggccagccgtgcttaccagcggcagtcgcagctggtggcgtcgcgcctggtgtcacaggaaggtttcgaagccgcgcgcgtggcgcgcgatgcggcacgctcagaggtggccgcgctgcaggcgcagatcgagcaggccgtgacccaggtcgaaaccgcacggatcaacctgggctatacccgcattgtttcgcccagcgacggttacatcgtggccatcgtcaccaaggccgggcagacgttgaactcgatgcagaccacgccgaccatcgtgatgctggcgcagatggatacgatgaccgtgcgcgccgagatcgccgaggccgacgtcgagctggtggcaccggggcaaccgttgtggttctcgacactggggccaagcggccgccactatgaatcccacctgcagcagctggaaccggcgccctcctcgattgccgacgtcgccaccggcaatgcgggtggctctgcgcagacgccgaaggcggtgtactacgccggcctgttcgacgtggccaatcccggcctgaaactgaagccctccatgacggtgaaggtgaccctgcagctggcacgggttgccaacgcgctgcaggtgccattgacggcgctgaccgattcggatggcaaggacggcagccgtggaaccgtgcgcgtgctcgacaccaagggccgcgcccaggaacgtgcggtgacgaccggcctgcgcaccgccaccgccgtgcagatcctgtccggcctgcgcgagggtgagaacgtggtggtcggccaggcgcccagcggcggcgaatccgaaccgaccagcctgctggagatgtga

SEQ ID NO: 503529 - DNA, 1944 bp, Stenotrophomonas maltophilia
atggccgacgcactgctggaactgcatggcgtatcgcgcgcctatcgctccgccgccggcgaggtggtggtgctgaaggacgtttcgctgcgcatcgatgccggcgagttcatcgccatcatcggcccctcgggctcgggcaagtccacgctgatgaacatccttggctgcctggaccggccgaccgacggcagctatcgagtgaacggcgaggccaccgagcagatggcgccggacgcgctggcacgcctgcgccgagagcatttcggcttcatcttccagcgctacaacctgatggagaacctgagtgccaccgagaacgtggcgctgccggcagtctatgccggcgtggaggcggacgtgcgcactgcccgtgcacgcacgctgctggaaacgctggggctgggcgaacgcatggcgaaccggccgagccagctgtccggaggccagcagcagcgcgtgtccattgcccgttcgctgatgaacggcggcgcgatcgtgctggccgatgaacccaccggcgcgctcgatcacgccagtggccagcaggtgatggccgagctgaagcgcctgcatgcacagggccacacggtgatcctggtgacacacgatgcggcgattgccgccaacgcggcgcgggtgatcgagatcgccgacggccgggtggtgaccgaccgcggcgagcggggatcgcgtgctgtggctgaaacacccgggaccgaacgcggcgtgtcgccggtcaccgagcgccgcgcacgcatggatgcgactcgcgaagctgcgcgcatggccgtgcgctcgatgctggcccatcgcctgcgcacgctgctgaccatgcttgggatcatcatcggcgtagcggccgtggtgaccgtggttgcgctgggcaagggtgcacaggcgcaggttgaatcacagatcaacgaactgggcgccagtacgctggagatcttcccgggctcggatttcggtgacccgcgctcggcggagatcgagacgctggtggtgggcgatgcggaccatcttgcggcgttgagttacgtggacagcgtaagcccgaacctgagcggatcggtggcagcgctgcagggcaaccggcgtgccaacacccaggtgctgggcgtaggcgccgacatgccgcgcgtgcgtgggctgcggctgaaggccggccgcttcttcaccgacgccgaagtggatgcgcatcgcgcagtgggtgtggtcgaccagaaggccgccaaagcgctgttcagcggcaacccgattggcagcacggtgctgctgggcggcatgccggtggaggtgatcggtgtggtcggggccaatgcgttcgctggcggtgcaaccccgacggtctacgtgccgtatacctcggcggcctcgcggctgctgggcagcgagcgcctggagagcatcacggtgcgtgtgcgcgacgacgtgcccaccaacgccgccgaggcctcgctgggggccgagctggagcggttgcatggccgtcgtgacttcttcatctacaacgccgaccagatccgcaaggcggtgatgaagtccagtcagaccatggcagcgttggtttcggccatcgcagcagtggcgctggtggtcggcggggtgggggtgatgaacatcatgctggtctcggtgaaggagcgcgtgcgcgagatcggcgtgcggctggcggtgggcgcgcggcagggcgacatcctgcgccagttcctgatcgaggcagtgctgatctgcctgttcggtggcgtgctgggggtgctgttcgcgttcggcgtgggtgcgctgtccagcctgctgtcgctgggtgtgccgttcctgttcacggcgggcccggtgcttgccgcgctggcgtgctcgtctgcgatcgggcttggcttcggctacttcccggcgcgcagcgcggcacaactggatccaatccaggcgctggcagcggagtag

SEQ ID NO: 503530 - DNA, 255 bp, Stenotrophomonas maltophilia
atgaatcgcaaatttccctggtacgacctcctcagtctgttgctctgcgccagcgtcgcgcggatctccaacatcctcctgctcgctgcgggcggcaaattcttcgtagcagcaagcgcaggcccgatcgcaagctggggacgccctggatgcgggctgctgatcgtcatggggttccttgtgctggcgacctggtacttcggcgcgcgcgcgaaggccgcacagaaggttctgccggcccgtttattcatctga

SEQ ID NO: 503531 - DNA, 1665 bp, Stenotrophomonas maltophilia
atgcgctacacacgtcgtgattttcttgccaccaccgccagcgcttcattggcgtcactggtagcacccggggcctgggccagcggcgccgcaccggccggaagggccgcgctggcgcgctaccaccgctacaacgtcaccagccccgaaggccagcgcatgctggccagctacgcgcgtggcatcaaggccatgttggcattgccggcagacgatccacgcaactggttccgcaacgctttcgtgcatctgatggactgcccgcacggcaactggtggttctacgtctggcaccggggctatgtcggctacttcgaacagaccatccgcacgctcagtggtgatccgcagttcgccatgccctactgggactggaccgagctgccacggattcccccagcgatgttcgacggcgtattgacgcccactgacagcgcctatgcgccgtatacgcgcaacctggcggtcttcacccggttcatgcgcccggcgctgcagcgctactgggacacgctggatgcaggccaacgcggccagctcaagttccgcggctacctcactgcagacgatgtctggaacgatgtgaccggctacagcgtcgcggaaaagaccggcatctcgggcaatgcggcctatgcgatcacctgcggcgcccgctacctctggcgcgagaatcccggcttcgatgcaaagaccgcttcggccgtgtctcccgacaccatccacgcggggctgtcgccggtcgagttctacaacgacgatgtcagccgcagcttcaccagctcgcgtacggcctcgcacgtggtgcagcctgacggcgccacgaaattctcggtactggaaggattcccgcacaacaaggtgcacaactgcatcggtggcgtcggcgcggtcgatcccggcccctacggcaacatgaccaacttcctgtcaccactcgatccgatcttctacctgcaccacgccaacatggaccgcctgtgggatgtgtggaaccagctgcagcaatcccgcggcaagccgatcatgcccgtcaatgtcgaccagcggcgccagttcatgaacgaaccgttccgcttcttcgtcgatgcacagggcaagcccgttggcgagcgtccggccagcgcgttcttctccaccacggccttcgactacgactacgtctacgcgcgccgcaacgacctgctggaggcggccacactgccagcagctgccggcacggtgcggctggtgcgcggcacacgctccgatggcgccgtccgcgtggctgtccccaatgaggcggtgcgcgcgcacctgaccacatcgggcccgcgccagttgattgccgaagtgaccttggagcgaccacgcggtttgaacaatacgcgcgagttcgacgtgctgatcaacgcaccggcgggaaccgcctccgtggcggccgacagtccgtactacgccggcactgtatcgttcttcgggccgaccatggccgggatggatcacagccacccaaccacgttcgcggtgccgctgccgcagaagctgggggccctgcagacactgaatgccgccgatgggggaacgaccacgctggagatccgcctggtcgcatcgtccggccaggcaccgcagacattcccggtgctcgacgccgctatcctgattgcgccgctgcggccgtga

SEQ ID NO: 503532 - DNA, 309 bp, Stenotrophomonas maltophilia
atggatgttattcgcgttctggttgaagagccttccgacggcaatgtaagaaacggcctggcgtcgatgcgttcgggcatggcacgtgtggttgaagtaggtgccatggaaatggatgatagtgtccggaagatggccgaacatttctcgaagatgctggaggacggctttttggcctcgacttcagtcgttgtggatgaaatcgaactttcgttggccgtaaccgcaagcggcggcgttgagttgctcgggaagttctctgctgggacccaggcggggcttaagctcaagctcaagcggaagggctga

SEQ ID NO: 503533 - DNA, 1260 bp, Stenotrophomonas maltophilia
atgagtactgaggccagcagtttcatcgagcgtcggaagcgggagcaggatcatcctctaggcaaagtgcgcccggagctgatcgcggagattgccgaggaactggaactacctgcggcaactggcttgccagatgccgcctgtcgggtgcagatggttcttcaggatctgcggcccctgcttccagagtccatcatcagccgccttgacgatggtcggatctcagctgcggaaatctacgagtacaacccagccgtatacgtccaaacgttccaggacgggagttacggcatcgtgatgacatcagcgctccccgagtatctctatcgggtcgcaaggcctctttccagtgcgctcattcgccttgaaagcaatccttccaaggggcttgagctcgacgagttggcgcgcatcctgggcgagattgtctggtggcagtgcgagggtagtttcggccctgactacgaaatctcaaagcatcagcgcgtctatgccagcgagctcgccatgcgtgctcagcgttttctggttgcacatgaactcgcgcatgtgatgtgcgacgttgaggataagctgcgagaggcgcggccagaagccgtcgggcccgtggaggaggagcttgtttgcgactacatcgcggtgcagctctcgatgcacgccagttcggcgcgtgatgatgatccgaatttccacatgctcaactatgcagctgcggagttcgcgctacagtcgtggtccttgctggaacgcttgggcgatcatgcgactgatgcgggctctcatcctgctctcccagatcggcttggggcgatgcgacaggcactgcgcgattgctgtgaggatgaagcgacgttcgaacagatcgtattggttgcagatctgatcgatcgtgcattcgcccgggctgctgatctgttgccagacatcgaagtgcggttctccgccgacgccgatgctttcgcatgcgacatccatgcacttcttgatgattgctcgctcgaagacgtcccggactactcccgattccgggaagagatcaggcccattcttgggcgtggctatccagtaaagctcgtcgaggcggtgctgagtccggtgatcgatgggttcttcctcgcaaaccgatcgggatcgcctgaattctctgatgaagagatcaaacggcgctttcgccggatgaagctcctctatagtctgcagggcaattattcaaaggcgatggacacacttctggagtgtgtattcagtcgataccgataa

SEQ ID NO: 503534 - DNA, 1305 bp, Stenotrophomonas maltophilia
atgaggtcacgcttcctgctcttcgctgtactggcgctatgtgcgcaacgaaccgtgatggccaacgagcaggcgttctccgacgcggcggcccgcgaggtcttccggcgcgccgaacagctctgcaacggagaccggggtcgattgtggggtcaatccctgtgcgggccgatgatgctggtggatccaaagagccggcaggtcatcgcctcgcaggcagacgcacatggtgcgctgaaggagcgcggcgatatgttcacaggccagcttccgtctgacgcgatcgtcgccaacaccgccgtggactggtccggcacacgctggacgcagctgctctggccattgccgcaggacgcgtcccgacgcagcacgctgctggctcacgaaatgttccatcgcctgcagccgacgctgcccatcatcgcaccggcggcaggtggaaacgaacacctcgatacgcttgaaggacgctactggctgcaactggaatggcgcgcgcttgcggacgcactcgaatccaccgatgcagtagcgcagcacactgcgatgacggacgcactcgcattccgcgccgagcgctaccgccggttccctgcggccgcgcaggaagaagcggcgctggaattgaacgagggcctggccgagtacaccggcgtgttcgtcggcaatccgacgccgtcgacacgtatccaggcggcactgcatgacgtccgcgcacacgtgggtgatcgcagcttcgtccgctctttcgcctatgccaccggcccggcctatggcctgctgctggaccaggcggcacctggctggcgcggcgacctcgcccaccaggctcgcgatctcggcacgcgtctggccgaagtgacgcaggccccattgcagctggacgcgaccgcgctgggagcggctgccgcgcgctatgacgggccggagctgcacgaagccgaaacgctgcgcgaacagcagcgccttgcgcagctggaacacaaccgtgcgcgcttcgtgacaggcccggtcgtgcgcctggatctgcgcaacatgcgcatccagttcgatcccaacaccatgcagccgttgccaggccaaggcatggtgtatccagcaatgcggctgtccgacatctggggcagcctggatgtcaccgacggtgcgttgctgcacagcgactggaaggtcgtattcgtgcaggccccggcaagtgctgaaccgccactggaggggccggggtggtcgctgaacctgaagccgggatggtcgctggtgccgggaacacgcaagggcgactacgtgttgaagacgaacccctga

SEQ ID NO: 503535 - DNA, 1452 bp, Stenotrophomonas maltophilia
atggtcactgcatggctgttgctcggtgcagtgcttgcggcacctaccgcgcaaggcgcgccgatcgactggtcggatacgctgttgaaggatctggacgctgccgacgccgccatgcgcggcagccatccgggcgccgtggacctgcgcaatcctggtttcggcgcacagctggacgatgccctggcgcttgcacgctcgcgcgcggaacgggtcgccagctacccgggctactggtggacgatgaagggctatgcggcctccttcaacgatgggcatgtcagcctcaacgcgcttgccgatgctcccgatcttccaacgcagtggccgggcttcctgaccggcttcgacggcgatgcgcaggtggtcatgaccgtggatggtggtccgggccatccgccgctgggcgcgcaattgctgtcgtgtgacggcattgatgcgcagacgctggctgtacgccgggtgggtgacttcagcggtcgctggaacctgcaggccagccgcatccagggtggtggtgaagtgctgctcgaacagggcaatccatacgtgcctgcattgcgtacctgcgttttccaggtgggcggacgcgagacatcctatgcactgcggtggcagccgctgcaggcagcacagcgcaaggagcgcttggctgatacccggcgcagcttccgtccccccaacggctggcacgcgatgcccgatggcagttactggatcaccaccagcagcttcaatgccgaccctgcggagcagaacttcaaggaactgaccgcgctgcttgagcagcttgaaccgcaagccgaagggctgcagcaggcaccgacggtggtgctggacgtgcgtggcaacactggcggtgcttcgcaatggagcatcgaactggcgcgattgatctggggccgggccgctgtcgacgcgctgcccgaccgcagctgggtagagtggcggacctcggagggcaacatcgcgcagcttcgcggcttcctgcagacgctggaacaggtgcccgacgcgtcgcccgagctgcgtcgcatgctggaatcggtgacggcaggcatggcgcaggctcgcggccggggtgaggctttgtggcgcgagccatccgaggccagcgcagatccagcatccgccgcaagccaggccagacctgtgcgcaagggcagggtcctggttgtggccgatgcttcctgtggctcggcctgcctggatgcattggacctctggaagcggctgggcgcggtgcaggtgggcgtcgagacctcggccgacagtctgtacatggacgtgcggccggagcggttgcccagcgggctggccaggatctcggtgccgatgaaggtgttccgtgggcgggtacgtggttcgaatgaaccgcacgtgcccgatcatcgctatacgggcgacatgcgcgacacccgggcgctggaagcgtggctactgacgctgtag

SEQ ID NO: 503536 - DNA, 153 bp, Stenotrophomonas maltophilia
atgagcatcccgccacccagcgctgccaggccgccatcgcgggcaggagccttccgtcgttggatgctgacacccggtgcattgctcggcgtggcgctgctgatgtacatggtcggcgtacgtgtgccgctggcctggctgagcggcctgtag

SEQ ID NO: 503537 - DNA, 1020 bp, Stenotrophomonas maltophilia
atgagccgcgtcgtttgtttcggtgaactgctgctgcgcctgggcgcacccggtcgtgaactgctgctgcagacaccgcagctgcaggtccacgtggggggcgccgaggccaatgtggcggtctcactggcctgtttcggccacgatgtgcagatggtcagtacggtgcccggcaacgcgctgggccggcatgccgtggccgagctgcggcggcatggtgtgggcgtggcaggtgtgcgtgaagtcgaccgagaccgcatgggcctgtatttcctggccaccggcgcgctgcagcgcgccagtgaagtggtgtatgaccgggcagattcggcattcgccaacactgcacttgccgaccatgactggccaacgctgttgcgtgatgcgcagtggctgcacctttccggcgtcagtccggcgctgggcgccaatgtggccgaatccgtcttgagcgctgcacgggccgcacgcaggtcaggcgtgcgtgtgtccttcgacggcaactaccgaccttcgctctggcagcgttggggcggcaacgccgccgccatcctgcgggaactgttcgcagaggcggatatcgtctttgccgaccatcgcgatatcgaactggtgctgggactgcgcttcgccgaggacagccccatcgcgcggaccgaggcggctgcagcggccgcgttcgcggcgctcccgcacctgcagtggctggcctgcacccagcgcgacgtggtgagtgcagaccatcacatcctgggcgcgctgctgttgggacgcgacggtacccgtgcgcaggccccctcgcggccattgcccggtatcgttgatcgcattggcggcggcgatgcgttcgcggcaggcatcctgcacgggctggcgtccgggttcgatgcagagagcaccgtgcgcttcggtctggcggcaggtgcgctgaagcactccattcccggagacttcagtcctgtgcgcgaggccgaggtctgggcgctgctggagagtgaccagttcgacgtccggcgctga

SEQ ID NO: 503538 - DNA, 492 bp, Stenotrophomonas maltophilia
atgaagttctcgctgttgggcgcggcgctgccattggtgctggcactgagtggagtccccggtggaagcgtcaatgcaggacctatcgcgggcaccgcgaccgccactgtagttgcgaaggccacgtacgcgccggattcgctggaagccggctacatcgtcgattggatcaaacggaattcgcccgcctacgcgccggcgttgcagacgggcgaactggccatctcgcacagctatcagtctgctggcagcctgaagccggccggtgcggcgggcccgcctgttccattgcctgcacgcggtgtggagggcgaggtcatctcgatctccaataccttgccgagcggtgcttccgagtcgtggacataccgatggtcgagtgggtcgtggaagctgatcaagtacagctttgatgcatgccagggcccggccagcatcggtgcgaagggatccggcacggagatcgctgcgaagggaccctgcatcgactga

SEQ ID NO: 503539 - DNA, 849 bp, Stenotrophomonas maltophilia
gtggagatttcgattgcggggctgagcgaggttgggcccgactacccggaccgtgtcgatcttccggtgatggtgcttgggctggaccccattccagatgcctggcagatgcccttccatgcgcaccggaaggcacagctgctggttgccacgcgcggcttgatcatgctggagactgcagccggcctgtgggtggttcccccacagggtgcgatctggattcccggtggcctgtcccatcgggccagcagcagtgggtggccgcacgggttcgtggtgttcgtggaacccggtgtcgtgccggggctgccgacgcactgcgctgcaatggcgatcacctcgttcatgcaggccctgctggagcgggcgtccgcccttcccgggcactacgagcccggcagcgcgcaggaccgcctgatggccgtgttcctggatgagctgatcgccgcgccaccggagtggctccatctgcccatgccatccgatgcaaggttgcgccggcttgcctacgcaatgttggacacgccagccgaacgggcaacgcttgaagtctgggcgagccggattggaatgagcgagcgcaacatgtcgcgcctgttctctggagaaaccggtttaagcgtaaggcgctggcgcaggcagctgcatgttgtggtcgcgctgccgctgctggccaaaggcaggacagtacaggccgttgcggaccacctgggctatgacagtgccggagcgttcgtgaccatgttccgcaagaccgtgggtgcgccgcccaagcgtttcctggcggaacgaggcactcggcagcgggcttcggacgccgacgatcagcggccgcaggagccacgctga

SEQ ID NO: 503540 - DNA, 927 bp, Stenotrophomonas maltophilia
atgagcagcgagatcagagacgacggcctggatcccacgcttctgctgaaagggatgtttcccttgccgaagttcatccgtttcgtacgggagcgttgcccaccgggacgcttcgacgaggctgcgctggtggaggaatggcggacggcacgtgccgaggtgctgaggctgcagcaggaggaagccggtgaggccgacgccatcaatgtccatgcgttaccggatgagatgctgccgctggctgagcaggcgctgcgacaaccctcgatgcaccggatgacgagtgttctgccacgcagttggcagatggtcgagatcgatcgactggtgatcttccaggagtgcatcaacctgcgtcacatcgatcagttggcggcatccctgaccgcctcgcccagcgcgcaggaggtcatgcagcttgtcgcgcgcagcggcagccatgcacatccggaagtgcgcttcacccagtccgatggcagctacaccttcgcgtccacctcgaacgacctgcgcttcctcgatgtggcgaccctcgatccggctgccatcgccgactacgagccgttcggcgcagccagccacgccgtcgtcatctatctgggtttcagtgacaacctgatcagcgccacccggttcggcaggcgcatggtgctgaccaatggctcccatcgcctgtacctgctgcgccggctcgggttccgccatgcgccctgcctcgtcaccgatgcctccgacagcgacctcagcgaggttctgctgccggcggcggtcaagcaggatcgcgggttctacctgtcttccccgcgtccgccgctgttcaaggactatgtcgatcctcgcctgacctgcgtcgtgccggtcacccgcaagcactacgctctgagggccaagctcgacctgcagaggatcacggttccggcgctgtaa

SEQ ID NO: 503541 - DNA, 162 bp, Stenotrophomonas maltophilia
atgaacgagctgattgagctgggtgtagtggcaggacagcagaaccctgaggatcagggcatgggtggcgaactgatcgagctgggctcggtggtttcggaaacgaaggcgcacaaccacggcacgttgtgggatggcgtgttcccgaccacgtcgccctga

SEQ ID NO: 503542 - DNA, 702 bp, Stenotrophomonas maltophilia
atggagcaggctgccgccccgtatttcctgtcaaagcacgcccacgtctgtgtcaccggcgatgcgatggtgattctggaccaggccacgggaaagtatctttcccttgaaaaacgcggcgccgcaggccttggcaagctcgttctcgattggcccctgcagtccgatgacgcaagcacgccaaggcttctgcaggccttgatcgaccgccgcttgatcaccgcggatccgcagcaggggaaatccgctgccagccctgccattgtgctgcctcggtactgggcgcgcgaaggcgcgccgcgaggccgtccgcccatcatggcgcgcgacctgcgtcgattcatcgcctcgtgcgcctatgccgcctgcagcagaacgttccttcctttcagttccacggtgtcggccgcgcgccgtcgggcggatcgcggccacagccggccggtaagcgctgaagaactggccctgcgggtgcgggtgttcgactggcttcgacccctggccttcaggaaaaccgatgagtgctttctctactgcctggcgatgcgcggattcctgtcgaactacggcatcgttccggcctgggtgttcgccgtcagaacccagccgttcgccgcgcattgctggctgcagcacggcgatcaggtgttgaccgacattcccttcaacctgcgccggatggttcccatcctggtgctgtaa

SEQ ID NO: 503543 - DNA, 1842 bp, Stenotrophomonas maltophilia
atgtaccgatacatcgccgtgctctggaacacccactcggaatccgcgacggcgcaggcggaacgcatcgtggaaaggatcggcgccaggctgcccggtatcgcctgcgtgttgaacgacaacggcgcggcgatccatgtgcagagcgacaaccacggctatttcgaatgcaatcgctcgaatgcgctggtggtactgggcaagctgttccacaagacgttcggcgaaggcaaagtgccttgctgcgtgaacctggatcccgccacagcggacgccgcctgcagcagccagggccgcagcatcgtagaacactactggggccgctacgtggcgttcggcttccagcaggaaacgtcgagctggttcgtcctgcgcgatcccactgcggagatcccgtgctatatgaccacggtgggccagttgacgctggtcttctccaacatggaagactgcctgatgctgggtctgcgcgaattcagcgttgactggtccttcctgtcgtactcgctgctgtacccgtttcgtgatggcctgcagaccggcttcgaggaggtcacggcggtcgaagcgggtgaagcggtttcaatccgcgatggagagccggtgggccggcactgccagtgggacgtggtgcggctggcccgcgacgcgccgatcgaagatcttcaggaagccgtgtcgctggcgcgttccacgctgctgggctgcatcggtgcactggccagcccgcaccggcgcatccagctgcagctgtcaggcgggctggattcctcgatcatcctggccggcctgttgcaggcgccgtcggcaccggaggtgacgtgtgtccatcactacgatgagggcatcggcgccgacgaacggctgttcgcgcggatggcagtgcaaggggccagtgattcctcgggcaggcgttgcgaatacatcgagtaccgaaggcaacctcactgcgcgctggaagagatcatgaccttcccgcgtacagcccggccggcgcattgttccggctatcttctccaccgccgtgacgtggccttcgacggtgacaccgtgcagttcaccggtgttggcggtgatgcggtgttcctgcgtttcaagggcaatgccgctgcgatcgactacgcctggcggcgcggcatcgaccgggatttcttccgcgtcgccttcgaaaccgcgcagtccggcgattcactgtacggcgtgctgaaggatgcgatggtccatggtctgctcaagcggccaggcagcatcaatggccgttggggcaaaccctgcccatgggtgcgggtggaccgcgccgaacaggatggcctgcagccggcctggttgcggcacgcgcaggcgcaggggcatcgcgtatcaccctacaagctggcccatatcggccgcatggtgtttccgaccagcgtccttgatcccttcgaaggtgcaggccactggcatggcgtatcgccgatcagtgcgcagccgcttgtcgaactgttcgcgcgcattccgctgcacctgctcatcgcggacgcggaagaccgcaccatcgcgcggcgtgcaatgaaaggcctgttgccggaggtgctgctgtcgcggaaggtgaaatcctatctggatgatcattccgtggcggtcacccaggggcaccagcagttcatcaggaatcttctggtcgatggaatgctttccaggcgcggctatctcgacagcgcgctggccgatgcgggcatccagcaggtcggcccggaccactcgtcgcaggtgctcggcatcttcggcccgcagatcaacatcgaagcgtggctgcggcgctggtccggccaacgtggcgcgcaggcggccgccgtggcctag

SEQ ID NO: 503544 - DNA, 711 bp, Stenotrophomonas maltophilia
atgctgtctgcaaaaagcctggtcatggaacacggtgcacatcgggcgctggatgacgtcagcttcgaggtgaagcccggcgagatcttctgcctgctgggcgccaacggcgccggcaagtcgaccaccatcaagctgttccttggctttctgaaacccacctccggtgcggccgaagtggacggtctcagtgcgcaccagcagccgcaggaggtacgccggcggctgctgtacatccccgagaccgtggcgctgtacgacgagctgaccggctacgagaatctggactacttcgcgcgcttggccggtgtcgaggaacgctcgccagcgcggttgaaggacgcactcaggtccgccggcctggcgaccgacgcattcgggcgacgcgtgggcctctattccaagggcatgcggcagaaggtcggcatcgcactggccatcgtcaaggaagccaaggccctgttgctggatgaacccacctcgggcctggacccaacggcgtcagccgaattccatgagttgatcgtgcgggaacgcgatcgcggcacggcgatcctgatggccacccacgatctgttccgcgcccgggaagtggcgaccacgatcggcctgatgcgggccggccgcctgcgcagaacgcttgatgccagcacgatcaccgcgaacgatcttgagagcctgtacctggaagaaatgagccgcagcgcctag

SEQ ID NO: 503545 - DNA, 1356 bp, Stenotrophomonas maltophilia
atgaacgttgtgtcgattgcccgctatgagatccgccgattgctgcgcgatcgagcgctgccggtgctgcttgtcctgctgctcgggctgggtgcctacgccgcgtggaacggccgcgcatgggtggaccagcgggaggcggccatcgccctgatcaagcaggaagaacaacagacgaaggaacgcagccgggcattcgtcagcaaggcgccttcggtgctgccccgcgcccagccggtgctggcgcccgccgccatggcaacgctgtcgatcggccaggcagacgcctacccctacaccgccgatgtggtcgcgctgggcgatccgacccagctgctcaagcacgtttgggccgacatcggcaatccagcggcacgggctgcgggacggttcgacctcgccttcgtcatcgtcttcctgctgccgttggtcattctcgtggccacccacgatctgtggtcccgtgagcgcgagcgcggcatcgcggcgctggtgctgtcacagccggtgtcggcaacgcgcctgctggtggtcaaggtgctggcccgtggcctgatggtgctgctgcccgcactggccatcctcctggcggtgacgatcggggccggcgcgcgcagtccttcgggcctggccatgctggccctgaccgtcctcctgtacggcgcgttctggctggcccttgcactgctgatcggctgccttgcccggcgcaccaccgaggcggccatcgccgccggcgcgctgtggctgctgatcgtggtcatggcgccgtcgctggcgctggccacggtgaatctgatcgcgccgccgccgtcacagatgcagttcgccaccgaagtaaaggcgatgcagtccgacatcgccacgcgccagcggcgcgagcatgcgacgtcggcgccagtgaattcgccgtcccccgtcatctccgacactgtgcgccaggcctacgccgatcgggttgcagctgaccgggaactggaacgcctgatcgcctcgcatgcgcaggccgaggccgcacatcgccaggttctggacaaggtgcggctgctgctgccggccgtcgcgacacaggacgcgctcgaccgcatcgcaggctcggatgccgaccgcgcgctcgacttccagggacaggtccactccttctggcaggcgaggcggctgttgcacaaggcctatctggatcgtgacgcgccgcagaccttcgaagagtacgacaccctgccccgcttccagttccacgaaacagccggcgtcgcccaacgtggtgtcctggccgatctcgccgcactgatcattgccaccctgcttgtcctgcttgcagccggtgcattgcgcagccggctggcaacgccctga

SEQ ID NO: 503546 - DNA, 1464 bp, Stenotrophomonas maltophilia
atgcgcgccgaagcccctgccctgtcccggtccgtcatgaccatccagcaggcgtttgctgttgcggcaacccagctcacgctgatgtggcgcgagcggcgcgtgctgtggcttgcccttgccctgttgctgattgcgggagcatcggtgctcagtggtgctgcacgcctgaccctgcaggcgcaggagcgccaggcaatgagcgaggaagaggcgcggctctgggacagccagggcacaatcgacccgcatagcgccgcacatgtggggcgtgccattgctgcccccgtgcggccactggctgcactggacccggggctgacggattacctgggaacctcggtgttcatcgaaggccacgcgcagaacccggcccggcaccgtgccgtggatggtggcaccgcactcagccgcttcgagggcttctctgcggcgtgggcgctgcaggtggtggcgccgctgctgatcatcctggccgggttcgccaccctgtccggcgatgtggcccgcgagacgctgcgccaggaactcggcaccggcgcctcggccggcgtgctgatctgtggacgcttgattgccctggcggccgcctcgctgctgctggtgctggccatgctgctgatcagtcttccggggctgtccatccagtacggcgacgccacggatcttgccgccctgctcgcactggcggccgcctacctgctctatctggcggtgttctgtgcacttaccgtgggggtgtcggcacttgccggctcggcacggacgtcgctggtcgtgctgctcggcttctgggtggtgtccacgctgctgctgccgagggtggcgcctgcggttgccgaatccctgtacccgaccccttcggcaccggcgttcaggaccggcgtgaccgaagaagcggagaacggcgcggatggccatgacccggccgacaaacgccttgatgccctgcgcacggcgttgatggcgcgctaccgggtcgacagcgttgacgacctgccgctgaacttccgcggtgtggcgctggagtttgccgaggccaactcgacgcgcgtctacaaccgccatttcgatcgcctgcatgccacctaccagcagcaggacgccacccagcgcctgtttggccttgcctcgccgacgctggcgctgcagtcctggtcgcgcgccttcgccggcacggatttcccggcgcatctggcgttcctgcgcggcgtggaggactaccgttatcggttgatccaggcactcaaccaggaagtgaaactgcacaaggcaccacaaggcgggaagcatgtggccgacatcgccggcatcacccgttcagtgcactaccggccgccgcaacagaccctggccggtaccgctgccgcgcagcgcggaaatctcgtcattctgctggtctggctgatgctgggttgcgtggtggtgctcatctccgctcggaagctggggagatcgccatga

SEQ ID NO: 503547 - DNA, 2403 bp, Stenotrophomonas maltophilia
atggaccggggaatgacgaacgtatccgctgccatgccacgcgcgctcatggccctcagcattgccgctgcactgttggccagcgtgcctgcgatcgcccagaaccccagcgatgcccggcgttcgcgggccgcaggcgcagcacccgaggcgccgaccgccaccctggacaaggtgctggtggtcggcagcaacatccgcgatgccattggcggcggcgcatccccgatcatcgtgatcgacaaggaggccatcgaccgcaccggcgtggctaccgtgcagcagctgttcgagaaactgccacagaacttcggcggaggcgccaatggtgccaacgtcgccaaccttggcgtcgaccgcgataccggcaacaacttcggccaaggcaccgcgatcaacctgcgcggcctgggaaccggcaccacgttgaccctgatcaatggccaccgcgtgacctcgtcgaaccgctaccagtacgtggacgtctcgctgataccgctgagtgcggtggaacgcgttgagatcctcaccgatggtgcctcggccatctacggcaccgacgccgtcggtggtgtggtcaacatcatcctgcgccgcgacttcaccgggtatgagaccgctgtgcgctacggcaccgtcaccgccggtggcatggaggagtaccaggcatcgcagtcggcaggcttgtcgtgggatggcggccatgtgctggccagctacgagttcctgaagcagagcaacctcgcggcggtggacaaggacttctcgaagaacgtgcgggtcaaaccgtacgacctctacccggggtccaagcgccacagcctgtacgtggacggcgtgcagcagctcagcgatgcgctgaccctgaacgtgaccggctcgttcgccaagcgcgagatggacaccaccatttccggcaccgccgacgaaacccggttgttcccgcacacgcggcagttcgacctgttcgccggactcacgctggatcttccgcgacagtggcaggcgcgcctgaattccgggttcggcaggagtgacgtttcctatcagcgcaccaccatcaccggcagttcggccagtacggcgccgccgaccgatacgaactccgaatcccgctacctggatgtggtcgccgacggcgagttgttcagcctgcccgccgggccgatacgcgcggcgttcggcgcgggctaccgccgcgatggctatgagctgatcgatcatcgcggcctggaaaagccactcgacctgcatcgaacgatcaggtccgccttcggcgagctcaacatcccgctgctgaaggacatgccgggcgtgcgcagcctgtctttcactgcggcagcgcgctatgacgattacagcgatttcggttccacgctgaatcccaagctcggcctgctgtgggaggcgacccaggggctttcgttccgcaccagctacggccgctcctaccgggcaccggtgtaccaggacatgcagttgaacaacaccgtggtggtggcgaatgtgcccaacccgagcgcagccaatggcagcaccatcctgatgatgctctccaatggcaatcccgatctgggccccgaacgggccaagacctggaccggcggtttctcattcgcgccgccgtcgctgccggggctcaagatcgatgcgaactactaccacatcgaatacgccgaccggatcggcagtggcttcggcggcagcttcccgtcgctgttcctgcagtccacggcaccctacgcggacatcctgaccagcaatccgacccagcagcagatccagcaggcgcgccagctgggcatctcggggctgggcctgttcgtctcgcgcgtggggccgtatgcgctgccaccgggaacggacgaaaccaacagccgggtgatcctggacaaccgcttccgcaacaacgccttcacccagcagcgcggtgtcgatttcagcgccggctatgacgttgatgccggccagacccgcatcgcgatgagcctggccgggcagtacatcatcgaatcaaaacgtcgtgtgaccagtacgtcgcccgaggtggatgcggtgaattcggtgtactacccggtggacctcaagatgcgcggtggcattgcgctgagccggcaacaggccgcggcgggcatcttcgtgaattacgtggacagttaccgcgaccccgccaatgtcgcccggccccacgtcagctcctggacgaccatcgatctgaacctcgcctaccacttcggtgcgtcagcggacccgcagcgtggcacctcgcttgcgttcaacgtgcagaacctgttcgaccgggatccgccgttcatcgtcaacagcatcaacaccggctacgaccccaccaatgcgacagcgctgggccgcttcctgtccatgacgctgacgcaccgctggtaa

SEQ ID NO: 503548 - DNA, 1653 bp, Stenotrophomonas maltophilia
atgaagaagactgctgttccgccgcccgtcgctgaaatcctgggcacgtactggaaggctgaccgcaggctgctgctgctcatcgccggcagtgtcgtgctgtccagcctggccaatgttgcggcgccctatcttttctcacgcctgatcgaccgtccgcccatcgacggggtcggcgctctcgcgggcggcttcctgctgtatgcggtcatgcttggcgctggcagcgccctgcagaacaccgtgcagtacctgtcgttcctcagcggcgagaatcttggcttcatcaccagtacccgctacttcgcccgtctgctgaagaagaccaacagcttcttcctggactacaacgccgccgagctgcaggtggcaggggagaaaggccgcggcgcactgaagatcgtggtgcagctggggctggtggccttcattcccagtgcgctgcagatcctgttgacgctgataacgttgggtgcgttgatcaacctgcaggtggtggccatcgtgctggcctacggcacggtagccgtcacgctttccgccatcgctacccggcgcgcacgcatccatcgcgaagctgcggtcgaggccggccagcagaacgcgcgcttcgtcggcaatgccatgaatgccatggagacactgcgccagttcggcggcagcgcctggatggtgcagcgcttcgagcagaaggcccaggaggtgcgcgacagctggcgcgcctacgtactgcagcggatcggcttcattgcgctgctgggcatcggcctggcggtcgagttcatcgttaccttccatctgttgctgccgcgctaccagagcggcggtctgagcgtcggcgacatcgtcctgttcaatctgctgctgctccagctcaacatgccgttcgagatgatcgcccgttcgatcgatgacgtcgcgcgctcgtggagcatgctggctccgctttccaccttgtgggcggcgcccgaggagcagcaggtggccgatgcccagcgctttgcgggtgaaagcggccggctggcgttcgagcgggtcagccaccgctatggcaacggtcgcggggtaagcgatgtgtccttcgaggccgaacgtggcggcatcaatttcctgatcgggccgaccggggcagggaagtcgtcgctgttcaagctcgccctgaaatcgatccatccccagcgtggccggatcctggtcgatggccttgacctgtcccggatcgaccgtgcggcctggcatgccgctgtcgcggtggttccgcaggatgtcatcctgctcaacgaaagcctggccgacaacatcctgttggggcgcgcacgcgatgatgatcggctgcagcgtgccgcacgcaaggctgcgatcctgccgtttatcgaggcgctgcccgagggccttgaaaccaccgtgggcgagcggggcctgaagttgtccggtggggaacgccaacgcatcgcgattgcccgtgcactgtatggcgagccggcgatcctgttcctggacgaggcaagctccgcgctggatgaggccactgaacgcgagatcatggaccatatccgcgcactggcgaacgatgtaaccgtggtggccatcacccatcggcgcggtatcgtgagcccgactgaccgggtgattgagctggagagtgatcgctga

SEQ ID NO: 503549 - DNA, 870 bp, Stenotrophomonas maltophilia
atgcccgcacctggatcgcagcgggcggaagccttcatcaacgcgttttctctggaagtgagcgcgaaggccatgccggcactacgcgcggaagtggatcgcatcgctccgggaacgacgatctcgatcccttatctggcaagcgaggacgacgatgcccggctggcggccgcgtgcacggtgcgcgaactcggcttcgagccgatgccgcatctctctgcccgccgcatcgggtcgcgtgcggcgcttgcgcggttcctggaacgcgccgccagcgaagccggggtagcgaagtgcctgctgatcgcgggtgatctttccgcgcccgcagggccgtatgccgacagtgcctcgatcatcgagaccggccttcttgagcgttacggcatcaaggttgtggccatcggcggacatccggaaggccatccgatgatgaacgctggggaccgttggcgcgtgctggagcgtaagtgccaggccatcgaggcgcggggcttggcaccgctgatcatcacccagttcggcttcgatgccgatatcgtgctggcctggctggatgcgctgcgggcccgtggcatcacggtgccagtgctggtgggcgtgccgggcccggccagcattgcgcggctggcgcgctacgccgcgatgtgcggtgtgggtgccagtgcatcgatgctggcgcggtacggcatctcgatcggccggctgctgggaacggcagggccggaggtgttcatggatcgcctgctgagtgggctgacggacgcccatggcccggtcagcccgcacttcttcccgttcggtggcattgcgccatcactggactggatcgagcggtaccgacggcgcacgtcgaccgccagcgtgtga

SEQ ID NO: 503550 - DNA, 834 bp, Stenotrophomonas maltophilia
atgatccgctggctgtttctggcgcttgccgcgctgccgctcgctgctggagccgtggtcatccgccacgatgtggacgatgcccgctaccggatcgatggatccgagtttccggccctggctgacatgccgggcgaagggcagggcgttctgatcgcgccgcagtgggtgctgacagcagcgcatgccgcaccaatggaagggatggggctggccatcgccatcaacggcagggactacggcgtggagcgcgtgttcgtgcaccccggctataggagaatgcctgacgcattgggcaatgaggctatggcaacgggaagcccggcgaagatccacgcgttcctggccgggtcggatgacattgcactgatccggctcgcagcgcccgtgaacgacgtgcagcccgtggcgctgtatcgcggcagcgccgaagtcacgcagatcgccgccttgatcgggaagggcgccactggcaatggtacggttggactggtgccgggcgggccgcatcgcaccacgctgcggcgggcgtacaacgccattaccggtggcaatgatcgctatctctggtatcggttcgatgccccgccacagggcctgccgcttgaaggcgtgctcggtaacggggacagcggcggcccattggtgatcaaggatcacggcgtctggcagctggtggggctgggctcctggatcaccgccgttcccgagcatgcccttgaggccggcttctacgggcaggtggtgcacaacgttcgggtatcgcgctatgtgggttggatcgagagcgtcctgagtgcgcccgattaccgcccagtaacacccgaagactga

SEQ ID NO: 503551 - DNA, 528 bp, Stenotrophomonas maltophilia
atgaacatgctccagcaactcaccacgcagacgccgatctgggtctggctgctcctggcgttcctggtcacgcgtggcatcgccgccatgaagccgggtgagacctccttgcagaagctggcgatcgtgcccgtcctgttcgccgtatggggcgcgtggtcgatcagtcatcgcttcggcgcgtcgccgaccgcctggggcgagtggttggccggcatcggcaccggtgcggcactgggatggctgctgctgggccacgtgaagctgactctggattgcgccaccggaaagctctggcgcaacgcggacttcagcctgctgccgctgctgctgatcaccttcctggtgaagtacggtttcgaagtcgcatttgcagtgtcgccgtcgctgaccggcaacgccggcttcagcgccgcctacctgctgctggcaggcggattcaccggcctcttcatcggcaagtactgccgctatctggcctcgttgcgactgggcgaggcaggtaaaggggttggggtcgcaggctga

SEQ ID NO: 503552 - DNA, 687 bp, Stenotrophomonas maltophilia
gtgtccacgctaggccggggcacgggcagcaacgcggatcgggcctcctcgacggaggcgggcattccggaagacgcctcgccaatgggcgggaacctccttgcgaaagcctatgcccgctggcgcgggcccatcctccgcggccttgcacgcgtcagaggtgcggacggtgaggacgccctgcacgacggtgcagtcaaatggctggcggcaaaccctgcactggcgtcctgcgaccagcaaggtgcctatttccggcgaacggtgatgaacaccgtggccgatgagtatcgtgagcacaccgcaggccgccgtctccagaccctgccactggcagatgccgaggatgcgggccaagccatcgccagcgatgaatcacagtgcccgttgcagctcagcgcccagcggcagcgcctggagcgcctgcgagaagcactggccgagctgccggagcgccaacgcgaggccttcgtgctctgccgcttcgatgggctgacccaggaggacgtggccgctcgcatgcagatttcccgccgcatggtggtcaagcacctgtcgcgagcggttgcctactgcgaagtgcgggtacgctatgcgtctctggcacagatgcaggaactgcatcgtccgatcaaggcgggcgaggcgttggcgcctgccatcgatgctgattttccctgccgatga

SEQ ID NO: 503553 - DNA, 1044 bp, Stenotrophomonas maltophilia
atgaccgatctcccttctgccgcaggttccgacccgtttgccctgcatgaggcggccgccgcgtggatggtgcggcggcaggatgcggactggcaaccggaagaagaggcggccctgcagcactggctggccgagagcgaagcgcaccgacaggcgttcgccgatgtggccagaacctggcacgacctgggtcagctgccgcgccccgtgctggcctcggacgcgcacgcggtgatcaccccagcagtacctgcacctgcggctctacggcggggcagggcggcgcggcgtgcacgatcgtggcgcctgccacgcgttgcggcggctgcggccgtggcgatgctggccttggggtacgccggctacggttggtacaccgcgcccagctacgtacaggacgtggccaccggtgcgggcgaaatacgtgatctgcaactgccggacggctcacggatttcactcaatgcacgcagcacgctggcagtccatttctatcgaacccgtcgtgaagtggtgctcagccagggcgaggcgttcttcgaggtcgccccggcggccgaccggcccttcaccgtcgatgcccagcgcagccgggtgacggtggtcggcacggctttcaatgtgcgcaatgggccgggcgaagtcgtggtcaaggtgctgcatgggcacgtgcgggtacagccggatcgcgccgaaggcaccgcgccggtcagcctgcgcgccgaacagggcctggccgttaccacgctcacagccgcctaccgctccattgccgccagtgcagacagcgttggcggctggcgcaacgggcgcctcgtgttccggcgcacgccgctggacgaagtggcgcaggaggtggggcagtatctgggccatcccgttacgctgggacagtcagggctgaagttcctgccggtctccggctacgcagccaccgatgccccggccaccttcctggaagcgctgccggatctgttgcccgtgcaggtgacccgcaatgcgcagggcggctatcgcatcgacgaacggcctgttgcccgctga

SEQ ID NO: 503554 - DNA, 2466 bp, Stenotrophomonas maltophilia
atggggtacatgaagatcaagcgcgcacttgttgctggcgcgttctctacgggggtacacgccaagcggctgccgttgctggcgctgtgcatttccagcgcgctggcagcgccggccattgcacagtcgcagccggctgcacgcgtgcagttcaatattccggcgcaaccgctggatgccgcactgcgccgcttttccgagcagtcccggcagcaggtgctgttcagcgaatcagcggtggcgggtcgtcgcgccccggccttgaccggcagctacacgccgcaggaagcactggcgcggctgttggagggcagtggggtgcgtgtcaacgccacccgtccgggcgtgtacacactggcccaggaagcagcagcgccggcgcgcggcaaggatacccagaccaccctgcagacggtgaacgtgaccgccaatgccccaagcgatggcgcttacacggcacgtgagctgagcctgggcaagctggggcagagcatccgccagaccccgcagtcggtcagcgtgatcacccgccagcagctggacgaccgcaacctcaccacgctggacgaagcgctggcccagaccacgggtgtgaccaagaccgcccgcaacttcggcaaccacaagttctcgatccgcagcttcaccgtggacgacagcaactatctggtcgatggcgtggccggcatcgtctatgccccggtgggttggctgccgatcgacacctcggtactggagcgcgttgaagtgctgcgcggtgccggtggcatgatgctgggtgcggccgaccccagcggagcaatcaacatggtgcgcaagcgcccgcgcgaccaggctcatctggatctggccgcaaccgtgggctcgtgggacaactaccgcgtcgaggtggatggcggtggcccgctcaatgctaccggcagcgtgcgcggccgactggtcgccgcctatcaggaccgcgactacttccagcaggtcacctcatcgaagacgccggtggcctatggggtgatcgatgccgacctgggtacggacaccacgctgaccttcggcctgcgccatcaggccagtgacaccgacggctactggctgttcggcctgccgcgctacaccgatggcggtgcgctggacatcaagcgttccacctcgctcatccaggactggaaccggcaggagggctccgtcgacgaagcctttgcagaggcggagcaccgcttcaacgaacgctggaaggcacgcctgtcggtgaaccgcaccgagtcggacctggaccagcgtgtcgcggttccgctgggcggggtggaccgcgccaccggcatcggttcgcgcttctatgacatctatttcaaccgctcgcgcgtgcgtagtgatggcatcgacctgcacaccaccggcagtttcgacgccttcggccgcagccatcagctgctgctgggcgcgatgtggtcgcgccagcgtacccgccagagctcggcggacctggccatcgacgtgccgattgatgtctacgcacccgaccacagcgccatcgcgcagccgctgcagcccgcgtgggactggtcggaaaacgcacgcgcccagcagagcggcgtgtacagcaacctgcgcctgcagctggcagaaccgctgcacctcacgctgggtggccggctgagctgggtgaagtaccagtccagcgatggcttcaccggcgccaagagccgcgactacgaacagaagcacgaattcaccccgtacgccggccttgtctacgacctgggtccgcaatggtcggtctatgccagctacgccgataccttccagccgcagagctcgtacgtcaccgcgtccggctcggtgctggatccggccatcggcgccaattacgagctgggcgtgaagggtgagttgaacgatggccgcctgaatgtctccgccgcagtgttctccatccgcaagaccggcaacgccgtggtggacgaatccgacccgggcagctgccgtggctcgctggcgtcgtccgattgctaccgcaatggcggcaagctgcgcagcaagggctttgagctggaggccagcggcgaactggcgccgggctggcagatgatggcgggctatacccacgtcaccagccgcgacgatgagggcgcgaccatcagcgccgagacgccccgccacctgctgcgcctgtcgacgtcctaccagctgccgggcaagtggaatgcgttctcggtgggcggtggtgtatcggcacagagcagctattcctatccggcctacgacgacccggactggcgcatgggcgcagcgggccgtgccgtgtgggacctgcgggccggctaccggatcaatccgcgctggagcgtaggcgtcaacgtggccaacctgttcgacacccgctactacgcgatgatcagccagatccgccgcggcaacttctttggcgaaccccgcaatgtgatgctgacgctgcgcggctcgctgtga

SEQ ID NO: 503555 - DNA, 1884 bp, Stenotrophomonas maltophilia
atgaaagcgggcttccggcagagcatgtcgtggctgcacacttggtgcggccttatctgtggctggctgctgtgcgcaatcttcctgaccggcacgctcagcgtgttccgtgagccgatcacgcgatggatggaggccggccccgtgccggcctcctcgccggcggtggacaccgcaacgcaggcggtacatgcgcagcactggctggcagcaaatgccgccgatgccaggtcatggcagatccgttggcctgcccagccgggctggccactggagctgtcgtgggaggatggcgacggcaccgcgcacgaacgctgggtggatgcccgcaccggcatgccacagcctccacctcgtcttcgggaaaccgaaggcgggcgccacttcatgtccttccactacaccctgcacggcggcatggccggctactggctggtgggctggatcacggcctgcatgctgctggcgctggtgtccggcgtggtggtgcataaacgcatcttcaaggacttcttcacctttcgcccgggcaagggacagcgcagctggctggatgcgcacaacctgagtgccgtgctgaccctgccgttcctgttcatgatcggctactcggggctgaccttcttctacagcagctatctgccgtggcccgtgcaggcagcctatggcgatgccgatgacgcctatgcgcgctatgaagccgagctggcgcctgcacagccggctccgccaggcatcctggtatccaccgcacaactgccagacctgcagaaactgctggcacgcgcgcaggccctcagcgggcagccgccagcactgatcgtgatccaggcgcacggcaccgtgcacagcgtggtggaggtgatcggtcgcaagcccgagcgtggtgcagacaggcatctgctgaccgaggccagccaggcggcgttcgatgctgccagcggcacgctgctgcaacagcatggcgcacatccgcatgcgattggcgcggtgcaggtgcatgagacgattgaagcactgcacaaagccgatttcggcggctggccaatgaagtggctgtacttcatcagcggtctgctcggcacggcgatgatcgccatcggcacgttgctgttctccatcaagcggcgcaagcgcagcgagcatgagttcggcgcggccacggcgggcatctaccgctgtgtcgaagccttcaacgtggcatcgctggctggggtggcgctggcaagcatcgtctacctgtacggcaatcgcttgctgccactggaaatgagcggtcgcagtgcgtgggaaatacgcattttcctttggacctgcgctgcctcggtgctgcatgcgctttggcgcccaccgcgcctggcctggatcgagcagttgtggctggccgcagcactgtgcctggcactgccgctggtgaatctggcaaccaccgggcaggggctgctgatgtacctgcagcggggcgcatggcagcaggccggcgtagagctggtcgcactggcattcgggctgatgctggcaaggatggccctgatgctgcagcgccgttggccccgggcgcaggaggcggcgcgccctgccaagcctccggccgggcgggaaccggcctatcgctggcaggtggcgagccgagtgctggccgcctcactgggcggctacgtgttcaccgccgttactgccacggcactggcgttgttgttgcccgtgctggtgggggtaaggacagccgtttcggtcctggccagttcactgctggggttcgtgctgttcattgccattgctgtgggcgtcttctgcgcccgtagtgttgggaaggtgtggctgagtctggcggcagggagtgccctgatggggttgctggtgacgatgctgcagcgagggtga

SEQ ID NO: 503556 - DNA, 552 bp, Stenotrophomonas maltophilia
atggcacgccgcccttctaccgccctgctgatcatcgacatgttcagtcgtttcgacttcccaggtgcagacgcgctggcgccagccgcagagaacgcggcccggcagatccgccgcctgagagaccacttcgatgaccaggggtggccagtcatctatgccaatgacaacttctcagattggaagcgggacttccgccagcaagtggagcagtgccagcgggacggggggacggctgcccgaattgccacaaccctctcccccctgcccggccactatttcgtgctcaagcccaagcactcggcgttcctcgcgagtcccttgccgattctgctggccaagctgggagtacgccgtctttggctcactggcatgacggccgactcgtgtgtccttgccacggcgctggacgccaacgccagggagttcgaggtcgtggtggcactggaagctgtggcggcgatgccctcccagaaacggcgtgcactggcagtgctggcggactcgggcgcagcccgggtcgctcgactttcgtcgctggtctctgcgtaa

SEQ ID NO: 503557 - DNA, 1164 bp, Stenotrophomonas maltophilia
atgcaggcattgacctatcacggccgcaaggatgtacgcgtcgagaccgtgccggacccggtactggcggctgatgacgaccttatcctgcgtgtcaccgccaccgccatctgcggctcggacctgcatctgtaccggggcaagattccggatctgcacgatggcgatgttctcggccacgaattcatgggcatcgtggaagaggtcggcagcggcgtcacccaggtcaagccgggggatcgggtggtaattcccttcgtgatcgcctgtggtgagtgcttccactgtcggctggccgagtatgccgcctgcgaaaccaccaataccggcaagggcgccgcgctgaatcagaagggccttctgccgccggccgcgctgttcggatacagccatttgtatggcggggttgccggtggccaagcggagttcgtgcgcgtgcccaaggcgaatgtgggcccgctacgtattccggaaggcgtagccgacgagcaggtcctgttcctgtctgacatcctccccaccggctaccaggccgcgctgaacgcaggggtgaagccgggctcaacggtggccatcttcggtgcgggcccggtagggctgatgagcgcggcctgctgccggctgctgggggcggagaccatcttcatggtcgaccatcttcgttaccgcctggactacgcgcgccgtgcttacggtgttacgcccattgacttcaaggcgaccgaagacccggcggactacatccttacccagaccagcgggcggggcgtggacgcttgcattgaggcggtaggcttcgaggccgagggcagtgcgctggagtcagcattgaccgccgtcaaactggaaggcagcagcggcgtggcgatccggcagtgcatcgcggcagcacgccgcggcggggtggtcagcattccaggtgtctacgccggcttcatccatggtttcctgctgggtgacgcgttcgacaaggggctgacgttcaagatggggcagacccatgtgcagggactgatgccggaactgctcgacgcaatcatggaaggaaagctggacccaggcgacatcatctcgcacaggatgcgactggccgatgcggcgcagggctacgcgatgtttgacgccaaggacgacgactgccgcaagatcgtattgacaccttga

SEQ ID NO: 503558 - DNA, 492 bp, Stenotrophomonas maltophilia
atgacgtgcgtctatgcactctggttggcggccggttcgctcgacttccactttcaccggcgtaccgacctgccgcacacctccgcgttgcgggagagcgtattgcacggactgcagctactgctgatcggcagtggcgtgctggcgtggctcctgctggagaacactcggtcactcgtcgcgcttctggcacttctggtcttcgcgcacgcgatcgccggctacttcgataccgtcagcgcggacggccgccggcgcatcagcccggcagagcagcatgtgcatagcgtgctcgatgccgcgccgtgggccctgctgggctgggtgggctggcacgcggagccggagtggtcgctgagcgtagaacctgcagcgctggaggtttggtggctcgttctgctgcctgcgctggtgctggtggtgctgccatggctgtgggaattgcagcagtgcctgcgcgtgaggcagcaacggcgtgggacaggtgcgtga

SEQ ID NO: 503559 - DNA, 942 bp, Stenotrophomonas maltophilia
atgcaggatgtgacgccgccatcatcattgatcaaccgcgcccgccagctactcgtccagcagcctgaactgccattaccgggatgcgggcagacactggatcgttggagggcgctcgcggcgttggggggcgatgatctctgcctggccaaggtgctggaggcgcactacgacgcgcaggcgatcatggccgagttgaaggcaccgttggctgctgaaggccaactgtgggctgtgtgggcggcagaaggcccggcgagcacactccgcatcgacgccgagggcagactgcgcggggacaagccttggtgctcgggcagcgactgggtggatgccgcattggtcacggttcgcagtgctcagggggtgtggctgtgccaagtcgaagcggagcactggggtacgctgtcgggtgagccatggcccgccgtcggcatggccgggattccgtccaccaccgtgcgctttgatgccgcgccaatggtgatattgggggctcgcgatgactatctgcaacgaccgggcttctggcatggaggcgcgggtatggcggcggtatggtttggcgcagcggtcgcgttggccgaacgcatgcgatcagcctgcaccgagggaaatcgtgcacgtctactgggtaaagtggacctcgcgttggcgccggccgcggcgctgctccgcgagctggcagcacgcatcgatgccgagcccgaatcggcgcatcgcgaggacgtggtgcggattcgttgcgtgatcgagcgggcggctacgcgcgtgctggatctggcgggtcgggccctgggcccggcccccatgtgcctggaagatgcccatgcccaccgctgcgctgacctgaccgtgttccttcgccagaaccacgccgaccgcgattgggaatggttgggtgggcagcgggcggcccaggaggcgacatgggcgctgtag

SEQ ID NO: 503560 - DNA, 651 bp, Stenotrophomonas maltophilia
atggagcggtgcctgcagtcgatcaggagggcggccctgaatcccgggctgggtggcgaagcggtggaggttattgttgcgctggacgattgttcggacgccacggaatccatctgcgcccagcaacgggttgatacgctgcggttggatgcacgctgcgtcggcatcgcccgagccgccgccgccgccgagctgctgggccggggtgcaagatggctggcgagcacggacgcggacagcgaggtggctcctgagtggctggtcgcacagcttgagggacgccgggacgtcttctgcgggctggtggacatcgcaacgaactgcagcgccgaggagcgcctgcgcaaggcgttccggaggcggcagcaatggggggacgatcacgggcgtatccacggtgcgaacctgggtgtttccgcccaggcctatcgtgcggcaggcggcttttcgccgctgcactgcggggaggacgtccagctggtgaggacattgcagcgtctcggcgctgaagtgcggtgggcgggtaccccgctcgtcatgaccagtgcccgcctggcagggcgcgcgacaggcgggttttcagcctatctggcggagatgggcgggttgggcgccgccccggcggcaggccagccgatcctgttggcttga

SEQ ID NO: 503561 - DNA, 429 bp, Stenotrophomonas maltophilia
atgccgaacagagccattgtctatgtcagcgaagccgtcgctggattcacgtccgcgcgcttggaagcactgatggaagatgcggcccgcttcaaccgatcagcgggtgtgaccggcgtgcttctattcgacggccggcacttcctgcaatacatggagggccccgccgatgggctggatgtggccttctcccgcgtcagtggcgccggcagtcacaccgacctgatggagcttgctcgcgggcgtgtcgggcaacggcggttgccgttctggccaatgcgctgcctgccagtcagtgcggatgagctgcggatgatcgcccttgctgactggaccagtttcatccagcgggcggcgacgaaccaggcgggagctaccgcgatggaaaagctcctctcgatcgtcgaaccctatgctaaagcggcctga

SEQ ID NO: 503562 - DNA, 393 bp, Stenotrophomonas maltophilia
atgcaacccgatatgagccggcgcaggtgcaacctgctgctggtggaggatcagttcgatctggccgcactgatggagcaggcgctcgaagacggagggggccaggtaacccatgcgtatagcgtgtttgatgcgatggggctgttggagaagcagacgttcgatggcgccgtgctggatgtggagcttcgtgacggcgtggtctttccggttgccgatcgcttggccgagcttggcatcccgttcctgtttgtgtctgcggtctatgaccaactggtgccgcagcgccaccgaagcgcggccttcgtggccaaacctttccacatcgcccagttgcagcaggccgtccaacgcgtgatgggcgatgcctgcacgcccttgaccacgcactga

SEQ ID NO: 503563 - DNA, 339 bp, Stenotrophomonas maltophilia
atgcgtcgacctgtaaccgatcccgcttcgccacgcgtgctgcgtgtcgagagcatgtccctggactgcggtggcaccgccgttgttgtagagcttgaccggacacccgaacgggtatggatgaagtcgctgaagcgagccgttcaggccaacaccgccctggagggggggcaggccaagttcgatggccgttttgtgtatttcgtgggcatggaggagagtgggaatcgcgtccagcatcacgtgatgcaggcgctgatttcggcggaaccgggccgcgacccggccaggcccaagggtttcccgggcgcggcactctcgagctcgatgaccgcctga

SEQ ID NO: 503564 - DNA, 468 bp, Stenotrophomonas maltophilia
atgcctcttcgcgcaattgcctatgtaagtgaagcgtccgacagcctgactgcggaacgactgcagcagcttgtgatggacgcggtgctgttcaatgaatccgccgatgttaccggtacgctgttgtttgatggcagccgcttcctgcagtacctcgaaggccccgaggcgggggtcaacggcgcgtacaagcggatcctggcagccggcagccacagcggcgtggttgaactcaaccgggggaaagtggggcggcggcagttcccgcaatggcggatgtgctgcgtgcgggtggatgaactggcgctgggaaagatcgccatctccgactggacaggcttcgtgcgcagcgcatcggcgctggcttcaggcaccagcgcgctcgatcgcctgctgtcggtgacgcagtcaaatgtggaaggcgttgccagcagcgccctggaacctgacggctgggtggcgcgatga

SEQ ID NO: 503565 - DNA, 633 bp, Stenotrophomonas maltophilia
atggtcgagatcaactcctcgttctaccgtccgcacttgcccagcacctatgcacggtgggctgcgagcgtgccggactacttccgcttcgcagtgaagatgccgcgctcgatcagccatgaacatcggcttcgcgatgcaatgccgccgctgcagcggttccttgatggggtgctggcactgcgtgacaggttgggtccgctgttgctccagttgccacccagcctggcatacgaaccggcgacggcggagagctttctgcagggtctgcgcgaacgcgcccaggtcgatgtggcctgtgagccgcgccatcccagttggttcactacggaagcggacgccctgctgagcgaccatggtgttgcacgggttgcagcggacccggcacgggcaccctcagctgcgattcccggcggggaccgcacgtggagctattggcgctggcacggccagccacagatctatcgcagtgcgtactgtgaacagaccctggcggagttggcgcaacggctgcggcgcgaagccgacacgcaacgatcactctggttcgtactggacaataccgcgctgggccacgccaccagcaacgccctgcgcctgcaggccctgctgcaggaggacgagcatgcctga

SEQ ID NO: 503566 - DNA, 498 bp, Stenotrophomonas maltophilia
atggctatcaagacggcggaagacctgttcatccacgaactctcggacatctacagcgccgagaagcagctgaccaaggccctcccgcgcctggcccgtgcggccgagaatccggatctggcggcggcgttcgaaacgcatctggaagaaacccagggccagatcgagcgcatcgaccaggtggtggaggtgcttggcatccgcctgaagcgcatcaagtgcgcggcgatggagggtcttgtagaggaaggcaaggaggtgattgacagcatcgccatgggccctgtgcgtgatgccgcgctgattggtggcgcgcagaaggtcgagcattacgaaattgcgtcctacggcactatcgccgcgctggccaaacagctgggctacaaggatgccctccccttgctgctggagacgctggaggaagagaaggcgaccgatgaaaagctcaccctgctggccaagggcggcggcaacgccaaggccgcgcaggctgcctga

SEQ ID NO: 503567 - DNA, 1509 bp, Stenotrophomonas maltophilia
atgatcaatctgcgcacgaagctatccatgcgcgctctggcattgtccgcactcggtgcgttcgcattctccctgtacggccagccggtaactggcaaccccacggcacacacctactcgcgaacgttcaatgtatctgaggccgaagcaaaatacaggtcgatgaaatcgatctctgcggcaggtctggaagccaggattcaggcatctgagccggatacgtttggtggcttgtacgttgagcatgagccagaattcaagatcgtagtgctgttcacgaataggccgaaagagaccttggcaaagtacacgcaggatcctgtatttaccggccgcacttccgctcaatcgctcgagatgctcttggcgacccaggccgaggcagaggcccagcttctcgcaaagaaggttgggttcgagtcgggcgttgatatcaagcggtccattgtgaccttttacgtgaaggatgaagcggccgctagacgcgcactccgaccattgctgggcgctatcgatttcatggcgatcaagcaagtgaaaggctttactgtcactaccgcaatctccggcggccataagttgaccggtactgccttcagttgcactactggcttcaacgtcttcgacgcagatcgtgagcttggcgtcctcacggccggtcactgtgacaatacgctgacctatcagggcattgccgcgcctcttgttttccagagcgagcagaacgtaggcgactacgatgtccagtggcataaagagccgcccaggggcccgcgccacgcgcagacaaatgaaatctccctgatcaatggtccgtcgcagacgctcgaaataaccagcacactcccctccagttcgacgcatgtgggggatgtgatctgcaagagtggaattcacggccattacgcttgcgggaccattgaggatattaattcaaggtccaatcataatggggtcataggcaggtacattcgtgcacgcaacctttctccaggtcctctcagcgtcgaaggtgacagcggtgggccggtcttttcgaacaatgcggccctcggcgtcattcacggccggggcggtgaagacacgggatttgagaacgacctgttctacatgcccatcgagcgggtttcagcacttggtgtttccgtattgacggaggcctttgaagttaccggcatcgcagatcgcactgaaaattatttcaggccattttccgttccggttgcgtacaagggagttccgaagttcccgatagagttgacgctggagcgccccgtgtgcccgagcgggccctgcgaacccgccacggaaacgttgccggacaagatgccctccccgctcaactacacatgggcctgcttctaccccatcgtgctctacccgcctcccgtcattccccctcccccgttgacctggagggagcggattaccttgaaggatgcgtctggaatcaccgccgagcccgttgagtacaacctgcactgcagtggatgccctgattgtccatag

SEQ ID NO: 503568 - DNA, 636 bp, Stenotrophomonas maltophilia
gtgcccacgcgaaaggccgtcgtgccgcctgttgacagggtagaacgatcgttctaccttggcgccgtgaacacaaccaccaccgaaacccagcagaagatcctggccacggccgaggcgctgatctaccagaacgggatccacgccaccggcatggacctgctggtgaagacctccggcgttgcccggaagagcatctaccggcactttgaaaacaaggaccaggtggccgctgcggcattgaacgcgcgcgacgtgcgctggctcacctggttccagcaggagtgcaacaaggccgacaccccggaagcgtgcatcctcggcatgttcaccgtgctcaagggctggttccagtccgagggctatcgcggctgcgccttcatcaacaccgcaggcgaggtcggcgaccccgatgatccgattcgccacatcgccagacatcacaagcagaagctgctggattacacgctggaactcaccacgcaactggatatcaagcagcccgccgcactggcgcggcagctgctggttctcatggaaggcgccatcaccgtctcgcgcgtgatgggcgactacaccgccgcagacaccgcaagggatgttgcagcggtgttgttggagcaggccaggcgctga

SEQ ID NO: 503569 - DNA, 627 bp, Stenotrophomonas maltophilia
atggcgaagcaccgccggcacgtgaccgccgcgcatgcagtcgtcgtgcttgctgcgggcgggagcacccggcttggccagcccaagcagctactgacccggcagggcgagaccctggtgcatcgcgtggtgcggttggcgctggagctcgcgccatcgcaggtgttggtggtggtgggcgcgaacgcacaggccgtgacatccagtatttccggactggatgccaccccggtaaccaacgatcactgggaaagcggcctggccagcagcctgcaggttgcaggcacccacctgctgcccgcggcggccgccgtgatggtcgtggcatgcgatcagcccgcgatcgagcacgcccatctgcaggcgttgcttttgggtgcccgcgcttcggcgtcagggtgcgctggcacccgtcacggaaacgtccttggcgttcctgcggtggtgccgcgcgaatggttcaaccaggtgggtgcaagcggtgaccgcggcttcggagcgcgcttgaggcagcttcccatcgatgccgtgcatgcccttcaagcaccggagctgggcctggatatcgacacgccagaagatctcgcgcgtgcgcgccttgcgggctggatcgatgccggggtgtga

SEQ ID NO: 503570 - DNA, 180 bp, Stenotrophomonas maltophilia
atgagcgagactgtacgtgcggcctacggcgcctctcctttcatacatcgggtcgcgaccctgtactcgcgctcggtgttcgcgagcgtggcggcctccgggcactaccagacttcggtaaaggagccgcgcgaacaagatcggcgtcgccacgatcacgcggcattgaagggctgctag

SEQ ID NO: 503571 - DNA, 2649 bp, Stenotrophomonas maltophilia
atgatttctgccagggacaggcgggagggaaaggctccccgcaccacttactgtagcccacggctttgttcgcttatcgcgggcttggcgcttacgctgggcgccgggttccacgtctcggcccaagatggactcttcaactatcaagagtatgagaagagggtaaagagcgcgcagtcgcttgccgtcatacctgcagatcagatactcggggatcgaacctccggcttcgacggcggcactgagttccttattgaagacgtgtccatacctggcaatttcgaccttccggtcagcatcgctcgccgatttggggttgaggcggtcaaccgaggatcccgctatagtgaggccaaagggctgacgctcttcgacgattgggaaatcgttgttccccacatgtcgggcgtgtggaccaaaggcgctggatggattacaggcgatcgaggcgcgcagactacgcagcgctgttcggtcaacacggccccctttctcctggagacctggggctacaccaacatcggtttcggtatcgatgtgaagtggagtggtggcaacggcgaggagcttctgatagctgatgatccgtcctacgcctccgcaccgggcttggaggcacccaaatggatgacagcctccaaggcgcggttcacgtgcctggcggcaacgcgcaacggttatccgggcgaggccttcgttgggcacacacccgatggaaagaagtacttcttcgactggggtgtggaaaggccctacgcgactgctcagttcagcgacggcgccgccaatcgttcggtggggcgcaagcgggtctatctgctggcgtcacgtgtggaggatcgctatgggaactgggtgtcctacagctacaacggggacaaacttaccagaatcgagtccagcgacagtcgccggattgacctgagctatgacggcgacggccgggtggccacggtaacggccaatgggcgtgtgtggcgatatgcctatgtgggagacacagacggaaatgacggaggcttgtcccaggtcacgcttccggatggctcagcatgggcctacagccatcacggacgcctccagtccagtttccctatccgtaaagccgacgatgagggcgggtgcgaaattcgggctggtactgagccccctcctacgcaaatgaccgtggtctctccctcgggtgcccggggcgtattcgacttcgaaatggaactgttcatccgctccgacccctgtaacggcctccttccgccgttctatcaaacttggtcactgaaaagacgcactatcaccgggcctggcctagcccctatggtcagcactcgaagctacaacctgcagttgccgggaagcgggcgctggtccagcctaaccaagccggatggaacacagattcgcgagcgctatggcgctaacccaggcctcgatgagcgcaagcttctgcagaagcagattctggacgcagcgggccaggtgcgacgcgacgaactgtacacctatacgtttggctccgaagcgggaccctttcctgtacgtgtaggtcgatcgatcgggatccaggcgggccagttcctggcaggtacgctcagtgcgctgagcgagagccaatcctctcaggatggcgatacataccgcgtggtctacagcgatttcaaccgtaagacccgtccagcacgcgtgacctataccggtccttctggtaccaaggctgagatacgagagcatctggatacggccagcccttgggtcttggatcaggtgctgagtgtcaaggaggctgcgtcgggaaagatcaccacacagtatgcctatgacggtatggccaagccgaatgccgtctatcgggccggggctttgctgcagagtgttacttatgcggcggatggcacgatcagcgcagtgcgcgatggaaaggggaacgaaacgcagatccaggactggtatcgcggcgtgccgcgattggtcatcaatcccgatggcactaccaatcgcatgtcggcagatggaaacgggtggatcacttccaccacggacgcgctacaaaggactacttcctatctgcacgatccgatgggtcgcgtgcgcgaagtccaaccgccggtcgatgagaaccagtgggccaagactaccatctcattccgtcaggtcgcggccgatgagtacggcctttcgccggggcactggcgagtcgataacgcccaaggggcacggcgtcaggaaacctatctcgacgcactctggcagccgctcctggtgcgcgaatacgatgcaaacaacgtcgccggcacgcagcggtgggtcaggaacgcgtacgacagcgaaggtcgcctgacgttcacctcttatccttcaagcgatagcacggtggcgaccggtacctggaccgagtacgacgcgctggggcggaagacctcttcctcccaggacagcgagcagggcctgctgattacaaccattggctacagcagcaatgccaccaccacagtcgtggatccactcggccatcagaccatcacccgattcgatgcgtttgaaggcccggactacgggaagcctgcgcagatcattcgtgccgatggcagcaaagtcagcatcaaacgaaatgcttttggccttaccaccgaagtagcccagtccgccaactaa

SEQ ID NO: 503572 - DNA, 3777 bp, Stenotrophomonas maltophilia
atgtacgctgaaaaactgcgcatggccgcggcggtgctgctgggcttcgtgctcatcctcatctgccaggtggcccatgcccaagcatggattgaactcaccgggccggcccagacatcctacaccgcgcctgcaacctatcagttgcagctcaagagtggcgtcacaggcaccggccccaaggccgagtacctgtcgggcatacagctcttgcgtaacggccaggtgatctcgcggcttccgaacgggacgtacaccgaaaacgggatctcgcctggaagctatcagtatgtctacagggctcttgccgtacgcaatgtcaacggtgatgagttcacgcgagagctgacgtcgcctgtcatcacgatcacggtggccgcgccaccggcccccttcgacggtgcggagtatgtttccgcgagctggccgaggtcagccgacaggggcacgccgttcagcggtgctgtcacgttccggaacaccggaaacacgacgtggagagcgggagatggctaccgcttaggtcaagccgaacgctatgtttccagtgctgtgagactagggatcgccgacgtcgccgttccccacgacgtgggccccggtgggacggttacctttgccttcaacggcgcggcggccaatgagaatggaccgagcaccctccaatggcagatgaaccgcaatggtgttcgctttggtagcaccagcagcgagcagacctttgagacgaccggaaggctcaatcgcggcgtcatgtatgagcaagaagtcccgaccagcatggaggcagggcggacctatcgcgtcaagctgaagttcgtcaatacgggcaataccacgtggtcggcgtctgcgggctatgcactgggctcctggaatcccaatgacaatgtcctgtggggcagggcgcgggtcccaatgccgaatgacgtcagtccacagctgcctgcgttctttgaattcgatgtggtagctccttcattgccgggcgtctacagcttccaatggcgattgctggaagagggcaaagagtggtttggtcgggaaagtgacaatgtccaggtcaccgtcaacgggccgccgtccaaggtaatcggcaatatcgatggcgtcaccagcgacggtcagatccgaggatgggcgtgttcgacgggcattgattcgtcgatcgacattcatgtctacaccggtggagccgccggcagtggcgggacgatcttcctgaccggtaaggccgacttggcgagtgagccggccgtagctacgtcctgcaaggccggaggcaatcatcgcttctcgcttccaatgagcaacgagcagcgccgccagcgggctgggcaaccgatctatgtccatggaatttcccccgttggacaacccaacaacaccattggcggctcgggcgcctttgtggttcccgcagcccccactggcacggtgtccgcgtctccggccatgtgccagattgcatcggatgcccagacctgcaacatcaccttggcctggtcggccacggattcacgcgcagagctaaagcgtgatggtggctcggtagtaggcagtggatccagcggctccgttgttgtgccaatcggcgccggaacgagccgttttacgctctcggttgccggtgatgcggttgccacggcagttgccaccgccaaggctgctcctaccgtgcccgtcaatccagacaatccggccccgacggtagcccggcgatacgtctacgacgacaatctacggctgtgcaagtcaatcgagcccgaagttggcgcaacggtcctcgagtacgacgctgccggcaatgttgcctggagcgtacagggcctggatctccctgatgcctcgcgttgcgatcgcgacgcagcgctttcctcgacgcgacgcgtggcgtatgcccatgacgcacgcaatcgcctcgtccagacgacctatccggatgggctgggcaacctccaggtccagtacaccgccgatggcaagctgaagtcggagacggctctcaatcagaatggcgtcgccgtcatcaccgggctcagctacaactcgctgggcttggttgtcggtcattccaggatcgttgggacggcaagccctagaacgtccaccttcgcctacaacagcctcggtcaacaggtgctcacgcgctatcctgacggctacgaggtccagcagaccctgaacgctctcgggcaagcactcaaacttcaggacagccaaggcgcagtgctggtcagcgaggtgagctatgcgcccagcggccaggcctcgggcatgacgtatgggaacggggttgtccgccgcgtgcgggaaaatgcccgtcaactcgtgagcgcagtgctggatctcaacgttgtcaatcttaattacagctacgattcagcaggaaacatcgtcaccattcaagacggcctgcgcggagacgtgggcactgtgtcactgggctatgatcggctcgaccgacttgcccgggccagctcaccttcgttcggtggcaatgggcagtatgtattcgcctacgacaccttggacaacatcatctcgatgcgcctcccaggaaagcgcgagcgcacctatcattacgatgaccgcaatcgcctgcaattgcttcgcgacaatgatggaaatggtgtatttgcaatcgggtacgatgcggcaggcaacatgacgacccgaaatggcaaggtgtttgagtttgatgcgggcgggcggctccgcgctggcggactcgtttccaagtacctgtatgacggtggtggcaatcgcgcagccgcagaaggcggggtttaccggacctggaactacttggcagatggcctgctgatcgagtcgaccacggggagcgatgtgtccgactatatctatctgggaagcaggctgcttgccatccggaccaacactcccgctggagtcacgatggtctaccagcattacgatgcgcattcgacacttgctgcgaccagcgacgccagcggcaaggtgctgtcccgccacatctggtcgccgtatggcgagccggacattgcgcccaatgcctcgacgcctggctatacggggcacctcacagatcctgataccggactggtgtacatggggcagcgctactacgatccgacgctcggagtgtttctaagcaccgatcccgtgactgcccatgagaatccactcggatccttcaatagatacaggtacgccaatagcaatccttaccgcttcttcgatcctgatggccgacgttccatcgtcaaaggtgaggaaatcttcattcagcctgaagacaagagtgttccggcacttccacccattcccaacacagtgggcgcggaaggcgtcagcacctcagatacatcattccacacctatgatgtcagaacgagcagcaacctgacgccctctcaagcggccgctggattaaaaaacaaccccacgcccggtgatgaccagccggcaagtccgaatggcaccaaaaacgacgttggaaacatcccggtgatgcctggcccgaattacgtcaaatctttctccgtagcttcgccagacccatcaaagttcacagacatcacggtcaactacacaatttcgggcaagcataagctcacagagggattcgtgatgcgctatggagagatcaggtcgaacgggaccacagtcctgaggagctatggcgagggcaacagctggcggcagaatcctctcatcaagccagtgtggggcccccaggttcagaaggtgtggcagcaaaatcatcgtgaaatcatcagcggggccagatga

SEQ ID NO: 503573 - DNA, 222 bp, Stenotrophomonas maltophilia
gtgcgaatttcgcatgcggtggggtttgaaggcggcctggtggtggttgtggtgctgcttgccgcgtggtggctgtccatctcctactgggacgcgttcctgctggagctgggcctgattgcattcttcctgccttacacctatgtctacaacctggtctatgacaaggtgagagagcggctgctgcagcggaattttgcagatcgggcaaagcaggcgtga

SEQ ID NO: 503574 - DNA, 276 bp, Stenotrophomonas maltophilia
atggatgcacttgtcaccggcgcgctgctggcttccgtcgcagccgtctcgttgggggtagtcaaactggtttcgtggtgcgtcggtcgggtaggggagtcatcccgctgtgctgcacgcgaagccgacttcgtagcccaggcccgcgccgaactggccgccaccggctggaccccggatcacgaaagcctctatcaggccgaaatcgcggccaccaagcgcggtgatctgctggccgcagcccgcttcgccgaagagcaggagcgcgccgcatga

SEQ ID NO: 503575 - DNA, 177 bp, Stenotrophomonas maltophilia
atgagcaggttgccctcattcgccgagctggcggagttcgatatgggtcttgcggcgtgcgccgcgctcatagtcgtttggctgggaggcgcgttgctctccatcgtgatcgagcaggcgtggctgggcattcgtcgtctgtggaagctcgcgaagggggcaggcaatggccgttga

SEQ ID NO: 503576 - DNA, 288 bp, Stenotrophomonas maltophilia
atgcccatctgccgcgtgaagtccgctgccgtcgaagagcggcacaacagcaagaccaacaccatcaatcgttcgcagaccgctggcctcgacctgggcaacggtttcgaactgccgttccgcgtcggcctcggccagcgtccgccgtacccggctggcgagtacgacattgatccgcagtccttcggactgagcgactacggcgatctggtgctgaagcgctacgtggacttgattcccatcggattcaaggctgcaccggccgcagcttcgtcgacgacgaagtaa

SEQ ID NO: 503577 - DNA, 246 bp, Stenotrophomonas maltophilia
atgtcccgcaacaccatcaatgggctgttgaacaccgtgagcaacaaggccaagtccgccgcaatggtggttggcgcaaccgtggcgctgtcgccgtcgtttgcgttcgctgctggcgatttcgacggcacggaagtgatcgccaagatcatcacctataccgctgtcggcgtctcgatggtcgccgccttcatcctgggccgctggaccctgaaggcgctgggtgtgattggcggcagcaagtaa

SEQ ID NO: 503578 - DNA, 1404 bp, Stenotrophomonas maltophilia
atgattgcgcggctgatagtggcgcttgtggcaggcttgttcgcgctggcgtctttgcctgcgtatgccgccctctatcccgatcaggggcgtgcgtacgctgcgtgtcagcgcgacattgctggcggccctgcaggctggcagccaatgaagtgcaagggcgacttttatagcaacggatcgggcgtctactacgcgtgggatgcatctggtagggccgtaggctgggattattcgtggggtgccaacgccacttgcaagagtcgtgtagacggacaggccggaatgatcaacggcacgctatacagcggcggcgtctgcgacaacggatgcaaggttcaaccgaaccttgatccgggcaccaattactccatcagggaaagcggcaaccccaacgcaatcgctgttcgttccggaacatggaaggccactggcgatgtgtgcagtatcactgacacgcagccaaagccggacccgaaagacgaatactgtcatacgacgtcttccggccatcaggtgtgcaagggcaaagacaggacctgcgttacctcaccgagcggtttccggacgtgtgcgagcgacacggcgaacgagaaggggcacaccgcgactaacaacccgcgtacggaagcaacaagcatcggtgcgcccaacacgccccccaatgcgcctaccaatcgcccaggcgaagattggaagcctagcgggcccacgacgacgatcacgaacaacaattccggcagcaccaccaacacgcagaactacaacaaccaaggcacgcctaatggcaaccagccgacaccgggtgatggctcaggtccgggggcaggaggcagcaacggaaatggcgatggcgggggaaaggatgaggggccaccggattcggcctccgatagtggcaactgcgcctcgccgccgcagtgcaccggcgacacgctgaagtgcttgcagctcaactacacgtggcgcgttcaatgcaacacgaagggcgctgaaatcaccggtggtgatgggtgcacagacaaggatattcccgtgtgcgccggtacgacctgtaaggcggaagcctatgcccagctgctacagcaatggcgtcaaggttgcgctgcgaaagcggcagcagaggggatggcgagcagggccgggagcatctctaatcctgacgatgacagtgcgctagagggcctttggatcaaacccggtgacagcgagggcggcgggatgaagttgcgccaggacttgatcagcgtcggaggcggcggctcgctgctgcccaacatctcgcttgagggccagtcgtggcaaccgccaccagagttctttgactcgctcgctgcaatccggctgcttgtaatcgccgcggcgacggtcacggccatgttcatagttgggaggaacatttga

SEQ ID NO: 503579 - DNA, 318 bp, Stenotrophomonas maltophilia
atgttcgactgggcacgaagcttcgcggacaacttctttgagaattcggcggatgtgcttcacaagctggtcaagctgaaagcggccatctggctgggacgtgtcatgtctgcagtgggactgggctttgctgcccagcacttcatctacaacccaattattgagtacgcacaggcggcatggtcgtcgatccccgccagcatcgccgcgtgggttcacgcggtcggcattgacgccgggatctcgatcatcctcagcgcgtacggcattcgtggcgctgagcgcatcttcatccagcgcaggaaccagagccaatga

SEQ ID NO: 503580 - DNA, 1176 bp, Stenotrophomonas maltophilia
atgatcggcgacaccgcagcaatttcactacttacgggccttccgggcgcgggcaagtcgctacgcatggctgaggcgataagcaagctggtagagaagggcgaacatgtgttcgcctgcaacatcgacggcttgaagattccgggcgtcaccctgtgggaggatgcgaagaagtggcgtgatcttccagccggatcgatcttgttcgtcgacgaggcgcaagcgttcttccccgagcgccggggcggtgaggcgccagagtacgtgcgcatgaacaagattcgccatgacggcatccgccttgtgctggcgacccagcagcccaactacttggacacctacctccgtggcttggtcggctatcacgagcatctgctgcggcgctctggcaggcaggagagcttcctgttccgtgagaatcaggtcatggacgtggtgcgacagaagctcgccacgatcaagcgcaactacgactacgaggtctacaagttcaagccgcgatacttcgcgtgctatgactcagcgcagacgcaccaaatcaagtatcagatgccagcattggtgaagcgtgcactgatgatcctgcccgttgctgcgcttcttgccgtgggcgcgtggtacaccgtcttccgcgatagcagtctggcgaaagcggcgccggccgaggtagaggcgccgtccacgacggcgccgaactcggccggcgcggctggcgccgcacccaaggcggagaagatcaccacgggcgaaggctacgttgcgaacatcacaccgcttgtcgcggatgtgccttggtccgcgcccgcgtacatcaatcgcccggtggtatccgacccgcacgtgtactgcatgagtaccgaggatagctgccggtgcgtcactgagcagatgacgcgtgtaacggtggccgatgacgtttgccgcgacattgcaaggtggggcgagccctataacccgttcaaggcccccggcgcagtccaggtgcgtgaggatcgcggtgttgccactggggagcagcagccagcggcacagccggaacggatcgagcagagtggggcggtcatcaacgggaacgccatcgctcgcggggatagggcgctcggcagcttcccggagacgccctcattccagagcagcagccacatgaccacgccagcgatccccacaaggctgtga

SEQ ID NO: 503581 - DNA, 438 bp, Stenotrophomonas maltophilia
atggtcacaaggattgcggcagtagcgctgctgtgcgtgatggctgcgccagtgggcgcgcagcagatttacaagtgcgtcaccaagggtggcgttgagtaccagtcgatgccatgcaccaatggcgaggcggcgaaaacgtggaatgtcgaggttgctccgcgctctgccgaatccgcagccaatgagcgtcgcctggacatgatcaggcagcagaattcggcggctgtcacaccccaaccagcaccgcgcccggcgcccgtctacaggaacggtggtggtggcggccagctgcatcacgtttcgcagtacaaggacgccaacgcgtgcgaggcagcacgtgctgaacgtgagcgcgtatttcgggcctatggcaccaatcgtccatttgacgttgggcgacgcatggatgacatggtctggcgggcctgcaagtga

SEQ ID NO: 503582 - DNA, 195 bp, Stenotrophomonas maltophilia
atgatggaaagcggccgcgcgatcggcaagcctcggaaacccttggccttcaatgctgccagcgtggtgaacctctccgatgccttggcacagcgccagaaaaagcggtcaccgggggcgatggctgggcccgacgccgagccacctgcagcagtcctgccaataccggggccgaaacgccaccagcgcgtgtga

SEQ ID NO: 503583 - DNA, 336 bp, Stenotrophomonas maltophilia
atgcgcctgcatcgatccgtcgcggctgtgttcctgctggtcctggccggctgcagcacaacctcatcctacgaaggtgcggatttctccgcctcctcgcagtgccgcatgcagtgccaggccgactatcgcagctgcatggcgcggggcagtatcggcagcaacgacttcagctgcgaacaacagatggtgccggcgccggacaatcgctgcaaggacattgccaaccccgagctgcgccgttcctgtgaactgaagacgcacgactgcgcgatacgcacgccgatcatgtcctgtagcgaaggccgcgatacctgcatgagccgctgcggctga

SEQ ID NO: 503584 - DNA, 396 bp, Stenotrophomonas maltophilia
gtgctgcagtggtcgcgtgttttcgtattgctggtcgttgcgctggcgtgcagtgcctgcgggccacgttatttcgtcgaaccgccaacccacgaagcggggaagatctgcgcgtcggtctgcgagagccagaaggcgacgtgcgacttccacaaccgcgcccgcgcggaatcggatcagcgcagctgcgaaagcgagaagagccggatcatcagccgttgcagtggtatcgccgacgacaagcagcggcacaactgtgaagggggcaacggcgccggcacctactgcggttccccggcgcttccttcatgcagtgctccgtacgcccagtgcctgctctcctgcggcggcaccgtgaatgaagcccgcaccgacaccggcattcccgtgtactga

SEQ ID NO: 503585 - DNA, 822 bp, Stenotrophomonas maltophilia
atggccgacgaagcccccgacacgcccagcaaggaggcgctgaaggcgctgacccagtaccgggagcgggacaccgcgccgcccgaactcctgtcgacgcttgaacggcatggactgttgtggcccgtcgaacatccgggccatgaggccctccaggtgcggatgttcgccgcctatgcccgcgccgaccgccagcatgtggcagacaacttcatcctcggcgtgcaggagaaccgcagcgacctgcgcgccgggctgtcggcgtatgcgttcatggtgcacttccccaggcatcaggagcagccacaccccagcctcgcctgtgcggtctgcggccaggtccgcgaaggcagattcgacccgaccacctgggcgcgcgtccgccacaacatcggggtcgtgctcggcggaagcgtaaacgccatcaccttcctgttggaacaacacaatctgacgcccagacgggcgcccggcgacatgagcacactggtggcactgctgcggctgctgcaccacgagagcgacgccaaggacaccccgtcgatcatcgtcaaacgcgtgcgcgcgctgccgggcctgaaactgtccgtcgagcaggcgcgtcacctgctggatgccctgggccatgccgggctgctgcagacccccgagcatcccggcctggcgcaacgcttcacccgggtcggcctggcaccgcgcacgtcgcgctcttcggactggagctatcccgtcgatttctggaaaggcgcctacggcatcgacagcggggccctgcgcttctggttcgctcaccatcctgcgctgctggctgcgctggactga

SEQ ID NO: 503586 - DNA, 1803 bp, Stenotrophomonas maltophilia
atgcgcaacctgccaccgttcctgcgcatggtctggaagaccagccccgcgctcaccctggccagccttggcctgcgcctgatccgtgcgctgctgccggtggcgatgctctacgtcggcaagctgatcatcgacagcgccctgaacctgagccagcacgacgctggcttcccgccgctgggcgaagcactgtccagcggcatactgaatccgctgctgggcctgctggcgctggaattcggcctggccatcgcctcggatctgctcggccggctggtcagctacgccgatgccctgctctcggaactgttcgccaacgtcaccagcatccggttgatggaacacgcggcaacgctggatctggaggacttcgaggacccggacctgcaggacaagctggaccgtgcgcgacgccagaccatgggccggatgaacctgatgagccagttgttcggccaggtgcaggacgcgatcaccgtggccagcctcgccgtcggcctgctggtctacgcgccgtggttgatcctgctgctggcgctggccctggtgccggccttcatcggcgaatcgcacttcaacgcggccggctacagcctcaacttccagtggacgccggagcgccgccagctcgactacctgcgccagctcggtgccagcgtggaaacggccaaggaagtgaagatctacaacctgcaccgcttcctggtggagcgctaccggcgcctgtcggtggcgctgttccaggccaaccgcgccctggcccggcgccgcgcgttctggggcacgctgctggccgcactgggaacgctgggctactacaccgcctacgcctacatcgcctggcgcacggtgcgcggcgacttctcgatcggcgacctgaccttcctcgccggcagcttcctgcgcctgcgccagctgctggagggcctgttgatcgggttctcgcaggtggccagccaggcgctgtacctggatgacctgttctcgttcttccagatccagccggaaatccactcgcgcgaaggtgcagtgcgcgtgccgcagccgatccggcagggcttcgagttcgagaacgtcggcttccgctacccggatgccgagcaatgggcggtgcgccaccttgatttccagctgcaggccggcgaagtactggcgctggtcggtgagaacggcgccggcaagaccacgctggtgaagctgctggcgcggctgtacgaaccggacgagggccgcatcctgctcgatgggcgcgacctgcgcgactacgacctggacgacctgcgcgccaacctcggggtgatcttccaggacttcgtgcgctacaacctcagcgccggcgagaacatcggcgtcggccaggtcgaggcgatggacgaccaggcgcgcatcgccgacgccgcacggcgtggcatggccgaggaagtgatcgacgacctgcccggcggctacgaccagctgatcggccgccgcttcaaacagggcgtggacctgtccggcggccaatggcagaagatcgccatcgcccgcgcatggatgcgcaatgcgcaggtgatgatcctggatgagccaacggcggcgctggatgcgcgaagtgagttcgaggtgttccagcggttcagggaactggcggataatcgcaccgcagtgctgatttcccaccgtttctcctcggtacgcatggccgatcgcatcctggtgctggccgatggccggatcgaggccagcggcacccatgaagagctgatggcccagggcggccgctacgccgagctgttcgagctgcaggcggccggctaccgctga

SEQ ID NO: 503587 - DNA, 408 bp, Stenotrophomonas maltophilia
atggagttcagaacgtccgtgctgctcgtggccctcatcgccacgcccgccatcgcccacgccgaggtctgcctgtctgacagcggactcgttgtgccgtgtcccagcctgttgccgcatccggtgacggccagattcgagatcggcaccctgccgcgtgtggctggctcgccgtcggaaatctacatcacaggcggcggccaggtggatggaacgagtaatttctcggtctatgccaatggtcagttcctgtgccgtaccaatgacaattacgacggtggcaacaccacgcccatccgccattgcaccgcgaccatcgcaacacccgggacctatgtgatctcggcgtcgcgcaacagtcctggcaacttcctcgcgccgatggacgaagtgatcaacgtgcagtaa

SEQ ID NO: 503588 - DNA, 294 bp, Stenotrophomonas maltophilia
atgatcaccattaccgccgaacaggcacgcgccaacgccgatgccgccaagcgcccgatcgaacagttctaccgcgacctcgacaactcgatccagatcggctcggagaatggccgccgctatctcgtgttcggcttcagccaggtgatggccagcgagcagctcgtcgaagacgtgaccgcacaactgctcaagaatggtttcggtgtcgaacggttgttgagcgattccgaacagcactacatccgcatcagctggggatctgccgagccgtcgcgcctcagcgccggctga

SEQ ID NO: 503589 - DNA, 618 bp, Stenotrophomonas maltophilia
atggcagccggtccgggggcgggcagggagagattcttcgagcttcttgagtcggagttctttccgcgtctgctgcaggaggggttcgttcgccaagggcggaccttccgcaggattcgcactccgttgattcatgtcgtcgagtgccagcccggatccagtggggagtggtgctacctggagatgggcgcgcatctttcgttcctgcctcagcacggcggtggcgaattctcgccgacgaccattgacgaatccggctgtgtgttccgggagcggcttgccggtgatggcgcgattgcgggaggtggctgggcctatggggcttccgagcaggacagtttctcctcagtgaaggcgctttgctcagcctgggaaagcgccggcagccacttctttgaagctcaccaggactttccggataactatcaggccatgctggacaaggccgatttcgagcaggctcgggcgatcgagttgctcacctttgcgcgcgtagcggccaatctgcagcgtaaggagcaggcattggcgctggctcgcctggggctggagcgggcggctccggctgcgagctcgctcagggcgcagttgcgccgattcatcgaaaacgaagggtga

SEQ ID NO: 503590 - DNA, 990 bp, Stenotrophomonas maltophilia
atggtgagccattggctgccgatgctggctggactggtggccgcactgatggcggcgctggtgctgtggccgctgcgccaccacggtcgccgcggtttcgtggtgggcgtgctcgcgctgggcgtggccggtgcctgcctgtatctgctggttggtgatccgcgtgcagcacaggtacaaccaaccccgtcggtagccaccctgcgcgatggcgtgcaggccctgcaggatgcactgaagcgagacccgcagcgagccgatggctggacgctgctgggccggtcgcaggccgaactgggcaacgccgcagccgcagcggatgccttcgcacgtgctgccgctctcgccccggaagaccccggcgtgctggtggaagcggcgcaggcacgtgcgcaggccgatgccggcaagcagttcgatgacaccgcgatggcctggttgcagcaggctcgtgcgctggcgcccgatgcagagcgcgccagctggctgctgggcatcgccctgcgccagcgcggaaagaatgccgaggctgccgacatctggagcggcctgctgccacggcttgagcccggcgccgcgcaggcgctgcaggcgcagatcgccatcgcccgcgaagctgccggccaggcgcccgatgctgccgctgcggcgccaccggcgctgctgcaggtgcgcgtgcaactgcctgcgctgaacaacgccgagtggcccgccagcacccaggtattcgtgctggcccgcgccgtgggtggaccgccgatgccggtggccgcacgcaagctgcctctggccggtttcccggccacggtcgggctgggcgacgcagacagcccgatgccgaccgcaccgttgtccgcgcatcgcgaagtggaagtgctggcacgcatctcgcgcagcggcagtgccaaccgcagcgaggacgatctgcagagcgtgccggtgaaggtgagcctgccgcatgaaggcgtggtggagctgcggttcccgtag

SEQ ID NO: 503591 - DNA, 1584 bp, Stenotrophomonas maltophilia
atgattgatcagacagtcgtagaactgtcgcggctgcaattcgctctgaccgcgatgtaccacttcctattcgtcccgctcacgcttggcctgtccttcatggtggccatcatggagagcgtgtacgtgatgacccgcaagcaggtctggcggcagatgaccctgttctggggcaccctgttcggcatcaacttcgccatcggcgtggccaccggcctggtgatggaattccagttcggcatgaactggtcgtactacagccactacgtgggtgacatcttcggtgcgccgctggccatcgaaggcctgatggcgttcttcctggaagcgaccttcatcggcctgttcttcttcggctggaagcgcctgagcccggtcaagcacctcactgtgacctggctgatggcgctgggcaccaacctgtcggcggtgtggatcctgatcgccaacggctggatgcagaacccgaccggtgcggtgttcaacccggaaacgatgcgcatggaagtggtcgacttcgctgcggttctgctgaacccggtggcccaggccaagttcgtgcacaccgtcagtgccggctacgtgaccggtgcgatcttcgtgatgtcgatcagcgccctgtacctgctgcgcagcaagcatcgggacatggcccgccgttcgttcgcggtggccgcagccttcggcctgctgtcctcgctgtcggtggtggtgctgggtgacgagagtggttacgccgccagcgaacaccagaagatgaagctggccgcgatcgaagcaatgtgggaaaccgagcgtgcaccggccgacttcaccgccttcggcattcccaaccaggacacccaccagaacgactacgcggtgaagatcccgtacctgatgggcctgatcgccacccgttcgctggaccagccgatcccgggcatcctggaactggtggagcgtgccgagcaccgcatccgcggcggccagatcgcctatggcgcactggaacgcgtgaagaagaaccggaacgacctcgaagcacgcgagatgttcgatcgccactggcaggatctcggccacggcctgctgctgaagcgctaccgcgaagacatcctcaacgcgacgccggaggaaatctccaaggccgcgatggataccgtcccgcgcgtggccccgctgttctggaccttccgcatcatggcgggcctgggcttctacctgatcgccttcttcgcactggcgttctacttctcgtgccgcaacaacttccaggacaagcgctggttcctgaagctggccgtgtggtcgctgccggcaccgtggatcgcgatcgagtgcggttggttcgtcgccgagtacggccgccagccgtgggcggtggatggtgtgctgcccaccttctacgcggcatcgggcctggcactgcatgaaatcctgaccacgctggcggtgttcaccagcttgtatacggtgctgctgatcatcgagatcaagctgatgctgaaggcggtccgcaagggtccggacgacatcctgccctcgctgcaggccgatatccgccccgcttcccccaatgcagtcgcccccggccaggcctga

SEQ ID NO: 503592 - DNA, 1155 bp, Stenotrophomonas maltophilia
atggaattcattgcacttgattacaccacgctccgcgtgatctggtggctgctgctcggcatcctgctgatcggctgggccgtgatggatggtttcgatcttggtgtcggcacactgctgccgttcgtggccaagaccgatgaagaacgccggctggtgatcaacaccgtcggcccggtgtgggaaggcaaccaggtctggctggtgctgggtggtggcgcgatcttcgccgcatggccgccgctgtatgcggtcagcttctccggcttctacctggcggtgtttgcgatgctgttcgggctgatcctgcgcccggtcggcttcaagtaccgcagcaagctgccgtccaagcgctggcgcgacaactgggaccgcgtgctgttcatcggcggcctgctgccgggcctgattgccggcgtcgccgtgggcaacgtgctgctgggtgtgccgttccacttcgatgacaccctgcgcgtgacctacaccggttcgttcttcggcctgctcaccccgttcgcgctcatcgccggcctgatcagcgtggccatgctggtttcgcatggtgcggccatgctggtgatcaagaccgacggcccggtggccgaacgtgccgcacgttacggcagcgtcgccgccatcatcagcttcgtgctgttcgctgtcgccggtgcctgggtggccttcggcctgccgggttaccagatcacctcgcaggtggtcaccgatggcccgaccaatccgctgctgaagaccgccgaactgggcacggccgccggtggctggctgcgcaactacagctccatgccggcgacgctggtgttcccggtgctgggcctgctgggcgcactggccagcgcggtactgctgcgcgcacgtcgtggtggcctggccttcatcgcctcgggcgcctccatcgccggcatcatcctgaccgtcggctttgcgatcttcccgttcctgctgccgtcctccagccagcccacctccagcctgactgtctgggacagctcgtccagccatctgacgctgtgggtcatgctgctggctacggccatcttcctgccgatcatcatcgcttacaccacctgggtgtaccgcgtactgaagggcaagacgacggtcgaggaaatgggcgacaaccccaacgcttactga

SEQ ID NO: 503593 - DNA, 2028 bp, Stenotrophomonas maltophilia
atggttgtccaccgccggctggcgctctgcgtcggccttgcctgtaccgccctggcctgggccagcagcgccgccccgcctgaccgcgaggcggccctggccgagatcggccgctaccgcgaccaggcccgttggctggatgcgctcggcgcgatcgagcgcgccagccagcagcagcccaacgacgacctgctgttcaagctgcgcgtcctgaccctgggcgacatcggcaatgcctggcgcgcctgggagctgtaccagcagcgcccgcaactgttcgacgctgctcagaagcaacgcatcgaaggcgactacctggccaagctggtggtctggagcctggcctacagcagcagcgaagacagccggctggaagaagccgaatcgaccctggcgcgcatgcagcgctacctgggcagcgaaggcaccttacctgtgcaggcgccattgcgcatccgcatggaccggctgatcctgctcaaccggctgggccgccatgcgcaggtgcgagaggaagcccgcgcactgcaggctgaaggccatgccctgcccgactatgttctgcctgcggtcggcgattcgctgatgggcacgctgcatccggaagaagccattccggtgctgcaggcggccgtcgcaggcgatccgacgcgcgacgcctcgcattcggaactggcttacgcctacctggaaagcgagcagcaggaaaaggccgtcgacctgctgcaggcgtggcgcgacaaggaacctgcctggcgctggagcaacggcaagtcgccgtatccaaactggtcgcgctacgaagccgacctcaacctggcgatggtgcgcgcctacagcggtgacctgcccaccgcgcagcgcgatctggaatcgatggtcgacatcgcaccgggcaacggcggcctgcagagcgcgctgggcagcgtgtacatgatgcgcggctggccacgcagggcgctgcaacggcaacagatggcgcatgcgctggacccgcgcgacatcgagccgcggctgggtatggaagaggcctacgtcgccctgcagcgcgatgacctggcgcggccactgcatgacgacctgctcgcgcgctatcccacccagcctgccgtcgaacgcatggaccaggcctggcgtgcacatcgcggctggcagctgaaggcatggaccgacatcggccgcagctccggcggtggcggcacttcgccactgggcaacaacgaccgtcactacggcatggaagtgcagacgccggtgctcgacgaccgctggcggttgttcgccttcgccgacaggcgctcggtcgacttccaggaccagcgcatcgacccgctgtggctgggtgcaggcgtgcgctaccgcttcggccggctggatgcggaggccgcggtagtgcgtgccaacgatcacgtcggcgataccggcctgcgtgccagcgtgggctggcagttcaacgactcctggcatgccgggctgatggctgcgcgcaatgatccggaggcctcgatgcaggcgcgcgcggccggcatcaccgccgacagcgtgggcgcgcaggtggactaccggcgcagcgaacgcacccattggatgttcggcgccagccgcttccgctacgacgatggcaatcaccgcgaactgttcagcaccagtgtcgagcagcggctgctgactcgaccacgctggctgatcgatggcctggccagtgcctataccagccggggcagccgcgacgatgcgccctacttcaatccgaagcgcgaccgcatggtcgagatcggcctgcgcgtcgaccagcagctgtggcgacactatgagcgccatttccggcaccggctgacggtctcgctgggcgactactggcaggacggcttcggcagcgcactggtgccgtcggtgtcctacatgcatgagtggcagatcggccagggccgcgtgctcgagtatggcgtgcgctggtcacggccggtctatgacggccaccgcgagcgccatatcggcttcgaagccgcactgcgctggggagactga

SEQ ID NO: 503594 - DNA, 1257 bp, Stenotrophomonas maltophilia
atggacatgcatccgttgctgcaggtcctgttccagttcgccttctactacccgatggtgatggcattcttctggatgtcgggcggcctgtattactacttccggcgcgaacgccattcgcgcccacgcaacgacccgcctctgatggtcgatccaccgttcgcgagcctgctgattccctgccacaacgagtcggcaaacctcgacgacacactcggcgcggcgctggcacagcgctacccggccgactatgaggtgatcgccatcgacgacggcagcagcgacgacacgggtgcgcggctggacgccctggcggcaaaacacccacggctgcgcgtgctgcacctggaccgcaacctcggcaaggccaatgcgctgcgcatgggggcgctcgccgcacgctcggaatacctggtgtgcatcgacggcgacgcgatgctggaagaacacgcgctgcactggatgatctggcacctggtctgcggcaaccgggtcggcgcggtcaccggcaacccgcgcatccgcaaccgctccaccctgctcggacgcctgcaggtggccgagttctcctcgatcatcggcatgatcaagcgcgcgcagcgggtgtacgggcgcatcttcaccatctccggcgtgatcgccggcttccgccgcaccgccctgcaccaggtcggctggtggtccgatgacatggtgaccgaagacatcgacatcagctggcgcctgcagcgcgcgcactgggacatccgctacgaacccaacgcactatgcttcatcctgatgccagaaaccctgaagggactgtggcggcagcggctgcgctgggcccagggcggcgtggaggtgatgctgcgccacgcccgctcgctgctgcactggaaggagcggcgcatgtggggcgtactgctggagtacgtgctcagcgtgatctgggcctacaccatgttgttcatcgtggtgctgtgggcgctgggcaagttcatcgaactgcccccgcaactgcatatcgccagcctgctgccggagtggcatggcgtgatcctggccctggtctgcctgctgcagttcgccagcagcctgatcatcgaccgtcgttacgaaacacagattggacgcaactacttctgggtcatctggtacccgatggcgtactggttgatcagcctttccaccaccctggtggcgttgccgaaaaccctgctgcgccgtcgcagcaagcgcgccacctggaccagtcccgatcgggggatccgatga

SEQ ID NO: 503595 - DNA, 471 bp, Stenotrophomonas maltophilia
atgaacgcacaacgcccgtccaaccgcttcgactcgcggatgatccgcaagccgcatcgccaaccacgcttccaacgcaccgcctggggcttcgtcaccctcgcgttctgggggttctacttctacctgtgggccccactggtcaccctggtgtcgtggctggtcggcggccagctggcctggcagcagctgtacgaacggcaaagccagttcgacccctatgtgctggtggcgttgccgctgatgctgctgtgcgccagcgtactgctgatcggctgggccgagtacaaccgcgcgcgcttccgcggccacgaacggcgcctgccgcggccgctggccagcctcaacgaagtggccgccgacctgggcgccagcaccgggctggccgagcgcctgctgggctgcaaggccgccacgctgcacatggacgatcacgcgcggccgatcggcatccgccgcgaggtgctgtaa

SEQ ID NO: 503596 - DNA, 1158 bp, Stenotrophomonas maltophilia
atgaccctgcacgccgccaacgtcgcctcgccgttcccgcaacaggcgctgccgccgtggcggcgtgcagtgctgaaggtcggcagcagcctgctggccgccgatggcggcggcctgtcgccacgccacgcgctgggcctggcccagtttgtttccgccaacgtcctggccgggcgcgaggtggtgatcgtgtcttccggcgcggttgcggcggggcgcgcgatcctgccgcgggccgatgaacccggtgcggcgatggcggcgcggcaggccctggccgcgctcggccaggcgcagctgatcgggctctggcagcgcttcttcgagcgccccgtggcgcaggtgctgctgacccacgacgacctgcgcaaccgccgccgctacctcaacgcacgcgccacgctcaatgagttgctgcggctgggcgcgttgccggtggtcaacgagaacgacaccgtgtcggtggacgaactcaagctcggcgacaacgacaacctggccgccaccgtggccgcgctggtcgatgccgatgcactgttcattgccaccgacatcgacggcctgtacagcgcggatccgcgcaccgtggccgatgcgcggccactgcacgacgtgccggaactgagtgacgaggtgctggcgatggccggcggcgcagggtcgcgcgccggtaccggcggcatgcggaccaagcttgaggcggcggccaaggcgggtcgtctcggcatcgagacctaccttttcaacggccgcagcagcgacgtggtgcgtgcactggcgcaggaccgcctgttcggcacccgcatccacgccgcgcgcagccgcgaggcggcccgcaagcactggctgcggcatgcaccgctgaccgaaggcgcgatcgtgatcgatgccggtgcggcacaggccatgcgcgagaagggcgcctcgttgctgcccggtggcatcaccggtgcggagggcgcgttccggcgtggcgatatggtgcaggtgtgctggaatgcaccacagggccgtgtctgcatcgcccgcggtgtcagccagtacgccgccgatgatgtgcgccggatcgccggtcgccattcgcgcgacatcgaggccgtgctgggctacaactacggtggcagtgtcgtccatcgcgacgatctggtgctgccatga

SEQ ID NO: 503597 - DNA, 606 bp, Stenotrophomonas maltophilia
atgatggaccattccgatcactggactacgattcccaccctgcgcggccagcacgtgacactgcagccgctgcagcccgagcatgtgcctggcctgcgcgccgccgtggagggcagcggcctggaccagctctggtacacccaggtgccttcgccggagcgggtcgagcactatgtgcaggccgcgctgcaggcacaggcagaaggcaaggtgctgccgttcgtgatcctcgatgcggcgggtgacatcgtgggtaccacccgcttctacgacctggatgccggcgtgcccaagctcagcctgggctacacctggtatgcaccgcgcgtgcagcgtactggcgtcaacaccgaaaccaagctgttgctgctgcagcacgccttcgaaaccatgggctgcatcagcctggtgctggaaaccagctggttcaacttcacctcgcgcaccgccatcgcccgcctcggcgccaagcaggacggcgtgctgcgcaaccacaagcggcacgccgacggcacgccgcgcgacaccgtcatcttctccatcatcgatacggaatggcagggcgtgaagcgccacctgcagtaccgcctggacagccacgcatga

SEQ ID NO: 503598 - DNA, 1512 bp, Stenotrophomonas maltophilia
atgcccgctacgggtgatatccacgtcgtccacaacgcacgcctgggcgcctacgtggcctaccagctcacccaccagaatacggaggacggtagcttcgccgtccttgcactggactgggtgggcagtgccctgccggatgccgccgccgttgcagccatgcaacctgcccgcttcagcccgttccgtgcggcgcccgcgatcctgcaccgctgggtaggcaagcgcgtcccgcgcgatttccagcaggtgggctggcgcgagccgctgatcgccgatcatccgaaggcttacggcagctggccggatggcgccgaatgggtcgggcaacgcaagtgggatgcgctggataccgatgccgtgcgcgccttccacgccgcgatgtccgcgccgcaagaccagagcgtggtactggaaagcgatgcctttccggtgcggcgctgcacccgccaactggacagcgcaaccctgaaccgtgcgccgtcactggctgtattcgatgccctgccgctgctcacgcagctggagatcggcacaccggtgccgggcctgctgccgtggctgcgtacacggccgttgatccataccttgcagatcagtggcctgcagcagaccgacgtcgatgtgcgagaaaccaggctcctgcagatgacgatcgatgtcaccggcctgcgctcgctccacctcaacccgcagctggatcgcctgacgctgatcggcagcatcgatcccgcgctgatcatccacgccgaggacgaaggccgctggctgaccctcatcagtaccgatccgctgctgccaggcctgggcctgacgcagctcggtgaactgcagctgcgggaagtacgtgaactcgacgccgcacgcatcgcccagcagttcccgcaactgcaatcgctcgcgatcaacggcgccccctgcctgctgcatcagctgcagtgcctcggcgatctgcagcagctgcacaccctcagcggcagcgatctctttccgcctgctggttcggtgtttccggcaccggaatgctggccgcgcttgtgccggctgtggctgcacagcttaccggccgatcttggcaccgccatcaggaaggcctacaagggcgaggtggcaaaaggcctggatctggatgtgggccagctgcgcaagcccgaatggctggccgcaaatctcgacaaccccttccgcgactgggagggaagcacgcacatcagcactgcgcaggcgaagaaggcaaccacgctatatcgcaaagcctgtagggatgcattgaagctggccaccgatgaccgcgctgctgcagaactgaccgcagcgctggcgcagatcggccgcaactacaccgaaggcttcaacgcactggaccgccgcagcggcttcatcgaaaccgaagagcgcgagcagatctacatggcgtggatgggcatcgtcgatgcagtggatatgcgaagtgaaatcgcgctgggccgcgaggtgctgcgcgctgcaatgaatgaggtcaggacattctga

SEQ ID NO: 503599 - DNA, 498 bp, Stenotrophomonas maltophilia
atgaagacccccagcactgataccggccgtcttgcccaggcctcgatcctggcggtgctggccgccggcatgctgccggcccagttgtttggcggcctgttgttcgcgcttgaattcaggcgcacgccgatgcctgcgctcaccggcggtgggctgatgttcgtgttggccgtgtgcaatgcgatcgcggtgttgctgccgatggcgctgatcctgcagtctcaacagcggctgcgccggactggattcgtgctggtcggcttcggactgggcgcgctggccatggccacctgcacctggccgggcgcggacaatggtccgctgctgcagcgcctgcgctatgtcgacaccttcgacgtgatcagctatgccttgcaggtgctggccgcaggtggcttcggcctggtcgccgggctggccttccatacggtgttccggctgtctctggagggccgttccgggcatgccgcgccgccgccgccgggggagggggcctga

SEQ ID NO: 503600 - DNA, 207 bp, Stenotrophomonas maltophilia
atggatctgaacgacgatgttgtgtccggctggctcaatggctcggacgatgtggatgggtgtgccaaccctgcgggttcgctgttcatctatggcgctggggccaccgagtccgcgctcacgtcggcctccgacaccctgatcaccggtggcggtaccgagtgcaccaccacgatgtcggtggtcaatcactgcctgtgctgttga

SEQ ID NO: 503601 - DNA, 2898 bp, Stenotrophomonas maltophilia
atgaccgcttctccggctgcggccgcgtttgcgcgcatcaccgaacattttcttgtcgacgcgcgcaccgcgttgacggctggcctgcatgaccccgccatcgatctgcggccagacgagcgcgcactcctgcatgagcagggcgatgcggcgcttcgtgaacatgcccagctcaagctcaaccgcgtactgctgctggaactgcatgcggccgcgcgcggtggtgacatcggcccgcttgagggcgccggtgcgctggacgaattcgtggccctcgccaccggcgagggcttccatgagcatctgcagcgacgctacccggtgctgctgccgcgactgtcgcgcatgctcgaaggacaatgtgcggctgtggtggagctggccgcgcgcatcggccgtgatcgtgcgctgctgacggacctgctcggcagtccggcaggatcgctgcgtgcgatcgcgctgggacggggtgacctgcacggcggcggccggaccgtggcacggctgcagttcgatggcggcgtgctgatgtacaagccgcgctcgctgcgcatcgatgcggcgctcgatggcctgctcgctgcggtctttggcgagggcccggatcgggtgcgcgtgccgcgtgtggttgatcgcggcagccatggctgggccgcgtttgccgcgcaccgtcattgcgccgatgacgaagaactgcgtgcctactaccgcggtcttggccattggctggcgatcctgcgcctggtcggtggtaccgacatccatctggagaacctgatcgctgtcgggccggtgccggtcgtgatcgatgcagaaagtgtgttctcgcaggtgatcgacgtcgagccgtcgggcctgggtgacgcctacgacacggccatcaagctgatgcgcaattccgtactgcgcaccggcattgtgccgttccgcaccaccggcctcggcatggaaggtgtggacctgtcggccgccggcgcattgccgggcgagcagccgcgggtacaggtgccggtgattgtcgaggatgggacggggccggcccggctgggcatggtcgaggccgaagtcgccatcgcgcagaaccaccccagcccacagccggatgtttcgttgtactgggaccacatcagcgagggcttcatcgacgccagtgggcgcctgcgcgcgctcgatgcaaagggcgaactgatgctactcctggcggctttcgaaggctgccaggtgcgggatgtgcggcggccgaccatggcctacgccgagctcgggcggatgctctggcatccggcatcgctgcacaaggaagcccaggcggttgaacgcgcgatcgatctgctggtgcgcaatgcagcggtgtcaccggctgcgccatcggacctggaaaccgtacgtggagaagtggacgacctgcgccacggtgacattccgatcttcacttcacagctggacgcgacccgcatccgctccatcgccgacaactggcgttcgatgcgcatcgacctcgaagacgtgaccatccgcagcacgttggtggccaccgacctgaaccagcacgcgctggcccgcgccgaggctcggtccggctatagctacgccgcgcagcagcctcgcgcggacgatctggacctgcgccgacgaacgcttgcggcacgcgcggtggagaatcttctgcgtctggccgtgcacggtgaagatggttcgatgacctggatcacgcccgaggtgacccgcacaggatggaccgtccagccggtgcagcccgacctgtatttcgggctgggaggcattgcgttcgcgctggcggcctaccgccgggaagtggagcagggccgcgccgatccggtggctgggctggatccggccatcgaaggcgccattgcggtgttccagaccatgtgcgagcgccatcccgccgggatcgatggtggtttcgtcggcacgggctcgcagatctggaccctgctggcattgcatgatctgctgcagcgccccgcactgctcgcgctggccgagcgctgtgcggaaggagtggaacgtcgcggtttccaggggccggtgaaattcgaactgattgatggcgtgtccggcatgatcctgccgctgctggcgctggccgaggccactggcagaacgcgctggctggagttggcggctgcggccgggcgccgcatgcaggaagcggcgatcttcgatgccgacggcgcccgctggccgacgccacagttccacgagccgattggtggctttggccacggcgcgatgggcatgggctgggcgctggcacggctggcgcgttcggatgccggcagcgtgcccgagcgggccgcctggcggcagttggccgaaggagcgtttgcgttccaggcggcgctgttcgaaccgcataccgggcactggcgtgacatccacctgcaggatgggcagaagaacttcccgacctggtgccatggcagcgtcggcatcggtctggcggcggcggatctgtatgcccgcaccggcgatcccgcgcagttgcgtgacatgcggcgggctgtggccgacgcgcgcggcaaatgggggttcagccacaccctgtgccatggcgatgtgtccacccgggagttgctggtgctggcggctgcgctggatccggaggggtgtccgtatccgcaggacgaggccgccatcgagatcgtttcttcgatcgaggagcaccagggtatggtcggcgggctgacccgcgcggcctttactccgggcctgatgatcggcctggcagggacgatctatggcttcctgcgcatgcatccggcctgcacgctgccgtcgccgctgctgcaggagacggtagcggcgcgggtcgatgcgtcggcgtcgcgctccagcgccgcgcaggaccgagcggtgctggccgaggtctga

SEQ ID NO: 503602 - DNA, 300 bp, Stenotrophomonas maltophilia
atggacaacgtgatgggaatcgccctcagcgggatgcgtgcggcccagcagggcgtgcaggtggccgcgcacaacgtggccaacctggcgaccccggatgcccagcacctgcagttgcagcgcattcccaccgagcagggtggggtgcaggcttcggtggcgtccatcggcgccgatgccggcgcgccgctgggtgatctgctggccgcgaaagccgaggtcgtggccttcgccgccaatgctgcagtgatccgccgccaggaccaaatgctgggctcactgctggatcgggacgcctga

SEQ ID NO: 503603 - DNA, 2562 bp, Stenotrophomonas maltophilia
gtgcatatcaagactccgttggccgttgccatcacgctgaccctggcgatgggggccgcagccccgctgcaggcggccgggcagcaggcggttgccgccaccggcgccgtggccgctgatgcggtcgacctggaccgcatcgaagtgcgcgcccagctcgaatcacagatccgcgcggttgacctcaagcgcagcagtgatgcgatcgaagacgccgtgtcctccgatgcactgggccagtacccggacaagaacgtggccgagtcgctgcagcgcctgccgggcatcagcgtgacccgcgaccagggcgaggggcgcttcgtggtcatccgcggtctggacgccaacctcaacagcgtcagcgtggatggcatcgccatcggtacgccggaggattccagccgcgccgcaccgctggacgtgatcccgtccgactccaccgagcgcctgcgcgtggtcaagtcgccgaccccggacatgcccggtgatgccatcggcggcgccgtgctggtggaatcggcctcggccttcgaccgcgaaggtcgcagcctgcgtggcaagatcgaaggcagccaccagcagttgtccggcgagaccagccccaaggccgccttcaactacagcgaagtgttcaacgacaccttcggtgtggcgctgggcgtgaactaccagaagcgcaggttcgagtcggacaacaccgaagtggagtatgacggcgaggacgatgccgtccccggcgatgtcaccgcgatcaacctgcagcaccgcaagtacgagatcgagcgcaagcgcatcggtgccaacctcaacctcgactggcgcccgaatgaatacagcaagtactacctgcgtacgctgtacagccagttcgacgatgcggagacccgccagcgcgtgatcttcaacttcgacgacgcgaagatggtcaagaccggcaccgaccagtatcggctggatggcatgccgaaggattccatcgacaagcgcatgcgctaccgcaccaagaaggaaaacaccttcgcggccagtctcggtggcgagaacaagctgaccaacgccgtggtcgattaccggatcggctacacccgcaccgaagagcgggtgaacgacgagatggaggcccgtttcaagcttgatggcaaggccttcaatggcaccctcgaccagcgcagccgcctgcccagctacagcttcgacaacccgcagtggctggacaacggcaactacgcgttcgaccgcttcgtgctctcgcccaagcaggtcaacgacaaggaacacagcgcgcaggtcaacgtacgcttcgacggcgacagcagcagcatcaaattcggcctgctgggccgctggcgcgaccgcgacgtgaacgtcgacgaacgcgaactgcgtgtcggcccgaaggtggcgctgtcgagctggacaacctcctcgccggaacaccgccacggcaacctgggtgacggcatggattcggccgcgatgcgtgccttctgggcggccaatggcggacagtacagcgctcgtccgcaggacgtcggtggcaacgcgatgacatcgctggaagaggactacgtggccagcgaagacatcttcgccagctacgccatgggtacctgggatgtgggcgcgctgcgcatcatcggcggtgtgcgcgtggaaaacacccagttcaaggcgatcggcaaccaggtggacgtggccgccaacggccgcagcttcaccgtcaccccgcgggtggccaacagcagctacaccaacgtgctgccgggcctgcacctgcgctacgacgcggccgatgactgggtactgcgcgcctcggccaacaagaccgtatcgcgtccttccttcggcgatgtctcgccacgcgtgggctacagccgcggcgacgaggaagtgcgcctgggtaatccggaactggatccgtacgagtcgaagaacatcgacctgtcggtggagaagtacatcggcagcaccggtatcgtttcacttggcctgttccacaagtcgatcgatggctacatcgtgcaaatggtgcggaccaatgatcccgcttttggcggctttgacgtgacccagccgatcaatggccgcaaggccaccgtgcgcggtgcggaattcaactggcagcagcagctggccttcctgccggacggcctggatggcctgctggtcggtgccagtggcacttggctggataccaagttcgatgccggcatcaaggaccgtgcaggcgaggacttcacactgccgcgcgcctccaagcatgtctacagcgcacacatcggctatgaaaagtacggtgtgagtacacgcctggcggcggtataccgcagcgagtacctggacagcatcggcaagggccgggcgttcgacatctacgttgcaccgaacacccagctcgatttctcgctggactacaagttcaccccgcgggtgagcatgtatttcgaagcacagaacctgctggacaagccgcttgagctgtaccagggcacgcgctcgcgcaccctgcagatggaagaatacggtcgtacctacgcgctcggcctgaaggtggcactgtga

SEQ ID NO: 503604 - DNA, 585 bp, Stenotrophomonas maltophilia
atggatgaattgcacgcctcattcgcccgcttcgggctgctgcgggcccagtacgaaggtgactggcagggaccgttcccgctcccaccgttgctggcgcgcttctacgcgcaggtgggaccgctgggtcatgagatcaatgcgaaggtgggcaactccggcatcaccattccgggcctcgatgtctggataccgccgctgcggcgtgtgtggagtcaccaggccggttatcgctggcatggcatcagcggcgagccgatcgacaactggccatcgaactggctggtgatcgccgatcgcggcgccgatccgttcatcctcgacctggatgacggccgtgtgctgttcagtcaccacggtgcgggcctgctggatgccggcgaggtcactaccgatgtgccgaccttgatggcggctctggctgctgcaggcacggtgtacctcgatgcaggcgatgacctctacaacgacgaagacgatggtggcatccgtcctgaacaccaggaggtagccgtacaggcggtggcccaggtactgggcgaccgcctgcaggccgagtcgttcatcgggacgttgctggactga

SEQ ID NO: 503605 - DNA, 687 bp, Stenotrophomonas maltophilia
atgccgcccttgcaggcggcattttctgtaggtgccgagcttgctcggcacaccgatagcgcttccggtcgcggcttctccgaacggcgccgaccaaggtcggcatctaccgaaagccaggcagccggaacgaaaatgccgcccttgcaggcggcattttctgtaggtgccgagcttgctcggcacaccgatagcgcttccggtcgcggcttctccgaacggcgccgaccaaggtcggcatctaccgaaagccaggcagccggaacgaaaatgccgcccttgcaggcggcattttctgtaggtgccgagcttgctcggcacaccgatagcgctcccggtcgcggtttctccgaacgacgccgaccaaggtcggcatctaccgaaagctacgctgccggaacgagaatgccgcccttgcaggcggcatttttgtgggtgccgagcgttgctcggcacgccgatagcgcccgtagagtcgagcttgctcgactgaagcgcaagagcagtcgagcaagctcgactctacggaatgccggtagatccacgccatgcgtggatgcttccggtcatgcggccgaagcggccaccttctccaggattcgcttgccgctgctttccagcgcggcgtcttccttttccttctgctgctgcgccagcttcgcgcccgggcactgggcgagcatgtaa

SEQ ID NO: 503606 - DNA, 246 bp, Stenotrophomonas maltophilia
atgagactgcataaaggcgtatcggtgtgttcgcttgccaccgtgctggccgtgctgatgctggcccccgtcgccaccacaacggctgccgaggtcatcgaggtccaggaagagtgtgtgcccttccgcatcgctggcaacgtgttccaccagcgctgcacgtcgtacgtggtctacgacgacggcacccgcgaagtcaccagtcattacaaccgtgacgagaacgggatgatctacgacccctga

SEQ ID NO: 503607 - DNA, 240 bp, Stenotrophomonas maltophilia
atgaaactgcacctggcctcgatggccgcactggccgtggccttcgctggaatgatgtcgagcggcaacgccaatgccggggttaccagcccacccggcagcgtgacgcgctgcgaaccatttgaagtggagcgctaccgcatccaccagcattgcatcgtgaccatgcccgatgcggacggcgagattttcctcaccgagtactggatcgacgaatacggcaacccgtatctgatgtaa

SEQ ID NO: 503608 - DNA, 423 bp, Stenotrophomonas maltophilia
atgctgttgtgcgccgccatcggctacatgggcagccgatggctgccgggcgcggcgctgcagctacccgtgccggagttgcttgcgggtctggtgatggccttcggcgtggtattgaacctgctgccgaagctggccttccggcgcgtgggcaccacggtcaaccccctgcggccagcgacgtcgagcgtgctggtcacgcacggcgtgtaccgctacacgcgcaacccgatgtacctgggccaggccactgtcctggcaggtgccatgctgtacctgcagaatctgaccgcactactggccgtgccactgttcgtgctgtacatcaaccgatggcagatcatgccggaagagcgggcactgtcggcccgctttccggaggcatacgcagccttccgccagcgcgtacggcgctggctctag

SEQ ID NO: 503609 - DNA, 471 bp, Stenotrophomonas maltophilia
atgaagatcgatgtcagcgttccgctttccgtgggcgaagtcgcgcgtcgcagcggggtcagcattgccaccgtgcacttctatgaagccaagggactgatccatggctggcgcaacaacggcaaccagcgccgctaccgccgcgacgtgctgcggcgcattgccttgatcaaggtcgcacagcgggcaggcgttcccttggccacgatcaagatcgcgctggatgatcttccagccgaacgggcgcccagttcgaaggactgggcaaggctgtccagcaactggcgcgacatgctgaacgagcgcatccgcagcctggtccagctgcgcgaccagctcgacggatgcatcggctgtggttgcctgtcactgaaggactgtccgttgcgaaaccctggcgaccagttgtcacaacgcggcgacggcgccgtcttgcttgaatcggacgacggcgaccggggcgtgccatga

SEQ ID NO: 503610 - DNA, 1434 bp, Stenotrophomonas maltophilia
atggaacagcaaggcatcgccgtcccccggcaccgctggggcgatctcctgtccggccgcaatgcagtgcgctcacttgccctggcgggcggggtcgcactgcatgcgttgaacgtctacatcgccaccaccatgttgccaaccgtggtggaggacatcggtggcctggatctctacgcatggaacaccacgctcttcgtggtcgcgtccatcctggggtcggcactgtcgatcaagctgcttgaacgtgccgggcctcgtggaagctatgcactggcgacgctcatcttcgcagccggtgccgtgatctgcgcgctcgcgacctcgatgccgatgatgctggtggggcggctggtgcagggtgtcggcggcggcttcctgttcgcactggcctacgccatgatccggctcgcgttcgaagaaccgctctggccccgcgcgatggccctggtttcggggatgtggggcgtggcgacgttgatcgggcctgcggtgggcggcgtcttcgccgaatggggcgtatggcgggccgcattctggtcggtcaccgcggttgccgtgttgttcgcgctgctggcgtcgaaggtccttccgcagagggaggcatcgtcttcagctgcggccaggtcttcggtcccgtggctgcagatcctgctgctgaccctggccgtcatcagcgtctcccttggcagtacatcctcgagcgcagtcaacaatttcattggcatcgtgatggccgtgttcctcgcagtggtgctggtgaggatcgagtcccgcgcgaagcagacgctgcttccttccggcgctctccggctccgctcgccgctggccgcgttgtatgggctgatgtcgctgctggtgttgatgatcaccagcggcgaggtcttcgtgccactgttcctgcaggtgttgcatcagcaatcaccgcttgctgcgggctatctcgcggcgttgatggcggccggttggacgctcgggtcgttggtcggctccggcttcagcgggcgcggcgttgaccgggcgttgatgatcggcccggcgctgggatggctgggcatgatcgggctggtgctgtgggtgccggctgccggcagcggtacgtggttgcagatggtcccgatctgcgtggcgctggccgtcatcgggatcggcgtgggcctggcctggcctcacctgctgacacgcgttctgacctctgcaccgccggaggagcaggagcgcgccagcgcgtcgatcaccaccgtccagctgttcgccaccgcggccggggctgcgcttgccgggatggttgccaatgcagcgggactgatcgagccgggcggggccgagggaaccgcgcgtgcggcccggtggctgtttgccaccttcgcgctggcgccgatgctgggcatgctgctggtgaagcgatgccgcttgccggcggacatgaactga

SEQ ID NO: 503611 - DNA, 1506 bp, Stenotrophomonas maltophilia
atgcgtacgtcgcttcgggtttcccttgccagcgccatcaccctggtcctggccagcgcccccgccttcgcccaacccaccgaacgggtatggacgcgaggcatggccagcaacgagcagtacagcagtttcatcgtcaagtaccgggacggcagcagcaagcgcgtctccgccaccaccgcgcaggatgcgctgaagaagcgcctcggcgtccagcagcgcagcaagcgttcgatcggcaacgcaccgccagcagccgcgtccgtaacccatcaacgccgcatgggcggcggggccgacgtggtcaccacggacaagccactggacctcccggaagcgcagatcctgatgcagcgcatcgccgacgatccggatgtggagtatgtgcagccgaactacatgatgagcgcattcgccacaccgaacgacccacgctacggcgagcagtggcactacagcaatccgaccagtggcgcgcgcctgcccggcgcgtgggatcgctccactggccagggcgtggtggtggctgtggtcgattcgggctacctcaacaacaacgacctgcaggccaacctgctgccgggctacgacatgatttcgtcgacccgtccgttcagtgattggcagtgcatcatcggcggaatgaatcccggctgtggcggatccgacgatggcgatggacgcgacgcggatgccttcgatgcctcgggcatcgcacacggcacccacgtcgctggaacagtcgctgcggtgaccaacaaccagatcggcgtggccggcgtggcctacaacgcgaaggtcgtgccggtgcgcgtactcggcaaccagggcaatggcggttccgccgacatcatcgatggcatgctctggagtgccggcatcaacgtgcccaacgtcccggccaatgcgaacccggccgaagtcatcaatctcagcctgggcggccgccgcgcctgctcgccggccgagcaggatgcaatcgacgacatcaccgcgcagggcacgatcgtggtggtcgccgccggcaacagcaatctggatgtgtccgagtttgctccggcgaactgcaagggcgtgatcgcagtggctgccaacgatcagggcgggcgacgcgcgttctactccaactatggcgcaggcatccatatcaccgcacccggtggtgaaacctggtcctgccgcgcgtccgtcggcgagttcctgccgctggccacgccgcctagccaggccaactgcgccccgacccgtcagcatccggcgcagggcatcctgtccacggtgggtaacaacgccttcgacttcatgtccggcacctcgatggcggcgcctcacgtcgctggcatcgtcgcgctgatgcaagcggtggcgccggtgccaaagaccaccgaccaggtcaaggacatcctgcgtcgcactgcgcacccgatcgccgcagcgaactgcccgggtggctgcgggccaggcatcattgacgcggccgaagccgtgaaggcagccagcaactga

SEQ ID NO: 503612 - DNA, 252 bp, Stenotrophomonas maltophilia
atgaacgagagcaccgcagtcacccccagccgcctcctgcgtcgcgccgaggttctggcccgcgtcggcatggccaagtcgaccctgtatttgcgcatttccgctgggaagttcccgaaaccggtccacctgggcagctccgttcgctgggtcgaatcggagatcgattcctggattcaggaccagatggagcagcgtgaccagacgggcgaaaccgggggtatgggtgggggtatcgccgacgcagcgtag

SEQ ID NO: 503613 - DNA, 255 bp, Stenotrophomonas maltophilia
atggctgacctgctgcagggcaccgacgggctggacttccgcgaggtgggccacgtgctggccagcctgtcgggggtcgacctcggcaaggccagcaagggcaccgtgcgcgcgtgggaagcccggggcctggccctgatcgaactctcccgtggggaccgggccgaagccgagcggatcatggcccccgtatcgaaacgccgccgccgcggcaccaatctggccgccgccggcgcgccgaaggaggaagcatga

SEQ ID NO: 503614 - DNA, 438 bp, Stenotrophomonas maltophilia
atggctgacgaggagcggcgtcttgcagcgactgatgccgaggcaagacttggaaagttcgtgcacaagcttttctttctccacaacagtattcccgagataagaagcactgtcgtccttccggggtacgtcttccaaaaggatgtgcttgatcgttggatgacgaaggcctcctccctgccatttccggatatgccgcgtcgaatcgagttcgaagatgtgcgtaagtcgcttgcagttttgcaggtgtgcattgaagtgctggccgaaagccgccagattgaggactggaataccgatgcaaagatgcatttcgcggaaacggtatctcaggtcgatcaagcgcttaagaatttcgtgagaacggtagatcggctcatgcccacgctgagcatccatgaggagttcagtcgctattttccggagcgacagcagtag

SEQ ID NO: 503615 - DNA, 333 bp, Stenotrophomonas maltophilia
atgacacgtcgccaacacgccaacaacggcatggccgccggtggacggcccatccgcatcccccgctcggtcgacagcgttcgcgcgcacctgaagcgccacctggtggaagaaggcaagcgcatgcaggacctggccgacgcctggggctgctcgaagcacaacgtctacgacctcttttacagagaccggcccatctccccgaaccacatcgagctcgccgcgaagctgctcggcctggacgagttcgacaccaacgagctgcgcctgctcggtgcccgcgaggccggctggcagatcgacatcaacttcctgctggaaacgcacgcatga

SEQ ID NO: 503616 - DNA, 255 bp, Stenotrophomonas maltophilia
atgaagaacaaggtcagtgacgtccgcgaccatttggtagccatgctggaacgcctggacgatgacaacctcaccgtcgaggaaatgaatcaggtcattgagcgtgccaagaccacgacgttggtggctaccacctatatcggtgccgtgaaagtcgagcttgacgcgatccgattgatggacgagaccgggaagttggccgcggctgtcgccgcgccgcaaccggctcctgcattgccgcagggccagcggtga

SEQ ID NO: 503617 - DNA, 702 bp, Stenotrophomonas maltophilia
atgaacggccgcgcctggacagaagatgaggacgaaaccctacgcatcaattggcctcggttccctacgttcctaatcgcgcatgtactaaagcgaggccgtgcgtctgtctataggcgcgccagtcagcttggcctcaagaaggcagctgactttgaaacgcagccgctagccgcgctttggaatggcactcaggagccgggttcgatagcggcccgcttcaagccgggctcagtgccaccgaacaaggggattcgccgtcccggttggtcaccagggcgcatggcagccacccagttcaagaagggacgcccggccaacgagtcacgcaattacgttccgatcggcacggagaaggtctgtccgaagcggaaggtattgatgcgcaagatcacggacgacccatcgatcttcccggcgcagcgctggcgtcccgtgcacgtgctggtgtgggaggcagcctatggaccggtccccgccggacacattgtcatctttcggccaggcacgaagacgttcttagcggccgagatcaccgcagatcgactggaggcggtgagcctcgccgaaaacatgcggcgcaatacgttccacaaccgttacccagccgaagtgaaagagctgatccatctgaaggcgcggatcactcgccaaatcaacaagcgcacgaaggagcaacgccatgaagaacaaggtcagtga

SEQ ID NO: 503618 - DNA, 321 bp, Stenotrophomonas maltophilia
gtgagcggcctggtgctggtgccggcgccgaaggatccgggcgtcccgtctcgcatgcggcagccgacgaaggacgcatatcggcagtggctgacccaggcgaacgagcagatcgaacagctgcaggccgaggtggccgagctgcgcgccggcggcagcaccagcaccacccggccgggcttggttaccgacctggtcaccgctgcaaccgccctcgggcaccacgaaacgctgcgcagcagcagcgacgaaaccatcgactactggcgcgcggaggtccaacgcctccgtgcggccctaaacggagactccggcgaatga

SEQ ID NO: 503619 - DNA, 141 bp, Stenotrophomonas maltophilia
atgacttacatccatccgaacgaccgggtctacgcactggaacgcgccgtggccgccgcagtcgcgcagggcgaggaccgcaaggtgcaggaagacctgcgcgagattttggccgaagcccggcgcgaggccagggggtga

SEQ ID NO: 503620 - DNA, 771 bp, Stenotrophomonas maltophilia
atgaatctagcgctcagcgtcagcccacatatccaccatctgctgggctttcgtttcgaaagcctcgtaatttccaggaggaacgccgacgaagacgcggaattctgctgcgaacatagccgccatgatcacgctctgagcagtgtgctgagcaagcaaggcaaggtcatgcagccgcccgttgtaatggaacttcgcaccgccagccgcggggctagcgaagcttgcgccgacattctgctgcacacgacctgcgatcgtgttgagggcctggcaattaccaatgagcgtggcgagatccgcgccaagtgcatcgggaaggttgtgaatcctatccaagaccgaaatcgaggtcggagtcaggtctgccagcgcttccgccaatgcagccttgaaggcaggaagatcaatcacggtgggtccgctttggagcctcatggattgatccagcaagcgccgaatcatgtcgaggcgcgcgggaagcgacccgatttcggtcataagcagacgaccaagcacccgcgcatttccttcccgaagcgcaaccatttcattgtgctgttgctgggcaatccctttcgattgctcagcaatctctgctgcttttttcgaagttctattcgcagcgaccgcgacatacacagtcgcagcggcggctccaaggcccacagcaacagccgcccagtcggccacgttcccccaatcaactgcgagcgggcatatcgccatcgcactccccccctgtccatgttggagccgattctgccatga

SEQ ID NO: 503621 - DNA, 258 bp, Stenotrophomonas maltophilia
atgagccgccacatcgcccgccgcgcacccaaggagacgctcgggttcgcctggggccggttccccaccgtcgacggcagcgccatcacctggcgcctgtaccgccgagaccagcgccgtgcattgcacatgcacgtgctgacgttctttgcccatgacgaccgcgccgtgattgccggacacctgcgccgtgcacgccgccacctgcgcgagaaggtggacgacatcgacctggtggcgatgggggtggccgcgtaa

SEQ ID NO: 503622 - DNA, 222 bp, Stenotrophomonas maltophilia
atgaccagcatccacgtgaagcccgtcttcagcggcgccaccgatcgcgagaaggagcaggaccggcagaagctggtcagcgccatcgcgcgcttcaaagccgccggcggcgaggtccagatcttgggcaacagcggcatcgacaggagcacgatcagccgccggcaggtggttgaaggcggtcgcggtcgccgcggtgggaagaaggcagcacaggcatga

SEQ ID NO: 503623 - DNA, 291 bp, Stenotrophomonas maltophilia
atggagttctggcgcaccagcgaactgcaggcgctgcgccagatggagggccgcgacgccatgaccgtcgcggctgccctcgggcgctcgccccgcgcagtccaggacatggcccgctgccaagggatgtcggtaccgcgccagcctcatggccggtactggccggtcaccaccaaaagccgcgcccggcagcttcgggccagcggcaacaccatcaaccagatcagcgccgcgctgggtgtcccattcgggaccgtacgccgctgggtctacgaaggagcagcagcatga

SEQ ID NO: 503624 - DNA, 1764 bp, Stenotrophomonas maltophilia
atgatcaccgtcgactacatccagggcacgcaggaatggcatgcgcaccgcgctcagcacctcaatgccagcgatgcgccggcgatgctcggtgcctccacgaaccactcccgcaccgacctgatccgcgagctggccgcaggcgtgccgcgcgagttcagcgacttcgtgcaggagcgcgtcatcgacccgggccatgagttcgaggcgcaggcccgtgccattgccgagcaactggtcggcgaggatctctacccggtcactggcgtggccggcaagtactcggccagttttgacggtctgacgctgctggaggacatcgcctgggagcacaagcgcctgaaccagacgctgcgcgatgcaatgttcgacggctgcaccggcaccgacctgccgttgatgtaccagatccagatggagcaccaggcgatggtctccgagtgcgagcgcgtgttcttcatggcatcggagtggcggcaggcttccggtggctgggaactggtcgaggagcggcactgctggtacacgccgaacccggagctgcgtgcgcgcatcgtcgcaggctgggcgcagctggaggccgacgttgcggctttcgagccgggtccggccagcgagcctgtgccggtcggccgcgctccagagaccctgccggcgctgagcatccaggtcaccggcatggtcaccgcctccaacctggccgaattcaaggaaaacgcgctggcggtgctgggctcgatcaaccgggaactgcagtccgatgaggacttcgccgacgccgagaagacggtcacctggtgcaagggcgtcgaggaacgcatcgaggcgacgaagcagcaggttctgggccagacagccgacatcgatgcggtgttccgcacgatggacgacgtggccgccgagacgcgcaagatccggctggaactggacaagctggtggcgaagcggaaggaggaacgccgtaccgagatcggcaacaacgctcggcgcgcggtgatcgaccacatccagggaatcaacgaaactctgggcgcgcatgccgtgccgatgccgaccacgctggtggcagatctgcaggctgccatcaagggcaagcgttccttcaccagcatgcaggatgcggtcgacgcggttgctaccaatgccaagatcaccgccagccaggcggccgaccgcatccgcgccaacatcgccatcctggctgagcatccggactacgcgaccctgttcgccgaccgtgtgcagctgtgcgccagcaaggcgccggacgatctgcgcaacctggttgctgcccggatctccgaacatcggcaggcggagcaggagcgtctggacgccgagcgcgagaagatccgcaaggaggaggaggctcgcgcgcaaaagaaggcagccgacgacgcggccgctgcagcagctgagcaggcagctcaggcggcacaaccggcagcggctgagcagcagtccgtgcctgcggcagccgcgccggcagcggcaccggtgcgcaccgcgccgacggcagtgaccagcgcatcagcacaaagcgccgctccgcgggagctggtcaagatcaagctgggccaggtcgtcgacctgatcgcgccgctgaagatcgacgccgagggcctgcgccagctgggcttcgagccggtctccaccgagcgcggatcgaagctgtacgacgccagccagatcgatgccatgcgcggcgcgatgatccgccacctgcagcagccgctacccgacacctacgcgcaggcagcgtga

SEQ ID NO: 503625 - DNA, 975 bp, Stenotrophomonas maltophilia
atgaatgcccaggtacaggaaggccagctcgtccccgaggagggcatggccgcgatgatcaaccgctcggagatcgagcagcagatcagcaccgcccgccgcttcccccgctcgctgaagaagttccgcgacgaagccatccagatggtcaccctcagccagagcatcgctgagcagtgcgtctatgcgctgccgcgcgatggcaagaccatcgaaggcccttctgcccgcttcgccgaggtgattgcctccgcgtggggcaacaaccgcgccggcgcccgcgtcatcgatgacaagggcgagttcatcattgcccagggcgtgttccacgacctggagcggaacgtcgccatcacctacgaggtgcagcgccggatcgtggaccgccaggggcgccgcttcaagcccgacatgatcggcgtaaccgcgaatgcggcctgctctatcgcgctgcgcaacgcggtgctgaagggcgtgcccaaggccttctgggaagacatgtacgtcgaggcacggaaggtgatcatgggggacatcaagacgctggccaaccgccgcgccgatgccctcgcccacttccagcgcttcggtgtcaccgccgagcaggtctgcgcgaagctgggcgtggctggtgtcgaggacattggtctggagcacctggtcctgctgcgcggcatcgttaccgccatcaaggaaggcgacaccacgccggaagatgcctttgccaccgaaggtgcccccgccgcccagaagaagacgctggcggcctacaccgatgaagctttcgccgcagcgctgccgcagtgggaagccgccatcaaggcaggcaagaagacgcccgaggccatcatcacgatggcgcagacgaagggcgcgctcaacgacgcgcagaagaagcagatcctcgacctggtcgaaaagactgaaggtgcgcagcagaccggcccggccgtggctgaggaggttgccgaatga

SEQ ID NO: 503626 - DNA, 294 bp, Stenotrophomonas maltophilia
atgaccagcaccaccccggccaccggccgcatccagctgttagacgtcgacagctcgcagatccacagcatcggccacgacgccgccaccaacaccctcgccatctgcttcaagcgcggcagcggcgatgcgcgcggcccgggctcggtctaccactacgccaacttcagcgccgaggagttccaggcgttcaaggacgccgagtccatcggcaatcacttcggcgcgtacgtcaagccgttcccggagaagtacccgtaccacaaggtcgccgagcagcagcagaccgcctga

SEQ ID NO: 503627 - DNA, 525 bp, Stenotrophomonas maltophilia
atgttccacctgaagaacaacccggcggccgtctccaacgtgaacctgcgcatcgagaagcacggcgatgagcggcacctggcggtcgatctgtccatcaccaccagcaccagcaacctggtgctggaccacttcgacaaggaactgcgcaaggccctgttccgcaagccgggcaaaggcgagcagcagtcgctgccgaccatcggcgaccacctgaccgagatcaagatccccagcctggagcccatcaaggtgggccacgaattcaagggcttcgagctgcagatcgacggtgagctcgacaacacgcagccgatcttcctggtggacgtgaagctcaagaagttcgtcatcgccccgaaggaaggcggcagcgtcgagctgaccttcaaggcctcggccagcgtcacccccgacgaagtcgccgagctgaccgaagcgctgatccgcgaaaacgtggtcctgaccctgcagcccggccaggccaacgaaaccacgcagcaggaagacctcgcggctgcctga

SEQ ID NO: 503628 - DNA, 258 bp, Stenotrophomonas maltophilia
gtgagccgccgcctcacctacatcctcgcgccgctggccatgtgggcgctgatctgcggctttgcagtggccggcgtcctgctcgctgttgtgcacggcaactacctgtcgctgctgatggcccgcgccgtcctggccgctgccgtctaccagaccgcactggaatggttccgcgccgagaaggcgctggccgagcgccgcagcggcatcgcctccctgacctccgccatgccggtaccggcggaagacctgcagtaa

SEQ ID NO: 503629 - DNA, 141 bp, Stenotrophomonas maltophilia
atgagcttcgaacaggccatccggaaggagaccgtgcgtatgtcgctggagttcatcgcctacggcgcggtgatcggtttcatcgtcggcgcggccgccgtgctgatcttccaggacatgttgaaggcggtgatgtcgtga

SEQ ID NO: 503630 - DNA, 210 bp, Stenotrophomonas maltophilia
atgaacaccaacgttcgccagatccgcgagttccaggccgtgcgcgatgcgatcgcctgcactggcctgagcccggcgccgctgttccagcgcctcaatgccgagcagcgccggggctatcgcggcctgtccgtggtcgacaacgcgctgcgcttgcgccgtcagttccgcgacgagttcagcaaccagcccgacccggaggccgcatga

SEQ ID NO: 503631 - DNA, 237 bp, Stenotrophomonas maltophilia
atgagcgccaccgtcctccagatcctcgatgacgaaatcgaggtgatcagccaaagcctctcccgccaccgcagccgtgctgaccgcaccgccgcgcgtaagggtgagcgcgacatccacgccgaccgggtctgcgattgggcggagtaccgccgcgaccggttgcgcgccgcacgggccgaagttgcccgcctcatcgccagcaaccagcacgcacccgaaggagcaaccgcatga

SEQ ID NO: 503632 - DNA, 360 bp, Stenotrophomonas maltophilia
atggaccacaccgcccacaacccagcagcccaggatctccaccccgaggcagacgtccgccgccagcgccggaacatcccggtcctgatcggaaacctgaaggccgctggcctgaacctgcccggcgttgataccgcgtaccgggcggcgctgttcgccggcgccaccgatgagctggcttgggaagcggcccgccgccatgagctggcaatgatcggcttccccgatgagatctcggacgccggccttgacctgagcaaggccgaggcgatgcggaagcgccgccaggcgctgatcgatacctgccgctcgcttcccaacccgtttgccctgggcgccgatctgtcggtggcggcatga

SEQ ID NO: 503633 - DNA, 336 bp, Stenotrophomonas maltophilia
atgatcgtcgtcagcaataatggtagcgatcagaaggaactctccaaacaagcaatcgcagtgattcgctcacaaattgcaagcgacattcagctggaggccgaccccaccaagttcttcgtctacgacggagggcggttctactacgcatgcggtgaagcaacattgaaccgtccggacgctggggtcctaaccttgagtaacaagaccgagcgcgtgatcgtcacaatgaacaagcgaacgaaagggggatttgctctgttcgatggcagcgatgccgccgaccaacgagcagaattcctacaagcggaagcggagaagtgccggcaccgctga

SEQ ID NO: 503634 - DNA, 357 bp, Stenotrophomonas maltophilia
atggcactgattcaatgcaaggattgcgggaaggaaataagcgacaaagctgcagcatgtatagggtgcggagcgccgactgattcaatcgctctagctccttctcccatagcccaaccggtcccctacctggtaaaggccgcaaaaagccgcggagtctacattgtgcttggactcttctttggctgcttgggcatacacaatttttacgcaggacaccatggaagagggcttgcccagttcttcatcactgcgatcctcggctggttcgtcattggccttgtgatcaccgtgatatgggtcctcgtagagatttttgccgaaaccagggatggtgccggcgacctgatggtttaa

SEQ ID NO: 503635 - DNA, 711 bp, Stenotrophomonas maltophilia
atgagagagacattcgccgcccgcatggccctggccgttcgagaatccggacgttccctgcaggagatagccaccctcgccggaacgaccaagggccaggtcagccaatggcagaccgaaggaaaggtccagcccgagaacatcaaggcgcacgtcgtcgagagcatctgcgctgcgcttgcgattcggccacgctggctgctctacggggaatcacccatgcgaggcgacgccggcccgttgcctactgtctccgcgcctgagattcccaccggttatgttcgcttccacatgatggaaggtcaggcatccgggggaggtggcatggtgaatcaggatttccccgcagtcctccgcgaggtcgacgtcgcggaatggcaggttcgcagccagatcggcttccttcccgaggaaggtcgtgtgcagttgatcacggtgcatggagattcgatgtacccggacattcgtacgggagacgtgctcatggtcgatacggcacgccgctacttcgagggcgacggcgtgtatctgatcaatctcaacggttacacaatggtgaagcgattgcagatgcttccgaacggtctgcacatcgtcagtaccaatcccaagtatcagagcgcggtcgtcccttcaggcgaactggacactttgcatgtggcagggcgcattgtgggcggtgccatcatgcgtcgcggcgaagagttttga

SEQ ID NO: 503636 - DNA, 222 bp, Stenotrophomonas maltophilia
atgaacatgaccaagcgcgcagtaagagaggccctcggcggtaaagacgccgacgtggctcgcttcttcggagtgacggccggtgcggtttcgcagtggcccgacgatgagctgctgcccgaaggccggcagtggcaggcgagggcgctgcgccccgacctgttcggcgactaccggcagccgccagccaacgatcccgaccaccaagacgtggcggcctga

SEQ ID NO: 503637 - DNA, 444 bp, Stenotrophomonas maltophilia
atgaatgtcactgatgccgcctacgacaccgtccaccagtacccgggcggcagcgaggccctggcgcccaggatgggcatgtctgccgcgaccctgcgcggcaaggtcaacccgaacactgaccgcaacctgctgagcctgcaggaggcggatgcgctgatggcgcgcaccggtgattacagaatcctgcacgcactttgcgcagagcatgccttcatcgcgcggcgtgtcgatgcacctgagtccggcaccctgatcaccgcactgctgtcggctgctgccgcgaagggcgatctggccgagctggtctcggaagcgatggccgacaaccgcatcaccccgaatgaggctgatgccatctcgcgcgcctgccagcaggtcatggccgcgcttgtgcaggtcagccagcacgcagaggcagcctcggagcggggtggggtatga

SEQ ID NO: 503638 - DNA, 183 bp, Stenotrophomonas maltophilia
atgagcgtaaccccggcccacaatgcggcagttagcgtgcgtcgccggcggcgaaaggtcatagcttgggaatcccctgtcattggtggataccccatgaacgcaaccgaaaaggctctcatcgccgtccgctcactctggcatatcgccggctgccagcagctgctggaggcgaaggcatga

SEQ ID NO: 503639 - DNA, 927 bp, Stenotrophomonas maltophilia
atgatcactgacgcacgcctcagtgttggcctgccaggccatccaaaaaccaagaagttgatccgccgtttggatgccaccgccgggtggtcgttggtgtgcctgatcctctgggcgcgcgcgaacagaccggacggtgatcttacgggcatgtcggcagaagacatcgagctggcggctgattggagcggggagaatgacgcgctggtgcgtgagcttgcctccgtggggtttcttgacggagaggagggcgcttatcggctgcatgactgggctgaccatcaaccatggtcggctggctccgaagcgcgctcaaccaaagcgaagtgggctgcactgtgcaaacagcatggccgagcagaagcggcgaaactgatgccagagtatgccgccgggctgcaacaagtgtgcgccgagcagccttcgggagtgcccgtagcaccaaacggagtgccagtagcaggttctagcagtgccccgtctccgtctccgtctccgtctccaaaagcggagaagctccccccttaccccccagctggcgctgagggggacaagccgggccgcaggaaacgggagaagatcaccttcaccggcttcgttgacgcctgccgcgctgccggcgagcgaccgatccgcaccgatgacccgatcttcgacttcgccgaggacgctggcatcccgcgggagttcgtggcgctggcctggcgtgagttcgccatcaagcaccgggacagcggcaagttgcagaaggactggcgcgcccacttccgcgatgccgtgcgccggaattggttcaagctctggtggtgcccgcctaccggcggctgcgaattgacgaccagcggcgtgcaggtcaagcgcgagcgtgatgccgagcgggaacgtgaccgtcaggatcagctggcccagcaggagcaggcggcatga

SEQ ID NO: 503640 - DNA, 1485 bp, Stenotrophomonas maltophilia
atgaacggcgtgcccgactacctggacaacgtcgcccagctgcgcgtgccgccgcactccgtgccggccgagcagtcggtcctcggtgcgctgctgctggtgggcgaatcgctggcgcaggtccgcgaccagttggcggcagaggacttctatcgccgcgagcaccagctgatctaccagggcatctgcagcgtggccgacctcaagcgcgaggtcgacgtggtgaccgtgggcgactgggtcacggccaacgtcgagatcggcgcccaggagctggtggccaccgtctacgacctggccggcagcacgccatcggcggccaacgttcgtgcctatgccgagattgtgcgcaacaaggcgttgctgcgccagctgatcgagaccaccaccgacatcgcagacaacgcctacggcgccagcgacgacgaggcggaggaggtcgtgtccgcctcggctacgaagctggccagcctgaccgtgaagtcgagcgggaatggcgggctggtgatggtgcgcagcggcgtccagaaggcctgggacgaaatggaggcccggtaccacggggagggcacgccggggctggtgccgaagtggagcagcgtgcgtcgcaagatcccgtacctggagccgaccgacctgatggtgctgggcgcacgcccagctatgggcaagaccgcgcatgccctgaactgggccgaggacgcggctgccggcggcagaaacgtcgcggccttcagcttggagatgtcggcgtcgcagtggagcctgcgcctcatggcggcgcacgccggcgtagacctcaaccgcatgcgtgagaagggtgcgctgaacaacgacgaatgggcgcgcctctcgcaggctcgcaactacattcagtcactgccgctggcgatcgacgactgcggtgcactgtccgtcgacgcacttgccgctcgcgcgtcccgtatgcacgccaaggtgcccggcggcctggggctgatcgtcgtggactacctgcagctgctgaccggcaaggccaagtcagagaaccggaacgacgaggtgtcgtacatctcgcgccggctgaaaggcctggccaaggagctgcactgcccggttatggcgctgtcgcagctcaaccgcggcgtggaaagcaagacggacaagcgaccgagcatggccgacctgcgcgagtccggtgccatcgagcaggacgccgacgtgatcgccttcctgtaccgcgacgactactacagcaaggaagcctgcggcgcgccggcgatctccgagctgatcgtggcgaagaaccgccagggcgaaaccggaacctgttacctgcagcaccggctgcagtgcagcgccttcgatgactacacaggcccgcgcccgaactacagcctgaagggaacctcgaccgtcggcggtggcgatgatgacttcgacgtgccggcttcgggccgccgccgtcgcagccggcgcgaccttgccgcaggagacgacgcatga

SEQ ID NO: 503641 - DNA, 630 bp, Stenotrophomonas maltophilia
atgaccgcgatgacaacagcggcgcggaagatccgcgcgaagcgggccagccggcccatctacgccctctgcctgcgcttggtcgatccggccacgggcgaggagattggcgcgttcgccccgagcaacgacatcgatcgcaggctggccaaggaccgcggctaccgcgtcggccatgagtaccggctggagatcaaggcctcgcgcaatgccgcattccatcgccttgcccacgtcatcgggcacctgctggtggacaacgtcgaagtgttccgtgacctggacgcgcacgccgcgctgaagcaggtgcagctggagtcgggcatctgctgcgagatggtggagatggacgccagcccggtggtgaaggcgctgctggatgccgcagagactgtcctaggcgcgggcgcgcggaaggtgctggcggcggtgctgccggagatccgaaccattccagtgaaggtggctcagtccttggccttcgattcgatggaggagcaggacttcgccgccttcttcaagggcataaccgcctggatcggtgaccactacgcgcacgtcctgctggacgacgtgcgcgcggactattggcggatggtcaacggccggcagcggggtgccgcagcatga

SEQ ID NO: 503642 - DNA, 606 bp, Stenotrophomonas maltophilia
atgcatgatttctgccttagtttgaattggtccggcctcaagccggaagtttgggcggcttgggttcaggccatcctttccgctatggcgattttctacgctggctggttcggcctccgacagcatcgtcgggatctgtaccaacgggtacgggtgctgacccggaccgttgagatggccaatgcagtgacatggatgaatggcgcggcgctgaagaaagctagcgccctcggtcagatatttttcacggacactgattatttcctgtacctgaccaaggcgctcgagggcgctccgctgcatgagttgccggatgaaagactggtccacgtgatggcaggcagtgcgcggaagtcgattgagatcctgaaaatgcttgagcaggcactgagcaacggcaacatgagcatgccgccgtcgatagccctgtctgacagctatcacgaagcggagaaggctcttcatggcttcgcacggcaagccacagaagtagagcttgactacgagagaaagctggtccttttcccaatgatgggatactggcggtggcgccggaaaaggagcaagttcctcaacaatccaatgcccgtagtaactctgacttag

SEQ ID NO: 503643 - DNA, 165 bp, Stenotrophomonas maltophilia
atgaggcgcgggcgatcaaccggcaagaagacccgcgcgcagcaggccaggctggcggcaatcaagcacatcgggtgcatcggccgccgctactcccgcgtgatgctcgacaacgtacgcgccgagttctggaacatggctgggcagaacaggagggtggcgtga

SEQ ID NO: 503644 - DNA, 648 bp, Stenotrophomonas maltophilia
atgaagcagggacgtactgaccgcgattgggcggtagtagctttgatgacgttcggagctggagtggtcgttacttgggcccttaccagcccgcaccccccactgcccaagctcacggccgagcaatgggccgcctgggtacaagccatcggcagcatcatcgcgattctgatcgcgatcgccatcccggcggtacagcacaagcttgctagtcgccgagaggaggcggctacgctcaataaggcgcggagcctcggccttttcattcggccggcgatcgaggagtttgggcgcactcttgatgcggtctgggataatgaagatcccgaagaattcgaggcgatcggctgggtagtggataccaatcagtgctgtctcgggggatacgcatacagcgccctccagataccaaaagcactgatcagttcccttgcaactctgcacgagcttggccctgctgcagccggcattctccgggcaatccattgcgtgcagagtgcgaaggagctgacaacgaaaggttccagtggtggaccagtcatatacgacatggaactcttctacgatcacctctgggacgcaaccaaaggcgtcaccaatagcctgaacgcgatcgatgcattcttcccacgcaggaagcgcaagtag

SEQ ID NO: 503645 - DNA, 216 bp, Stenotrophomonas maltophilia
atgaccggtgccgagctgcgcatgcagaagcgttaccggtcctacgtgcagaagcacggccgctgctccgtctgccagttccgcaccctcggcgctgcgggcttccactgcaagggctggcccgaccggaccggcacctgcgacaccgacaggcaactgccggttttccgattcgatgacgccgtactggagggcatgcgcgatgcgcaacactga

SEQ ID NO: 503646 - DNA, 534 bp, Stenotrophomonas maltophilia
atgcgcaacactgatccgctgaccgaagaactgcgccgctgggggcacgcccaggtgaatcgctttgcgctgagccgcgccgataggagcgtgcacgtcctggataaggtgcgggaccacgccccgatgacccgagagagggcagtccaggatctggtcggtcgcgacggctccgaccggcgtcggcttcttgccgccgccgcaggggtgaagggcctgcgcatggtgcctatgtgggcagcggatccgattcgcgcgtccaacgacgccagccacccgcaggacctccccgaagtggcggtcgatgttggaatcccggacgaattgcgctggatcgatcgggcgctggcatcgatggaacggcagtacccgatacgggcgctgatcgtgcgcaccgagttcacggtgtcggccagccaagcggtgaaggcccggatggtggccgagcagtacggtggcacgctctccgtatggcagtaccgccgggagctgcagcgcggggtagacttcatgggaggacggattgcagcctag

SEQ ID NO: 503647 - DNA, 516 bp, Stenotrophomonas maltophilia
atggtgagcaccgaaaccgtagccgccgccatgggcgccggccagtacgcgaagccgctggaagacgcgtgcattcagttcggcatcgtgaccgcgctgcagaaggcacacttcctggcgcaggtagcgcacgaatcggacggcttccgcacggccaccgagtacgcctcgggcagggcttacgaaggccgagccgatctgggcaatgtgcagccgggcgacggagtgcgcttcaagggccggggcctgatccagctgactgggcgcgagaattacgcgaccttcagccatgcgatggggcggggcgacttcttcctgcgcgaaccgggcgctgtggcgatgctgccctgggctgccaccgctgctggctggttctggcagcgcaaaggtctgaacgcactggccgaccgtgacgacgtcgtggcggtgaccaagcgcatcaacggcggcaccaacgggctggaagatcgcaagcttcggctggcgcaggccaagaagctgttcggcctcgcatga

SEQ ID NO: 503648 - DNA, 237 bp, Stenotrophomonas maltophilia
atgaagaagatcgcactgcggccacggccgttcctgctgctgttgtggctgacctgcgcgctgggcgcctccagctgcgcgacgacctcgccacctgcagtaccagcgtcctgtcccaagccgtcgccggcgccgtcgaacgtgatgcgcacgccgaactacgagcagaggttgcgggagctgctcttcaaatcggccgcgacgccgacgaccacgtccgcgccggccaagccgtga

SEQ ID NO: 503649 - DNA, 465 bp, Stenotrophomonas maltophilia
atggccattgcaccactcacccccaagcagcagcgtttcgtgtcggagtacctgaaggaccacaacggcacgcaggcggccatccgtgctggttacagcgagagcacagcccggcagcagggatctcggttgctgaccgacccgcgcgttcttgccgctgtccgggctggccagaagaaggtggccaagaaggccgaggtgactgtcgacagcctgatggccgagctggagcaggcccgcaagctcgcgctgaaggagaaacaggccagcgcggcggttacagcaacgatgggcaagggaaagctggccggcctgctggtggagaagcacaagcacagtggcgcgatcggcacctacaacctgaaagacctctctgacgatgatctcgataagcttgaacagatcctcggtccgcttgccgacgctggcggagatccgggcggagcgggcgaggagggcggctga

SEQ ID NO: 503650 - DNA, 1386 bp, Stenotrophomonas maltophilia
ttggctggcttcatccgcgaggcctggcctgttctggagccggcgcaaccctacgtgcacggctggcacatcgatgtcctgtgccagcacctggaggcgatcaccgacggacagatcacccggctgctgatcaacatcccgccgggcaccatgaaatcgctggtggcaagcgtgttctggccggcctgggagtggggaccgcggggcctgccgtcgatgcgctacctgacgacctcctatgcggagaaattcgtcaagcgcgacagccggcgcatgcgcgacctggtgcagtcagagtggttcagcagcctctggccggagatcgagctgaaccggtcgggcgagatgtctttcgccaattcgaagatgggcaaccgcgaaggcatggcgtttgccagcctgaccggtggccgcggcgaccgggtgattatcgacgacccgcattcaacggagacggcggagagcccggcggagcgcgcgacgacgacccgcatcttccgtgagtcggtgccaacgcgacttaataatccggccacgtcggccatcgtggtcatcatgcagcgcctgcacgagaaggacgtgtcggggcagatcctggaccttggtctcgggtacgagcacctgatgctgccgatggaattcgagccggagcggcggtgccggacgtccattggcttcgtggatccgcgcaccgaggacggcgagctgctgttcccggaacggttccctcgcgcggtggtcgagcgcgacaagaagatcctgggcagctacgcggtggccggccagcagcagcaacggccaaccccgcgcgacggtggcaagttcaaacgggactggttcgaggtcgtggaggcagcgccggcgatcctggcagcgcggaaggtgcgccgctgggacttcgccgccacggatcctaagcagcagaagaagaagggtgaccccgactacacagtcggcctgctgttgggagaagtcggcggcgtttactacgtgctcgacgtagtgcgcgaccagaagtcgccggcaggcgtggagacgatgctgaagaacaccgcgctgcaggacggcaagtcgatcaaggtccggatcccgcaggaccctggcgccgccggcaagagcaacgccgcgcaccagatcaagctgctggcgggctgggacgtaaaggcggcgctggaatccggatccaaggaggtccgggcaacgccggtcgaggctcaggccgaggctgggaacatcaagctggtgaacggtccatgggtggctgcgttcttggacgagatcgccgagttccccaacgcaaagcacgacgatcaggtggacgccctctcgggcgccttcgctgagctggtcaccggcagcacctacaacctcgggaacgcgctctga

SEQ ID NO: 503651 - DNA, 1785 bp, Stenotrophomonas maltophilia
atgggcaagaacgcacaattcaaggacgggctggtcaacctggttgccaacctgggcacgccgcgcgacaaggcagcctcgacgttctacgccctgccgacgctgtcggagcaggaggcagacaacgcctaccgcggcacctggctggcgcggaaggtgatcgacatcccggcgatggacagctgccggaaatggcgcggctggagcgcagaccaggagcagatcaccgccatcgaggcagaggagaagcgactgggcctgcagcagaaggtgctgagggcgatgatccgcgcacgcctcaccggcggcgccgcgctctacatcggcacaggccaatcggacccgacgctgccgctgaagcctgaatccattggcaaaggcggcattcgccacatcaacgtgctgtcgaagcgcgtgctgcaggcgggcgagctggaccttgacccggaatcgccgggctacggcctgccggcgttctacaccctgagcagcggcacggccggccaggtgcagatccatccgtcgcgcctagtgatcctgcacggttcggagaagccggaccctgagctgggcatcggcgacgggtggggcgattcggtgctgctggctatcagcaaggccatcaaggacgccgacgccagcgcagcgaacatcgcctcactggtgttcgaggcgaaagtcgacgtggtcaagattccgaacttcatgtcgagcttggccgatccggagtacgaacagaaggttctgcagcgcatgaccctcgcggcgatggcgaagggcatcaacggaacgctgctgctggacgcggaggaggagtacgagcataagcaagctcagttcgggggactggtcgacctgctgatgggcttcatgcagctcactgctggcgcgtcggacatcccgatgacccgcctgctggggcagtcgcctggtggcttgaatgccagcggcgagagcgacctgcggaactactacgaccgcatcagcagcaaccaggagctggtgctgcagccggctctgcaggtgctggatgagtgcctgatccgctccgcgctgggcagccggccggccgaggtgttctacaactggcgcagcctgtggcagaccaccgacaccgaacgcgcggccatcggcaagaccaccgctgagaccatcaagaccatctccgaaacgcggctgctgccggatgaggtgatggccacggtggcggtgaacatgctgaccgaggcaggtgtagcgccaggcttggaagccgagattctggagtacggcaagtcgacgccgcaggaggaaacgggcgaggacgacgacgaggagatcgcagcggcagtgccggtgaaggacgcgcagccgcgatcgctgtacctcagtcgcaaggtggtgaacgcggaagagatcgcagcctgggcgaaggagcagggcatcggggatctgcaggacgacctgcatgtgaccatcgcctactcgcgccaggccttcgactggatcaaggctggcaatgccaacgaatggagcaacggcggcaaggacgaactggtcatccccgagggcggcccgcgcgcggtcgagccgctgggcggtatgtctgccgtgctgctgttcgcgtcgtcgcagctgtcctggcggcatgaaagcatcatccgcgccggcggctcccacgattacccggactacaccccgcacatcagcctgagcaaggcgaccatcgacctgtccaaggtcgagccgtaccgcggccgcatcgtgctgggcccggaaatcttcgaagagatccgcgaggactga

SEQ ID NO: 503652 - DNA, 1134 bp, Stenotrophomonas maltophilia
atggtgttcctgactgatcgtgtctcggtgtcggctccccgccgcactgcggacggctatctcgtggccgatgcctacgtggcgcgcaccggcatccaggaatacctgggtgaggagctgggacgacctgacctgctgaaggtcaaggtgtaccggccaccggaggaggtcttctccgacgccacgctgcgcagctttgcgcatcggccaatgacaaacgaccacccgccggagatggtcaccgccgacaactggaagaagtacgcggtagggcagaccggcgacgaggtgtcgcacgacgaaacccgcgtacgcgtgccgctggtgctgatggaccaggcggccatctccgactgggagtctggcaagcgagagctctcccaaggctactcggccgagatcgtatgggaggacggcgtaacccccgacggcgaggcctaccaagccaagcaaatcaacatccgcaacaaccacctggccatgtgtcgtcgtggccgggctggctcccagtttcgcatcggggatgggcgcacccccggtgcaccggatctgagcgcccatccccaaccgcaggagaaccacatgagcaaccagcagacccgcatcgtggtggtcgacggcctgcccgtcgagtgcaccgacgcgtcggccgccgccatcggcaagctgcagcagcagctccaggacgcccacaccgccgccggcaccgctgccgcaacccaccaggcaaccatcaccgccaaggatgcggacatcgctaaggcggaaggcgagcgcgacgcgctgaaggcgcaggtgctcagcgacgccgacctggaccagcgcgtacagcagcgcggcgacctgatcgccaaggccaaggccgtgcacgacgccgactacagcggcaagagcgacgccgacgtccgcgaggccgcagtggtggccaagctcggcgattcggccgtggccggcaagcatgaggcctatgtcgaagccctgttcgatggcctgtttagccaggcaaagccgcgcgacccggtggccctggccctcggcgaccgttccacccatcgccagaccgtgcaggacaacggctatgccgcgtctgttgctggcctggacttccgcaccgctggccagaaggaggcctaa

SEQ ID NO: 503653 - DNA, 453 bp, Stenotrophomonas maltophilia
atggcattgcagaccaactatccggatacccagccggtcgccatcgaaggtgcgcaggcaaccatgctgccggccacgatcatcagccgcgacgtggaaacctcgcctggtatcggcttcggccgcgccgtggcccagggcaccgccgacaagggcattgtcctcgccggtaccggtgccacgaagctggtgggcatcaccctgctggaccgatctgccgtcggcagcgccggcgtgccggacagcttcgcgcagcgcacctcggcccgcgtcatcaccaagggcgacatctgggtggctgcggccgtcgcagtgaaggcgggcgatccggtcttcgtgaccgcgaccggcaccttcaccaacgtcgccaccgacaacaccgccttcactggcgcccgctgggacaccagcaccaccgccgccggccagctggccgtcgtccgtctcggctaa

SEQ ID NO: 503654 - DNA, 939 bp, Stenotrophomonas maltophilia
atgaatggaaattccatgcacctgttcgacgcacaggccgcgctcggcttcgtcgttgcccaggcatcgatcatcgaaccgggcgtctaccgcacgcgctacccgtcggtgcagtaccgcgacctgatcccggtcgacaccaccggtagtgagttcgccacctcggtgacctactactcctccgaccagttcggcaaggccaactggatcaacggcaacgcggacgacctcccgaaggccggcaccacgcgtgcccagcaccagaccggcgtgcacaccgctggtatcggctacggcttcggctgggaggaaatcggccgggcacagctgctgggcatcaacctgcagtccgacgatgcctccgctgctcgccgcgcttccgaagagatggtcgaccgtgtggccctgctgggcgatgcggacaagggtttcaccggcctctacaacgctgcgaatgtgaccccggtggctgcggaaactggtagttgggacgcgcagaccgacccgcagctgatcgtcggtgtcctgaaccaggcgctgctgaacgttttcaacggcaccaacaccgcgtcgatcgcagacaccctgctgctgccgtggaccaagttcaatctgctggccactcgcaagatgagcgagcagagcgacaagaccatcatccagtggtacctggaaaacaacctgtacaccgtgcagaccggtcagcagctgaccttgcgcggtgtgcgcgggctggacacggccggtgtcggcgggaccacgcgcctggtcgcgtaccgcaaggatccggaggtgctgaagctgcacatgccgatgccgcaccgcttcctgccggcctggcagagcggcccgctgcgctgggacatcccgggcgtgatgcgcctgggcggcctggacgttcgtctgccgaaggaagtcgtctacctcgacggcatctga

SEQ ID NO: 503655 - DNA, 591 bp, Stenotrophomonas maltophilia
atgaagatcacgaacaaccacaagggcccgctgggcctgccggacggcaccatcctgccgccgggcgaggccacctcgatcgcgaactgggatgccctgaagagcaacgcggtggtgcagggctggctgaagggcaagatcctcagcgccgaaggcggcaagcccagtgtaccggcacaggaatcgctgctcggctccaacgtgctgccggccaacatcgagctggccgatggcgtctccgtgcagttgggcgaagtggtgcgccaggcctttgagcacactggcctgaccgttgccgactggaacgcgctggaagagggcgaccgcgaagcggagctggcggcaatggtgcacgagctgcagtcccgtgcggaagccgacgccgaggccaagaagggcgaagccgccgccgccgcggaagccgagaaggccaacgcgaccaccaccgcgcagaacccgccggcggaggacaagaaggatgcgctgatcgcgcgcgccaaggcgctgggcatcgatgccaagggcacctggggtgtggcgaagctggaaggcgccatcgccgacgccgaggccaagaagggcgagggctga

SEQ ID NO: 503656 - DNA, 513 bp, Stenotrophomonas maltophilia
atgtacggcacgctggaaggcgcgaacagctaccaccaggcgcgcggtaatgccgcttgggctgccggcaccgagcaggcccgcgagggtgcgctgatccgcgccacggactacatcgacggccggtaccggatcctgctggcatctggccgctgggcgtcgatgttccccggcgtgcgtacggccgggcggggccagccgaacgagtggccccgcaccggtgcgatcgactatgacggtgaccccatccagccggatgaggtgcctgacgaggtggagcgcgcagcctacgaggccgccctgcgcgagctggccagcccgggcagcctgtcgccggactacgtggccaccgaggcagtaaccaaggagaaggtcggccccatcgaggtcaactacgcagattccacggccgctggccaggtgccgaacaggccggtggtgccggccattgacgagatcctggcaccattgctgcggacaccggcggttatgcctgcggtgcgtgtcgtatga

SEQ ID NO: 503657 - DNA, 357 bp, Stenotrophomonas maltophilia
atgagcggcttctacgaccgcatgcaggcgacggccacgaacctgatcggtcgctacggctacggcacacaactggagcgcgacggcgcaccgaccgggccgccacacaatccgcagccgggtccgtcgacgcggcacgactgcatggtggtggagctggaatacagcctgaccgaccgcgacaccacgctggtgcagcaaggcgacaagctgggcctgatctcgaccgcagtggacatccagcccggcaaggacgaccggctgctgctgggcggccagctctaccacctaatcgacctgcagccgctgtcccctggtgggcaggtgctgctctacgagttccacgcccgacgctga

SEQ ID NO: 503658 - DNA, 1077 bp, Stenotrophomonas maltophilia
atggccgattacacaccccgcgagctggagctgctggcacgacgcctggaaccggccatgcgccgcgcgttcgagcaggccatcgccggcgtgcgatcgcaggtgcagctggacctgctggcgagcctcctgcaggccgggcaggtggacgctgtgctggaggcgctgggtttcgacggcgaacgcttctcgccgctggccgagcaagtgcgccaggcgtttgccaccggtgcggaggtcggtatgaaggagctgcccacgctgtcgctgcggcagcagatacgcgggcgctacaacccggccaacgacacgccgctgctgcggttcgggttcgacatgcgcaaccgcggggtggagagttggctgcagtcgaattcctcgcgcctgatcaccggtatggtggaggaccagcgaacgctggtgcgccagcacctggtgcgcggcatggccgccggcaccaacccgcgccagacggcgctggagctggtcggcagggtgggcgagaccggccgccgcagtggcggtatcgttggcctcaccgcgcagcaggcgcagttcgtggccaacgtccggcagcagctggccagcggcgatccggcgcagatggcggagtacttcggccgcaagcggcgcgacaagcgcctggacggaatcgtcagccgggccatcaaggccgggaagccggtggcgccggcagatgtcgagaagatcgctgcgcgctattcggacaggctgctggcgctgcgtggcgagatgatcgcgcgcaccgagtcgctgacagccatggccgcaggtagggaggaggcgttccggcagcagatcgagagcggccgtctggcgccggagaacgtgacaggtacctggtcggccaccggtgacgacagaacccgccacagtcaccagaccatgaacggccaggttcgccggttcggtgaaccgttccagacgcccagcggtgcgttgatgcggttccctggcgacacctcgctgggcgctgggccggaggaaatcatcggctgccgctgcatgaagcagtaccgcgtgaacatggctgcggaggtgaagcgtggccaataa

SEQ ID NO: 503659 - DNA, 426 bp, Stenotrophomonas maltophilia
gtggccaataaattcggagcccaggtccgggccttcacagagaaggccaaggccatgcagggagcgatcttccgtgagtcggctaccaagctgatggaggaagccggcacgcccgaggggcagggcgggaagatgccggtggataccggcttcctacgcaactcagctgctgcgtcggtcgaaggaatgccctcggacagcgcacaggccccggagctggtgttcgccacaattgagctgggccagaccgtgtgggccggatggacagcaaagtacgccatgcgtatggaacacggcttcttcggcgaagacagtctgggtagaacctatgcgcaggcgggcaaaggcttcgcgcgcgcggcggcccagcgctgggatttcatcgtggccgaggtcaccgccgacgtgaaaggacggatgggatga

SEQ ID NO: 503660 - DNA, 411 bp, Stenotrophomonas maltophilia
atgagcgacaccgcgatctatgacgcattcgccacgctggtggggcagttcgctgctgcgcagacgctggactgctcctacccggggcaggggttcaagccccccaccggcaacggcgctcgctggctggagctgcagtggttccccaaccggactgagaactacggcatcgcagacgatggcccgttcctgatgcaggggttcggccagctgtcggcctgctaccggccggggcaggggatcatggtcggtactgcgatcacggaccagatcatcgccgccttcgccaagggcacgaccttcgccggcatgcgagtggagaggaagccctggacctccagcatcatccaggacccggagcgggtcatgcacccggtgaccatcccgtggcggggattcgtttcggggtag

SEQ ID NO: 503661 - DNA, 243 bp, Stenotrophomonas maltophilia
atgagccccaagccgcctaacctgcacctggtcagcagcaacgagatcccgaacgagggtgagctgcaggccatgcgtgatgccatcacccgcatgaagcggaaccggcagctactggacgagttctgcgccgagcaggcgcggttcgtccgggcggaatacctggcctatgtggaggcggggtttactcggccgcaggccatgcagctggtggcggcaaagctgggcccagccaagaagtaa

SEQ ID NO: 503662 - DNA, 471 bp, Stenotrophomonas maltophilia
atggccgctgaagcaaagacgaacgcaggtaccaagctgcacatctgcgccacccccaagaacgccgacctgaccgagaccgatttcaaggccctgaccttcgtgcaggtgaagaaggtcggcagcatcggtgagcgcggcatcaataccaacatcgtccagtacgacacgctggacaccctggttgcgctgaagggcaaaggcatcaccaatgctggcgacccgcaggtggaggtggccgaggacctgaccgacccaggccaggtggcccttcgcgctgctggtgcgcccaacgtgccggacgcctacgcgttcaaggtggaacgtgccgacggatccatcgagttcctgcgcggcctggtcgccggccccaacgttaccggcggccgcaacgaggactttgtcctcaacaccttcaccctggcgctgaaccaggcgccgatcacggtgccggcgccgaccaccccgtaa

SEQ ID NO: 503663 - DNA, 393 bp, Stenotrophomonas maltophilia
atgaccgaactgaccaacatcgtggcggaaccgcgccgcctggagatcgtgcacccggccagccaggagccggtgggcctggtgctgatcttgctgccggacagccacccgcaggtgaaggctgccggccgcaaggcaatcaatgaccgaatcaaccaccgcggcaaggtgggcgccgagcagatcgaagccagccgcatcggaatgctctgcgcatcgatcggtggatgggagtggcaaggggagctgaccttccacggcgagaagcccgagttcacccagcagaccctgcagcatctgctgaaggaactgccgtgggtgggggagcaggtcgacgtcgccctgaccgaccgggcggagttctttcgccgacctgacgaaacggacggctga

SEQ ID NO: 503664 - DNA, 315 bp, Stenotrophomonas maltophilia
atggcggatgagaacggcgagacccggcgccagcgcaatgcgcgcttcggcatcgtcgaatcaccagagctggaggtcccggacgcggctgcccacgtctggggctggttctgggagctatcagggcgcaggcacagcggcccggaagcgttgacctttgctgacatcggccaatgggcctctctcctgcagatcgaactgctgccggaggaggtccagatgctgatggcgatggacgaccagtacctgcgcgcggtgcgcgaagaccagaaggccgcgcgcgagcgggcaatgcagaacaatgggagcgcctga

SEQ ID NO: 503665 - DNA, 2949 bp, Stenotrophomonas maltophilia
atggacatcgccgaacttggctacaaggtcgacagcagcggcctggtggagggtaccaaggccctggacgagaatgctgcggctgctgacaaggccggcgctgcagcggaccgcctggagagttcgcagagtgctgccagcaagacggcgtcctactgggccaatgagcaggccaagatcaacgcccgcgtgcaggagatggagcggatcgagcagagggcagccgtagccacgcgacaggcagccatcgccacggaagcgcaagagctgaacctgcagcagctactcgggcagatcaacccgacagtggcagcgttgaacaagttggccgagcagcaggatcggctggcgcgggcacgggatctgggtctgctcaaaccccaggtgtggcagcagtaccagaccaacatcgacgccacgcgcgcgtccatcctcaacgccaccggcgcgcagaacggcatgggcatgtccgcgcggcagctgcagaacaacctgcgcatgatccccatgcaggtgaccgacatcaccaccagcctgatcagcggccagccggcgtggatggtggcgatccagcagggtggccagctgaaggatcaattcggtggcattggccctgcggcgcgtgccgtcggtggctacgtgctggggttgatcaacccgatgacgctcactgcagctgcactggcggctctggccatcgccgcaaagcagtcggaagaccagctgttcgacttccagaaggctcagatcctgagcgggcagggtgctgccgtcggtgccgctggcttcctggagctggccaacagcatcgatcacctgcagggtgtgtcgcgaggcggtgccgtagcggcgctgaccgagacggcaaaggctggtcgctatgcgggcgagcagtttgagatggtggcggccgctgctgcgcgcatggaagcgtcggccgggcgttctctctcggctacggtcagcgccttcgacaccatcgccaaggagccattggagggactgctgaagctcaacgatgcggagcggttcctgaccgccgcgcagctgcagcgaatcaccacgttgcgtgaggaagggaggtcgcaggaagcggccaacgaagcgatccggatctacgccgctcacctggacgacgtggccaaccgcactgaggcggtgatgcccgggatgtccaagggctggcgcgacatcaaggacgacattggcggcgcatgggccgcgctgggtagcttcaccagtgctgtggtggatctcgccggggagtggggtgtgttggcccgtctgccgcggctgagtgatgttctggggctcgggttggtcggcggcaccttggtcaagaacctggggctaccttccttcaccgacgcgctgaacggtctctcggccggtattcgcgggctgccgccattgccgaagcccatcgacgaggggggcgcgctggatccgcagacggcgcgggaccttgcggcggtgacgcaggagcgcgcctcagccgaacaggctgccgccgaggccatcaatgtccaggtggccggcctcgatcgtgccagcgcgaaggaagcggcacggctgaagatcatcgcccagtacaacaagctggccgacaacgatgctcggcacttcgatgggtccatgcagcggctgattgcgaaggcccaggccgacgtcgacaagtcgttcaaccgtcgcgacggcgtaggcaagcgcaacggcgacgatagtgccgcgcagaacatgctggcggcggcacaacggcagatcgaggcaaacaagcagctggtggagaccggtgtcaaggtgaccgaaagcgagcgccaggcgatggctatcgagcaggttctggccaagagcaagaacaccatgacggcctccacccgggcgctgctgacggcagcgagggaggagctgctggcgtccggccagaaggctgcggcgtacaccaaggaaaaggaggcgactgaggcattggcccggcagcaggcgatcctcgcgcaggccagcagcaacagggcacgctccaacgagctggacctgatgggcatgggccggggctcggatgccgtggcaatgctgcgccgccagctgggcatccagcgcgagtaccaggacgagctgaagcgcattggcagccgtgacgtggctgccgacaaggcgtcttgggatctgctggcggcgaacgcagcaacctatcgcgacagcgagttggccaaggagcgcgcattccaggagcagcgcctggcgatgctgggcgactggcgtgcaggagcgcgccgggcatgggaggactactccttcgccgccagcaatgcgctggagcaggccaacagcgtgatgaacaccgcactgagcggctgggaggatgcctgggtgcggttcgcccagaccgggaagctgtcattccgtgacatggccaacgccatcatcgcggacctcgcccgcatcgcagccaagcaggccgcagtaggaatcatcaacgcagtggcaagtgcttggggcgctagcagcggagtaaccgcagcgggcaatgcggcggccaccagcggcacgcagagcatcaatgaggggttgctggccggttatggcggcggaagggcgcgcggtggcccggtgagcggttccacgctgtacgaggtgggcgagggcggcaagcctgagctgttcaacgatggccgtgggcgcacgtacctgatccccggcaacgacggccaggtcattcctgccgcgcctgccgcagcggccggtgcaggccctgctggtggtgcttctgtgatcaacgtgaacgtggtcgtcaacagcgatggcaccaccgagaccgatgcggacacgtctctgatgaaccaattcggcaaggagctggggcagttcgtggacatgaagatcagggacgcacaggtcaagtccatgaagcctggcggtgtgctgcactcgatgggggccggccgatga

SEQ ID NO: 503666 - DNA, 330 bp, Stenotrophomonas maltophilia
atgaccgacacctttacctggcgacccaccagcaccggcggcagcacgatcaaggacgtggtgaaacgcgcccagttcggtgatggctaccggcagagcgctccggatggcatcaaccctcgcagccgtagctaccaactcaccttcaccggctccaagacgatggtggatcagatcatcgccttcctcgatgcccacgtcgggcgctcgttcctgtggcagagccctcgcggattgctgctgttcgaatgcactgcgcagggcgagccgttccccaacggcttggtgcacagcatcacggccacattcgaacagacgttccagccgtaa

SEQ ID NO: 503667 - DNA, 825 bp, Stenotrophomonas maltophilia
atggcacgccaagtaatcgacaccactaccgaccacgggtcctacaagggcgacccggcaaaagtcgccttcgagaagaccaacgacaacttcgcagagctgtatgcgcttcaggccgcagccgcaggcaactcgttggacagagggctgatcagtagcaacggcctgctcctgtctttctccggatccaccttgagcttgtcgcctggggtcgctttcattccatccacgggaaagctccttgccgtaaccgccaccctttcgaaggcgctgagcggtatggcccagaacacctggtatcacgtctatctgttcccaaaggcagatgggacgccagatttcgaagtggtcaccacggcaccgtcagctgtctacttcggcacggcacgcaccaagagcgctgacacttcaaggcgctacgtgggcagcgttcgggtcggggcatcgggcgtgctgaagttcgagcaccacggcgaccgcgtggtgtacctggaagatacccagggcgcgccgttccaggtgcttgctgcgggatcgtctaccgtggctgcaactgtgagtgccgcacaggtggcgccggtcaccgcctacgcggtgctgctgaacgcgcttaacgccgctgccaacggtgcatacacccggctttcaaacagcaaaggcccatcagctcagagcggatacatggccttggcggcgccaagtagcgtctcggttgtgcagatgcccgtcgacggtgcccaggcctacacctacgcctacgaccttgcgccttcgccagccggtgcggcgtatcaccgcatcaacggctactacttcgaacggtga

SEQ ID NO: 503668 - DNA, 291 bp, Stenotrophomonas maltophilia
atgtacgcatatacagcggattcgtttcgtttcattggtgatgttggtacgcccctgccgggggagcagatcgcggaagagattccaaacgaggtattggctgccattgcaatcaatgaggccacatggcgccgggataccttgctccggtccagcgattggacccagctgggtgcggggctgtctgcagagaaggtgcaggaatgggccgactatcgatcggcgctgctggccctcaccgatagtccggacttcccgaacatggcctggccagcggagccggcgcgatga

SEQ ID NO: 503669 - DNA, 597 bp, Stenotrophomonas maltophilia
atggctgatcgcctgcgcactattcgcctgtacggcttgctgggcgctcgcttcggccgcaagttccgcctggccgtcagcaaccccgccgaggccgtgcgcgcgctgtgcgtgctgctgccgggcttccagcagtacctgatgggcgccaaggccaagggcatggagttcgccgtgttcgtcgggcggcagaacctgtccaaggatcagctgcgtgatccgccaggtggtgacgacatccgaatcgcgccggtgctgatgggggcgaagcgcgcgggtgcgctgcagacgatcgtcggtgccgtgctgatcgtggtgggcgcgatcttctcctataccccggtgggcgtaccgctcatgaagctgggtgtggccatggccgccggcggcatcgtgcagatgctttccccgccgcctaccgggctgggtgcgaaggacagtcctgagaacaccccgaactacagcatgaacggtgccgtgaacacgcaggcgcagggcaaccctgtgcctgtcgcctatggcggccacgacaccaaggggatgttcgtgggctcggcggtgatcagcggcggcatctacgcagaggaccagcagtga

SEQ ID NO: 503670 - DNA, 3516 bp, Stenotrophomonas maltophilia
gtgaacgtagccatcaagtatcagcccacgcagctggcgcgcgcctgctcgcgagtggctgttgccggtgctggcggcaagggcggtgggaacgctcgcacgccggtcgagaccccggacagcctgcactcgatctcctacgcgaagatcctggacctgatcagcgagggcgagatccggggcttggtggcgggcaatcagtccgtctacctcaaccaggttccgatccagaacagcgacggcaccctgaactttgccggcgtgcgcgtggaaacccgcgcgggaacgcaggaccaggagtacatcgctggattcccctcggtcgagaacgaagtcacggtcgacgtcgaactgcgtagcaacgcacctgtggtccgcacgatctcaggggccgatctctcggccgcgcgcatccgcttcggtctacccgcgctccagcgccagaacaccgaaaacgccgacatggaaggctacgcgatcgagtatgcgatcgatctgtcggtgaatggtggcgctttcagcaccgtgctgaccaatgcgttccggggcaagacgaccagcgagtaccagcggagccaccgcattgatctaccggccggctcgcagtggcaggcacgcgtgcgccgtctgacgccgaacgccaacagctccaccgttgccgatacggtgaacatcctctcgctgaccgagatcatcgacgccaagctgcgctatcccaactgcgcactggcggcggtgcaggtggacgcgagcgccttccagaacgtcccctcgcgcgcctaccagatctgggggcgcatcatccgggtgccgagcaactacgacccgcgcacgcggttctacagcggcatctgggacggaactttcaagtcggcatggaccaacaacccggcctgggtgttcttcgacattgtcaccaacgaccgtttcggcctcggcaatcggatcccgcttgattgggtggacaagtggcggctgtacgagatcgcgcgctactgcgatcagctggtcagcgacggcatgggcggccatgagccccggttcacctgcagcctgtacctgcagacccggaccgacgcctacaaggtgctacaggacatggccagcatgttccggggcatcagcttctatgccggtggccaggtcatggcctcggcggacatgccgaaggacccggtctacacctacagccaggccaatgtggtcgacggccgattcgcctacgagggtagcgcgcgcaaggttcgccataccgttgcgctggtgtcgtggaccgatcctgacgacttcggccggcagaaggtagagccggtgcagctgcacgacggcatcgcccgctatggtgtgaaccagattgaggtcaccgcgctaggctgccattcgaagtcgcaggcgcagcgggtgggcaaccacatcctctacagcgagaacctggagacggagacggtcaccttcgccgtgggtctggacgcgctgaactgcatgccgggcgatgtgattcaggtggctgacgccaaccgcgccggccgccggaactccggccgtatcagcgccgctactgccaacagcctgacgctggacgtggtgccgccgaccatggccgtaggcgacctcctgcgcgccacgctgccgactggcaagaccgaagcgcggaccatcaatgggatcaacccgactacgcgcgtggtgaccgtctccgcgccgtggagcgcggtgccggtgtcgcagtcgatctgggcgaccgagtcgaccgacctggtgctgcagcagtttcgtgttctgggcatcgcagaggaagagggcttgacctaccgcatcactgcgctgcagcaccggccggacaagttcgctgccatcgatgacggcacgcgtctggagccgccgccgatcagcgtcattccgccaagcgtgcagccgccaccggccaacgtgcgcatgtcgtcccatgtggtgatcgaccagggcatcgccacgccggtgctgaccattgaatgggatgtggccgacaaggccatcgcctatgacgtggagtggcgccgggacgacctgaactgggtacgtgcgggcagggtagggaccaccagctgcgaggtgcggggcatctatgccggcaagtacctggccagggtgcgcgcggtcaatgcgctcaacgcggtttcgcagccgacgctgagcatgctcacggacatcaagggcaagaccgagccgccgccggcgctgacctcgctgacggccaccccggtggtgttcggcatccagctggcgtggggattcccgcctggcgccaccgacaccgagcggaccgagatctggcgcagcactggcccgaatcgcgagaatgccacgaagttcgcggacttcgcctacccgcagaaccgctatcagcttgacgggctggccgccggtgcgcgcttctacttctgggggcggctggtggacaagagcggcaacatcgggccttggtatccgactggtactggtgtgataggcgaggccagcaccaatcagtcggactacgacgcctacttctccggaaggatcagcgagagtgcgttgggccaagacctactggccaagatcgacagcatcgaccagatcgtgccgctgatctgggaggcgggcgcgacctacgagccaggccaaaccgtgatccacaacggcaagatctggctgtggaacgacaacgcgccaggcaatgaggagccgccgggcacgaagtggaaggacgtgggcgatgcggtcgcgcaggctggtgcggtggccggcagggtgaacatcttggagatgcaggtcaacgacccggagaccggccttcaggccattggccagaagacggatggcttgttcgcgcagctcgatgtgcaggctgccggtgacagtgactggggtgcaggtgacgccacggtgttcgctggaacgctcaccatccagacggtaatcgccgaaggggattattcactggcaaagcgcgtggacacggccgaggcatcggtgggcgagacgcaggccatcgtgcaggagaccgcgcaggcgctggtggacgtgaacggcaagatcagcgcgtcttggagtctgaaactgcagatcgccgccaatggccagtactacgccgccggtatgggcatcggtatcgagaatcagccggacggcagctaccagagccagatcctgttccaggccgaccggttcgcggtgatcaacctggtgaacggaaacgtcacgtcaccctttgtgatccagggcgggcagaccttcatcagccaggcgctgatcggcacggcctggatcaacacggccaacatcgctgatgcggcgatcaccaacgcaaagatcggtggcgtcattcagtcggacaactatgttccagggcaaaccggctggcgaatcagcaaggacggtggattcgaactgaatgggaatacgcctgatggctacaagacgcgcgtggttaatggtggcgtctacgtctatcacccgaacggcactgccgttgttgaagtgggagttctgctatga

SEQ ID NO: 503671 - DNA, 354 bp, Stenotrophomonas maltophilia
atgcctcagaactgggggaagctcggctggcgcaatgaaggctcgctgggcttcgtttccacgacatacttcgagaacgcgcggcccatgtacatctgtgcgatgtatgatccgtcgtggaacaatcatattgtcaagtactttagctcgaatgatccgggttgtgagggttaccatccgattgaatggggctattttgaaggatatctctcttcaactcaggttcctggcactgtaccgatctatcgctgctacatagaggcgacaaaggatcatttcgacactcgatcgtcggattgcgagggtgagcctgcggcaaagctcgagttcgtgctcggttacatcttcttgtga

SEQ ID NO: 503672 - DNA, 255 bp, Stenotrophomonas maltophilia
atggcgcccatgtgctattccgcccagatcaccgccgcctaccagaagctggtcaggatgaccggcgccacgctgtcgctgcaggagttcaccgcgcgctactccaatgacccgagcaatatgaaatcccccatcgactgttttgagcgtgatggatcagggatgggtccattcgaatgtcagtcgatcgtcgctccaatctcccggctagccttgcggcccctacattgctgttccaacgctgtcttggcctga

SEQ ID NO: 503673 - DNA, 615 bp, Stenotrophomonas maltophilia
atgagcatcctcaacgtactgatcagccgtgaccagcttgtcgttgcagtggatacgcttgcggaggatgcgctgactggcgcccactctgccggtgccaaggtgctcctgataccgcagcacaacgtgctgctggccaccagaggtggagcccagttcttcctgaagatctacgagctggctctgcaggcgagcttccgggccgacttctccatcgagcagctttctgccgagatggggcctgtaatggaccaactgtggttgaactatgagaaggctgccgcagaggctgacctccctatcgaacagctggggacggagattgtcctgggcggttggtcgcccagaagcggcaggatgatggccacggtctacgccaagagcgacagccggcaggttacgtcagtgcagccgatcggtggccagttcgcatcaccaggtgatccactcaagggcgtggcgccgagcatgctgcaagccgacttgatgactgcgggacggcttcaggcaaactacctcaacgagcagatgggccgtcaagtcgccggagggcgtctgctgatcgggttcttgcagcagggccaggctgtggtgaaggacttgggaccgatctga

SEQ ID NO: 503674 - DNA, 993 bp, Stenotrophomonas maltophilia
atgatcctggacaacgtggtgtggggcttcatcggctgcggcagcgtcaccgagaagaagagcgggccggccctggccaacacgccgggctcacgggtggcggcggtcatgcgccgcaatgcggcgttggccgaggattatgcgcggcgccatgcgattccccgctggtacgcggacgccgatgcactcatcgccgacccggaagtgaacgcgatctatgttgcgacgccgccctccacgcacatgcactacgcattgcaggcgattgccgcgggcaagccggtctacatcgaaaagccgatggccatggaccacggcgagtgccagcgcatcattgaagccagcgcgcgcagcggcgtgccggtgttcgtggcctactaccgtcgcgccctgccccgcttcgcgcaggtgaagcagctgctggacagcggcgcgatcggcacaccgcgcagcgtgcgcgccaccctgcaccggccgcattcggcgaatgccacatcgccggacttctggcggaccaacccggcgatcgccggcggcgggctgttcgtcgatctgggctcgcataccctggacctgctggaccatctgctggggccgctgagcgatgtgcgtggcctggccagctcgttgaccggcgcctacgtcgccgaggacagcgtctcgatgtgcttccgcaccgggacgggggcgcacggcatcgcccaatggagcttctgcgcgttccgccgccaggatgaaatcgaaatcaccggcgatcgcggacaactgcgctttgccaccttcgaggacgttccggtggttctggagacggaagcgggcgtgcaggcgttcgacatcccgaacccgccgtcgatccagcagccgttgatcgccactctggtggacgagctacgcggcaacggccactcaccatccaacggcatcagcgccgcccgcaccagtgcggtgatcgaccaggtgctgcaggcctaccgcacacggcactcgcgctga

SEQ ID NO: 503675 - DNA, 201 bp, Stenotrophomonas maltophilia
atggcgaagcccataccgttgcatcccaaacaccccgagcgcatctgctggggctgcgaccgctactgcgcggctgacgccctggcctgcggcaatggctccgggcgcacccagcatccgatcgagacgcagggtgaagactggtacctcgcctggggcatcgagccgaatccggaccggccgtcgcaggccaagcgctga

SEQ ID NO: 503676 - DNA, 279 bp, Stenotrophomonas maltophilia
atgatccgttcattccgctgcaagcagacccgtgccatgtttgaaggaacctgtccacgtgcctggctttcgatccggcgggctgccgagcgcaagctgcagctgctcgactcggcacagacgttggcattcctgcgcagcccgcccgggaaccgactcgaggcgctgtcaggtgatcggagagggcagtacagcttgcgtatcaatgaccagtggcggctgtgctttacctggactgacaacggtgccgatgccgtggaaattgttgactatcactga

SEQ ID NO: 503677 - DNA, 1098 bp, Stenotrophomonas maltophilia
atgatggccacgacagtcgggcagcaacaactggtggcggcacgtgccgctttcgccgacggcgatgcgcgctcattgggcgtgttgccgctgccgctgcagcagtcatggctgcgttcgcgcgcggcgggcctgcagccggggcaggagccggactatcggccgctgctgggcgatggccgccatctgtcccatcccgatgaccggcgcctggcgcgttgcgtgcagccggagctggaacagctctgggcggccttcggtgggcgtggctggacgatgttctgcgccaaccgcgacggcatggtgatcgcgcagcaggcccacgggctggaagatgctcccttgctgcggccgatccaggtcgggcgacagctgggcgagaccgagatcggcaccaccgcgccagcggtcagcctggccgacgatgtgccggcactggtgcgcggcaacgaacactacctgcagcggttcgcgccggtgttctgcctgagcgagccactgcacgatctcgacggtcgggtctgcggagtgatcgacatcaccggtcttggcgagcgcgatcccgcgttgctgcagggctatttccggcaggctgcgctggctagcgaaaatcgcttgttccacagcctcaccgacgtgcatctgctcgccgtgcaacatgatccgcgctggctggcgtcaccgctgcagggactgctggcggtgcaggaggatggccagctgcgtgcagccaaccgcgttgcacggcgcctgctgggcctgccacggcgcgggccgttgccgctgctgggtctggaagcgctgtttgccggtgccagtgcggcgcaacggcgtcggctgctgcaaccgggcgcagcgcatcgggtccggctgggcgagggcagtgcggtctacctgcagcgtctgcaggggccgcggggcgcggcgcaccggtctactgtgcggagcaccccggcagatccaggcgcgccgctgctgcgtgaccagcagcgtgaggccgcgcgtcgcgcggccctggccgctgacggcaacctcagcctggccgcacgccagttgggaatctcgcgtaccacgctgtacaagctgctgcgcgattga

SEQ ID NO: 503678 - DNA, 384 bp, Stenotrophomonas maltophilia
atgggcctcgtccgccagggaagcacctatctcatcatcgggctcgtgcagctgctgctcgactggctggtgttcgtcaccgcgaccgcgctgggcctgccggtggtgcctgccaacattgccggtcgcctggccgggatgctgctgggcttctggctcaacggccgttacacctttgccaacgcaggtgatgcgcgccttggctggcgtcgattttcacgcttcttcgggctgtggctgctgctgaccgcgacaagcacgttgctggtgagcctggtcgaccacgcgctgggcctgcagtacacctggctggccaagccgctggtggaaggcgggctggcgtgcgtgtccttcctgctgatgcgctgcgtggtctaccgctga

SEQ ID NO: 503679 - DNA, 591 bp, Stenotrophomonas maltophilia
atggccggcaacccggacctggacccggaaaccagcaccaaccgagagatcggcatcagcttcgacaatgacctgttcgatgccggcctgacctacttccataccgacttcaagaacaagatcgagtacgcgcccctgggcaagttcaacggcatctggtggacgcgcatgagcaacgtgcagcgcgcgcgcaccagtggcatggaaggcaacttcaatgtccgcttcggcgagcagtggcgctggcgcacttcggccacctggatgaaggaagccaagaacctgaccaccggcaggaacctgatcgatacgccggagttttccggctattcgtcgctggactggacgcccaacacggtgttctccagcagcctgtcggcgcagtacaccggcaagcagaccggtaccgccacgaccttcctcaaggcctacaccctgtatgacctgaccgctgcctggaacgtcaacgaggtactgaccctgcgcggcggtgtcagcaacctggccgacaagaagctgtatgccgaaggctccaccgactacttcgtggccgggcgcagctacttcatgagcatgaccgcgcggttctga

SEQ ID NO: 503680 - DNA, 387 bp, Stenotrophomonas maltophilia
atgaacgccgtcgacctctcccgcttcagcccgaagtggcagttccgcttcaatttcttccagcagcacggcgctccgaaggagccgcgcttcaaggaagcctggaaggcgctgtccttcggcgaccgcctcaagatcaacatcaacttcttcgccttcttcttcggcttcatctacctgttcattctgggcatgtggcgcaaggcgctggtggtgatcggcatcggcctcgtgctgggcatcgtgtccctgttcctgccggacatcatcgcgcgcccgctgttcatcgccatgaacttcctggttgccgccagcaccaactacagctactacctggagcaggtgaagggcaaagccagctggaatcccttcgaaggcatgttctga

SEQ ID NO: 503681 - DNA, 912 bp, Stenotrophomonas maltophilia
atggcagtttcgtggatgctgggcgcgctgctggcggcgtcctgcccggcccaggacgcggtgctgcaggcggcggccacggcgatacaggcgcagtacctggacgtggccgaaggcgcgcacattgccgaggccgtgcgcggctggtccacccagcagcgctacgtggacagctgcgcggaccccaaggcgttcagcgcacgcttgaaccaggatctggacgtgttcgatggccacttccatgtcgagcgggtggatgcccgcgccggccaggacgactggctgatggcctggcgcgcggatgcgcgcagcaatggtgcgggcgtgcgcgaggtgcgggtgctggaaggcaacatcggttacctgcgcctgagcaccttctatccgctcgatctggcccggccgaagctggccgcagccttcaccctgctggccgactccgacggcctggtgctggacctgcgccagaacggtggtggcgatgacggcagtgcggacctgctggtgcggaccctgctggcggcggagatcacccaggtgcagtcactgcaacgccgtggccaacgcagtccggtaccgttgccaccggcgagcctggggctgtacctgaagccgctggtggtgctgatcgaccgccgcaccgggtcggccgccgaattcgtcgcgtactcgctgcaggcgcaggggcgggcacgtgtcgttggtagtcgaagtggcggcgcagcacatatgttcgatgatcctgtgctgctgccggatggctatcagatcagcattcccgaccggcagccgatcaacctccgtaccggaaccaactgggaacgcaccggcgtcacgcctgatgcagcaggcggtgacgatccgctgttcgtcgcccggcagctgctcgcccgatcggcatcgccagaatga

SEQ ID NO: 503682 - DNA, 1485 bp, Stenotrophomonas maltophilia
atgaacaggattggattgatcgcagtgctggcctgtaccgcccccgtccatgcggccagccccctgttgtccggcagctttgtccacgtcggctattcggctaccgacgaacaactaccggctgcgcagttgccgctgttcctggatgagctgcaggacctgggcaacgacacgatcatcctcggtcaggtgcgtgccacccgtgccggcgtgggctgcgccagcggcgtgcaggatttcgaatggattgccggctttcccggcaagctcggcaccgtgctcgacgcggcggccgcgcgcggcatgaaggtcgtggtcggcaccacctacagctcggggcagtgcgccaccttctggcaggggcagaacgcaacggccgtggcacaggatgccgcgcagtcgctggcccagctgagccagcagtacggatcgcatccggcgttcgctggctggtacatcaccgacgagccagcacaggtgccggctgatcgcgcgccgttctaccgtgcgatcgtgacggcgctcaaaggcagtacaccctcgcggccggtgatggtggccccctacctggcgtcatccagcgcggatccggccagcgtgggccgggctgctgcacagttccgtacggccaccggcgtggatgtgcagatctggcaggacggcatcggcgccgcctcgcatgcacgcctgttccagtgggatcgcccgggtcattccaccgaggcgtattacgaagcgctgtcggcggcgctgggggccagcggcctgtgggccgacatcgaactgttcaaccatggcagtcccttgttcctggaaaccggcaacggattgtccggtgcctatcgctccgcgtcggtgcagcgcatcaaccagcagttgtggagcgcgcgttcggccggcaagcgcgttgcctggctcaaccagtaccacatgtccgaggtggtcggacccggccagggctatgccgaatctccgcggctgatgaacacctatcgcgggttgtatggcctcggtgcgtcctacagtgtcgatccggtgcagaccacctacagctacagcgtggcgccggatgcgaactatccggacagcagcggtcacgagctgttcgatcgccgcgtgggggatccgcgcaatccgatggatgccggctgggtgggcgtgcacggcaacgtcagcatcaccatcgacctgggccagcgtcggcgcgtggactggatcggcctgcatacgatgacccgcccggcgtggggcatcgtcacgccgacagctgtggaggtgatgtgtgccgagccgggcgccgctgcggtgaagatcggtgtgctgtcggcgccattcccccaggccggactgagcggttcgaccgaagaggagtacgtgctgggcaacgccgcgccgctggccgcgcagtgccgcacgctggagctgcggttggccaatggcagctggacgttcctcagtgaaatcgagatggcggccgagcagtaa

SEQ ID NO: 503683 - DNA, 1473 bp, Stenotrophomonas maltophilia
atgcagcgtttccaacgtccggccctggtgctggccgcctacctcggcacgttcctcgcgtcgctggacatcagcatcatcaacgtcgcgctgccgaccctgcagcaggcgttgaataccgacatggccggcctgcagtgggtgatcaatgcgtatgcgatcgcgttgtcggcgctgatgctgtcggcggggccgctcggggaccgttacggtcatcggcggatgtggctgctcagcgtcgccaccttcactcttggctcgttgctctgtgcctgtgccggcaatcttgcgacgctggtggctggacgcgcggtgcagggcatcgcgggcgcgctgctgattcccagcgcgatgccgattctcagtcatgcattccctgatccgcgccagcgcgcgcgggcgatcggtggctggtcggcgttcagtgcgttggccctggtgcttggaccgttgctgggcggggtgctggtacagcgcgctggatggccgagcatcttcctgatcaacctgccgttgggcctgctcgcgctggcgctgggcgcctggggaattcccgagcggcggcatccagagcatgccgcgctggatcctaccgggcagctgctcagcatggtcgcgctgggtgcgctgagttacggcctgatcgcgatcggcgagcacggcctgctggcgccactgaccctgtcggccatgagcatcgcaggcgctggcctgatcctgttcggcattgtcgaacgccgggtggcacgcccactgctgccgttggacctgtttgccgatcgccgtttcggcatgctcaatctggcatcgttcgcgctgggcttctccgcctacgcgagcctgttcttcctgtcactgttcttccagcaggcgcagggacatagcgccgccctggcaggcgcacagttggctccgcagttcctgttgatgggtgtggtttcgttgctgttcgggcgcttggtcgtgcgcgtggggctgcaggctgcgctggtctcgggctatgcgctggccggtttggcgctctgtgcgatggccgcgttcgagccggtgacttcgcgcggatatgccagcggcttgctgatgctgctcggcattggaatggggctggcggttcccgcgaccggcatggcggtcatggccagcgtgccggccgagcgcgcaggtatcgcttcagccaccatgaacgcattgcgccaggccggcatgagcctgggcatcgcgctgctgggcagcctgatgagcctgcgtgccgtgtggcatttcactgcatccgcgcaggccgcagggcagacggggttggccgcacaggcgcgcgaactgatcctgcaaccgggctcgatgcacgccacgccgcagatgctgacgtggtatcgcagtgcgatggccagtggtttcggatgggcgatggctgtggccggtgcgctggccctgcttgcggcgctcgggctgtatcggcagcgcgcaccggcctga

SEQ ID NO: 503684 - DNA, 3369 bp, Stenotrophomonas maltophilia
atgaatcacccgctgcacggccgttcgtcccactcccgttctccgatgcatagccgcctcgcactggctgtagccagttccctgctgctggctgctacgcccgccatcgccagcgaatcactcgacacctggcaacaacagcgacaattgcaggcggcctgggcgcaacctgccacgtcggcgccctcttccacgccccttcagttgccggttgcagcagccgcagcagcagccagcaccacttcgattctcggtaagccgggtgatccggccagctggcgcacggacgaattcaatgccgactggggtctggccgcgatgggggccgactacgcctatgcacggggcctgactgccaagggcgtcagacttggcgttttcgacgacggcaccggcctaggacatccagagttcgctggtaagaaccatcggagcatccggctggcaggggttcttgccgatggcagcttgtgtccggcagaggtgatccaaggccccaacagctgtttcaggaccgatggtgatcaggtccagctcacctatcagaccctcgatccgcagtacgccgcattgctcaatcgaaatggatattttgaaggggtcacctatgggacacatggcacccatgtgtccgggacgatcgctgccaatcgggatggcaccggcatgcacggcgtagccttcggtgccgacctcagcgtcgcccgcctgttctccaacagtgtggcgcaccttagtgtctcgccacggatgacgctcgatcgaagctctaaatccgttggcgccccaacggcagcgttcagccagttgtacgaacagctcgaacaacaggagatccgagccatcaaccacagctgggggcttgctacagagccgaactcagcccagcagatggatgtgtatctatcccatacggttttcgccgatcggctggcggtgatggcaaccgcttcgcgcaggaccggcctcattcaagtatgggctgctggcaataccgacgctgccaacccatccccacaacaggcgccgattgcaggcatgtacgccacgctgccacgtgctcagaaggatgttgagccgtactggctggctgtcgtgaacgtcaatgaagctctggagctgagcaatcgctccatgcgctgcggactcgccgcaaactggtgcctggcagcacctggcacggcaattctttccacaacctttggcgccaagaccaagctggacgccacgctgtccaaggacagcgccggcaacgtcacaattgacacgttgagcctgctgccagactacgactacgtcaagaagagcggaacctcgatggccgctccacacatcaccggtgcattgggcctactgttcgagcgattcccctacctgaataacgcgcaggtccgcgacgtgctgctgaccaccgcccgcgatctgggcgatccgggcgtcgatgagatctacggctggggcatggtcgacctgcgcaaggccatcgaaggctacggctcgctgcgcgtggacaccaacgtggtgatgaaccagaaggccggtggcctgaaggtgtgggaaggcgatgcctgggatgactggaccaacgacatcggcggccccggcaagctgaccaagtccggcatcggctggctgcgcctgagtggtggcaacaccttcaacggcgcagtgctgcaggacggcacgctggaattgaacggcaccaacacactcacgtcagcggtcgaagtccagggtggccagttcctgctcaacggctcgctggtctccaccgccctgaacaccactggaggcgtgagcacggtcagcagcagcggcctgctgaaggacagcaacctgacggtcaacggtggcgtggtgtccttcaacggcacgcagaccggcggcaccaccacggtcggtgccaacggcctgctgaagggcatcggcacgctgggcaacacccgtgtggacggcatcatcgcgcccggcaattcgatcggcacgctgaccatcaacggcaactacgtgcagggtgcaaccggcgtctatgccgccgaacttgccccgggcggccgcagtgaccagttgcacgtaaccggcaccgccactctcggcggcaccctggtcgcactgccggagccgggtacctactacctcggcgagcagttcaatttcatccgcgccgacggcggtgtcagcggccagttcgcgaaaaccgacttcagcgcgttctcgccgttcctgcagttcagcctggcctacggcgccaatggcacccgcatcgacgtgacccggggtgcctcgctcgccagcgccgccaccacgccgaaccagcgtgcggccgcggcggtggccgatggactggcgatcaaccagggcctgcccaagccgctgacccaactgttcccgcaacaggtgggtggcgtgctcgatggcctcagcggcgagctgcatccggccacggcgctggccctggtcgagggcagccgctatgtgcgcgatgccgcactgtcacgtcgtgccggtgccaccgcacccggtgccgatgcgggtgatgccaccggcgcctgggtgcaggcactgggcggcaacagcaagctggatggcaacagcaacaccgcgcgcaccgacgccaacagcaacggcctgctggtcggcatggaccgcgagttcggtggctggcagatcggcgtgctggccggtacaggccgcaccgacgtgaagcagcaggagcgtcgtgccaagtcgaagatcgacaacacgcacttcggcgcctatgccagccacacctggggcggcttcggcctgcgtggtggcgtggcatggagccgcaacgaagtgaagagcacgcgtgatgttgccttcgccggcttcagcgacagcctcagcgcgcgctacaacgcacgcacccgccaggccttcatcgaagccggctaccgtttcggtggcccggaagccgggctggagccgtacctgcagatcgcccgcgtggaggtggacctgaagcagatcaacgagcgtggcggcgcggccgcactgcacggcaaggtggacgacaccggcaccaccatcgccatcgctggcctgcgcttcgacaagggcctgaaggcatcgttccagcaggacagctggctgcacctgcgcggtggcgtgggctatcgccgcgccttcggtgaccgcagccaggtggccaacctggccttcgccaacagcagcaccacctttgcagtcgagggcgcaccgattgccgacaacgccgtcgtggccgagctgggcctggcagcgtggctgaccccgcggcagcagctggagctgggctacagcggccagttcggcagtgaaagccgcgaccatggcgccaccgcacgctggtctgtgcgcttctaa

SEQ ID NO: 503685 - DNA, 1188 bp, Stenotrophomonas maltophilia
atgttcaatcgacaggccccgcgttgggcccacccgctgccatcggccattgtgctgatggcgccgttcgacctcctggcctcgctggccatggacatctatcttcctgtggtgccggtgatgccgcaggcattgcagacatcaccgacgctggtgcagctcaccttgagcatctacctgctggcgcttggcctcggccagttgctgttcggcccgttgtccgaccgcatcgggcggcggccggtcctgttgctggggacgttgctgttcgcgcttgcgtcgttcgcgctggccatgtccagcagtggcgcggcattcctggcctggcgaaccgtacaggcggtgggggcgtcggcggcactggtggcgacctttgccacggtgcgtgatgtgtatgctgatacagccgaaggcgcgtcgctgtacgggctgtttgcctcgatgctggccttcgtgccggcgctgggaccgatcctcggcgcgctgctggcaggcgccttcggctggcgcgcgatcttcgttctgctcggcgtactgggcatgatcgccggcatgcgcgcggtacggcattggcaggaaacccgcccgcagtgccgggacgcgtcgcgacccgcgctacggcgcatcctcggcagcggcgcgttctgggtctacacgctgggcttcagtgcgggcatgggcacgttcttcgtgttcttctcggtcgcgccccggctgctggtcgggcgcatgcagtactcgccgctgtcgttcagcctggccttcgccacggtggcgctggtgatgatcgtcacggcgcggatggcgaacgtgtgcattgcccgctggaacgtgcgcggtaccttcctgcgtggcctgtgggtgatggtggccggcgtactgctgatggcgttggccgcagcgtggcctccctcgttcgtcggagtggtgctgcccatgtggggcatcgcggtggggctggtgatggtggtttcggtggctgcaagcggcgcgctgcgtgatttcgccgatgcgtcaggtacggcggtggccctgtactacgccgtgcagagcctgatcgtggcaggcatcggcacgctggttaccctcgtgctgcccggcgataccgtgtggccgctggtggcctatgggttgctgttgccacttgccagcctggcaggtgccgccgcgctgcggcatcgcgcataa

SEQ ID NO: 503686 - DNA, 906 bp, Stenotrophomonas maltophilia
atggaacgccgtcacctggagtacttcgtcaccctggccgaggagctgcacttcggtcgtgcggccctgcgcctgggaattgccactcccacgctgagcgtgcagatccaggacatcgagcgtcggctcggcacgcgcctgttcgaccgcggccggcgcgaggtgctgctgacctcggcaggcgaggtgttcctggcggaagcccgtgatgtgctgcgccggttcgaacaggccgaaaccctgggccggcgcgcggggcggggtgagatcggcaagatcgagatcggctacgtcggctcggcgctgtatgccggagcattgcaggatcagctcagccggttccgcagccgctacccgggcgtggaactgcaggtgagcgaatggccgatgggcgagctcccgcagctgctgcaggaaggacgggtggatgtggtgttctgccggcctccgatggatgtgcccgacagtttcggcgaacacaccctggtcgaagaccagttctgcgtggccctgccggaaacccatccgctggcgcaggcccggtcgccggtacagccggcatcattggcccgggagggtttcgtcatgccggagcagccggtgggcgcaatggaagtcgggcgccgcggcgggttcattccacgtatccgttcccagcccgggcatctggcggcggtgttggccgaggtgtcggtcggcgttggttcggtggcgatcgtgccatcggtgctgcaacgcacgctggtgctgcccggaatgatctatctgccactggccggccccaccatcgtctcgaccatcgctgtgcagtaccggcgggcagagacttcgcccgtggtgcgacggctgatcgagcaggtgaaggagacaccgtgcaggcgcatcgacatgttgcccctgatctga

SEQ ID NO: 503687 - DNA, 1491 bp, Stenotrophomonas maltophilia
gtgccgccctctcctcccccttcgcctgcacagcacacgctgcctgacgcggtcctgctggtggcctcgctgggctgcacgatgaccgtgctggagaccaatgccgtcgcggtcgcattgcccagcatcgcgcgtgacctgcacgccggattcgcggatatcgagtgggtgatcagtgcctacatcctgtccttcacctcactgctgctgcccgccggcgctgtcgccgaccgctacggccgccgccgggtgctgctgatcggcatcagcctgttcgccctcacctctctgctctgtgcactggcgcccggtgctgccctgctctacctggcgcgggctctgcagggcgttggtgcagcctttctgctggcaccctcgctgtcgatcatcggccacacgtaccacgagggggccgccaaggacactgcatgggcgttctggggcacagccatgggcgtgatgatggtgctctcaccgctgatcggcggcgtgctgtccgcactctggggctggcgcgcggtgttcgtcgcgatcctgccgttcctgggcctgctcggctacggcacgctgcgctggatacccgagtcgtcagacagcgtggtccgcccgctcgatccgcccggcatcatcacgttcagcgctgccatcttcggcatcgtgttcttcctggtggaaggactggcagaaggatggacatcggccccggcgctgattgggctgggcctggccatcatcatggctgttgccttcgtcatcgttgaacgggcacggtcacatcccatggtcgatctcgggctgctggccagtccgcgtttcgtcggcgcactcattgccatggtcggctattcggtcagcgcacaggtgatggcatcgatgctgccgcagtacctgcagaacggcatcggcctgagcgtactggctgccggtgctggcatgcttccgttcgctgcggcgatgctgctgtttcccagcgtgggccggcggctcggtcgccatctgaccagtccggcggtgctggcgatcgggctgtcggtcaccgccgcgggcaatgccgtggccggactggccgcgtggcagcacctgccgtggctggcactcgtcgcaatggtggtgatcggtgccggcggcggcatcctcaatggcgagacatccaaagccatcatcggcgcggcaccgcgcgagcgcgccggcatggcctccggcatcagcgcgaccacgcgctttgtcggcatcctgctcggattcaccgtactgtccagtgccttgagcctgggcatccgcagcgcactgtccgcggcggttcccgcgcgcgacgtactgcccatggccgatgcgatcgctaccggcaccttcgccgatgcgcgcaccgccgccttcgcacaggcgatctacagccatggatttgccagtgcactgtggacgtcggccatcgccgcgctgctggccagccttgcggtgttgctgctgggccgtagcaccacgcggcgatga

SEQ ID NO: 503688 - DNA, 2835 bp, Stenotrophomonas maltophilia
atgcactacaagtacaccctgctttccctggcagtgggcacggccttggccgctgcctggtcaccggccgcgcatgcgcaggatgacagcgataaaacaccgaagaacctcgatcgcatccaggttaccggttcggccatccgcagcgtggatatcgaaacgcagcagccgatcatcgccatcacccgcgcgatgatcgagcagcagggcttcaccaccatcgccgacctgctgcagaacctgacatccaccggcgcgccgaccatttcgcgtgcgcgcgcgttggcgtccggcgagaacgtcggtggctactacgtcaacatccgcaatctgggtgccacgcgcaccctggttctggtcaacggcaagcggctcggcgccaccaccagcggcctgcaggatctcagccagattccgatgagcgcggtggaacgcatcgacgtgctgaaggacggcgcctcctcgctgtacggctcggatgcaatcgctggcgtggtcaacatcatcacccgcaagaactacgaaggcctggaagtgtccatgcagcacgggcagttcagccagggcgatggcaaggacagcacgttctcgctggtcaccggcgcccgtggggagcgtggcgggtacacgctcgcactggaatatcagaagtcagacccggtgtttgcccgcgaccgcgagttctcccggtacggcggcgccggccccaactacccgggcgcggactggagcaacatcagccagaacggttcgtggtgcgacccggcgctctacaagtgcaataccggtgatgccgtattcaagaccctcaatcgtggcggcgatccgaagaacccgaacgactaccacccgatcacgtcggccgagttcgccaacggcaacgaccagatgcacctgcagaccggcatcgagcgccgctcgctgttcctgagcacggactacgcgctgaccgaccagatcaagttcactgccgacatcggctacaacgagcgcaccaccgaccagcagatcgcgggctacccgtaccagtcgaccaagttcggcacgcccctggacgcggccagcgtattcaacccgctcgaccacggcatcgcgttcaatcgccgcctgtgggaagtgccgcgcacgaccgaaagcaagctgaagtcgctgcgggttgcacccagtctgtccggctacttcgagctgggcaccaagacgtacgactgggaagtcggcgcgttgttcaaccgaaatgaagttacaaaaacaggccgtggcgacatgagcctgatcgcttcccggcaggcattggggccctcctacctcgatgccaacggtgtggcccggtgtggcacggcggcatcgccggtctcgggttgcctggcctggaatcctttgctgccgttcggggtcgcgggggctggctctctctccgatcccgaactgcagcgcttcttgttcccgacgttcaacgataccggcatcaccaagacccgcagttacttcgccaacatctccggcccggtgatcgaactgcctgccggtgacctgtccatcgccctggggtatcagtaccgcaaggaagaaggccgcttcgtgcccgatgccttcgcccagtcgcgccagagcactgcactgggcgcatccaccaccgccggcgactacagcctcaacgagttcttcgccgaagtgaacgtgccgatcctgcgcgacctgccgttcgccaaggaactgaccgtgaacctggctacgcgctactccgactacagcaacttcggcagcaccaccaactccaaggcgagcttcgcctggcgtccgatcgaagagctcatgatccgtggcaccttcgccgaaggcttccgcgcaccgagcatctccgatctgtatggcggcctgggcaccagcttcgaaacctatgtcgacccgtgcggcatcggcgccaccaacagcgtcaacggcaatgccgcctgcaacgccgccggcgtcccgctgggctaccagcagctgaaccagagcctgaagccctgcgccagctatccgtgcgccacgcctgacgagttcaccaccggctccgatccgaagctgcgcccggaagagtccaagagcaagaccgtgggcgtggtctggagcccgcgctgggtggacgggctggacatcaacctcgactggtacagctacaagatcaccaacatgatcatccaggacagcgtcgaccgcatcctgcgtgactgctacgtgctcggcaacgcttcgcgttgtggcagcgtcaagcgcgctggcgatggccacatcaccagcatgttctacggtctggccaatctgggctcgatggaaaccgaaggctgggacctgggtatccgctaccgcctgcccgagttctcgttcggccgcttcaccatcgacctgcagaacagctatgtctccaagtacgacgaggagaaccagaactcggccggcgatacgatcatgatgggccggatcggccagccgggcatttcccgcctgcgctcgaacctgggtgtgaactggcagctcggcaacttcagcacgcagtacaccgtgcgctactactccggcatggttgaaaattgcgtaccgaaccgtccgtgcaccctgcccgaccgctacgcctacggtgaaccggatgccctgcgcaaggtcggctccaatgccttccacgacatccaggtcagctacaagctgccgtgggacggcaccgtggcgctgggttcgaacaacgtgttcaaccaccagggcccgatcatgttctccaagccgtccagctccttcccctattacggcggcttcgatatcggccgcaccgtgtacgtgaagtactcgcagcgcttctga

SEQ ID NO: 503689 - DNA, 900 bp, Stenotrophomonas maltophilia
atggcatcgcgctaccacctcgccgggctgatgctgtacggggaaacccccgccatgctcgccgtggcccgcgagccgggcgagtccagcacccgcgtgatcgaggatgtgcgctgcctgcgctctgcagcgaatgcactggtgctgtacgtctcgccctatctcacgccgacccagcgccgcttcctggtcgagaaccacatcgacttcgtggtcccgcacacccagttgttcgcgccgagcctggccattgagttccgcgacgaccccgatcatgagaagaaagccatctcgctgctgccttcggcgcaggccgtactgatccacgtgctgctgagcggccagtcgcgctggtggtcgccgcgcgagatcagtgccgtcgccggctacacctcgatgacggcgtcgcgcctgtctgccgaactggtcggtcgcggcctggttgaacgctccaccgggggccgcgagcgcttcctgaagctggccggcaaccgcgacgaggtctgggccagggcacagccgttcctgcgttcccccatcctgaaggaagtggatgtctgctggggcccgaccgccgaggcactccgcgatgcggggcatccggcgccgatggcaggcctcgatgcgcttgctgaaacgtcaccgcccccgatcggtggcacccgcgcactgcacatcgatgcgtggcggttgctgggcgcacttcccatgcccggcccggactgccttcagagcgcacggctgcagatctgggcctatccgccggcattcaccagtattggcgatgtggtggacccgctttcgctgtatctcagcctgcagggcaaacgcggccatgatgcagacgcgctgcaacagcgggtggaacaggcgctgagcggagacacgtatcccgcatga

SEQ ID NO: 503690 - DNA, 417 bp, Stenotrophomonas maltophilia
atgtggcagcgccgcacttccctggccgaactgcagcagcaacgcgatgtgctgcaggctgagatggatgcggacgcccagcgatgggtctcacagcttccgccggatgatctcgtggcagcgctgatgccgcaggcgcgccggcttcaggagctcaatcagctgatcctgcgggctacaccgccgcgtgagctgatgaagcgcctgaaggcgcttgagcgccagctgctcgagcccggtacacagagcgcaggcgtgcggaggggactggaagatgaactgcgcgatctgcacctctacttcagcaatccccgccgtcgcccattgacggcaaaggtcattctcatcctgttcgcctgcgttctggccgccttgttcctgccgaggctgcttgtggacctgctgatcgctctctag

SEQ ID NO: 503691 - DNA, 687 bp, Stenotrophomonas maltophilia
atgaagcgcagtgcccgtatgttcgtcgccctgactgctcttgcggcactgcctgccgctgccgagccgtccgactcacccaagcgcccgtcggttgacaccctgcaacgcctgatcgtcgacaaggcaccgcagacgcgcgtagcaacaccggaccacgagcgcatcaccgcacggcgcatcgatatcgtcgatgacacgggggtgatccgcatgacgctgtccggaaagacaccggcaccgatcatcgatggcctgcagtacaagcgcgccttcaacgtggccggcatggtgctgtacgacgaccagggcagcgagcgcggtggcttcggcaccgccgatgtcgacggcggcatggcggtgcttgcgctggaccatccggcgatggatgcgatcggctggcgggtatcgccggacggcggggtgagtttttcgatcaaccaggcgccgaaactgatccgtgagcctgcattgggcaacaagctgattcctggggtgcaagcaccgacccgcatcggtctggtggtcgggcctgacggcacgccggccattgccttgaacgacaaggcagaccgcacgcgactgcgcctgactgtcactgcggaaggctacggcgcgatcgagttcctcgatgcgcagggcaaggtgatccacacattggcgccggaggctgagcttcggcgctag

SEQ ID NO: 503692 - DNA, 648 bp, Stenotrophomonas maltophilia
atgcccgacacccgcgccccggtggaagacttcaccactgaaatcgaagacagccggcatctgttcgcctggtgcctggtgcgctacggccagattcccgaagcgctggcaatcgaacaggcacgcgaacgctatccggaccaggccgccggccacgaatacgagcacgaactgctcttccacgacgagccctggcattgggcgatgctgcatgtgctgggcgaagggtattggcaccagaacccggaactggtgcagccgtcgctggagtacgacaccgaatcggacgcgctgtgcctggcgcgcggcgagccgattcccttgctggatgaggatgagtatctcggtgcgcttgcgcacgcgcgccatatgcatgcgtggacgttgatccatcaggcagggatcgacgaagagcaggcacagcggcaggcgcttgagtactacgcgtactttccgccgcatcatcgctggcgcatgtgcgtccacgatgcgcgcgctgcatgggtcgacgtgatgagcgtgctgcacatcaatgactactggagccggcccgaactgcagaggccgcctgaggcgtactggcgcgcgtcacgtgcattcgccctggcacaggggctccagctgccggaaattccgcctccctcatga

SEQ ID NO: 503693 - DNA, 633 bp, Stenotrophomonas maltophilia
atgggcgaggcggggcctagccagattgaggcggcgatctcagactccttgcttcagcacaaggatggagctatgcacaaacgcgcgcgcaatcagagtaccaccccctccttcgagaacgtctggtcccgcctggagcgcagctgtggactggaaggcgatccactgaccgaacagatgtgcctcacccctctgacatccgttgagcttcgatcggtcaacgacgcactggcgctcgcccgaacacttcacactagcggaaaccccgaagaggcgtggtactacctctgggaggccggatccattgtctcttaccgagacgggttcatggagggcagatacgaatcatcagaccgggccggcgcgactcgactagcggccgagtacggccggctaggggcggaaaggaaaaaggcgatcaacgaatcgaagcgtgaagacgcagttgcagcgttgttggctcagcacgaagcggacccgttccgaattaggcgtcagctaaaagaagccgccgccaagctcgggcctggcggcggaaagttacacactgatgcggggtggggatatcggctcatcaagcaaacacgcctttacgacctttacgacagcctaagcgctaggcggaagccttga

SEQ ID NO: 503694 - DNA, 1074 bp, Stenotrophomonas maltophilia
atgacaataaaaacaccattgaagaacaacagcagtttcatgcgcgaacgcgcttacgtgtggggtgaagacggcacccgcttcatcactcaccagttggacgcagtattagaggtcaagcgtattgtcgagacgatgggtaggctgatggcaagccgtaagacgccgttcggagtcgtgacgaagcacggccgcgagtgggttgaaacgaccgagctgggagattccatcctgctttgcctcaagtccggtctccgggaaattgatgagcacttccctgctcaccgccatagcccgctctttacactgttcaagcgcttcctaggtccgttcatattgctgggaggcaaggcttggccggaggacgtcccgcgcctcaatgctgcggtagcgaagatccgggcattcgcaaagggggacgccttaggccgccgcctggacaacctcaagcgcgcggagcgcgagaacgctaagtcctgcaaacgactgctcaaggctctacggggacgctactcgaagctgctggcggttcgcttggacctggagtacttctcgaacttctgtccaggtagtggtttcagggggcaggcaatggcgctgaaggacgtgcaggcccatcgcgatcgctttttagaacatctccgcaaggggccgtatgccgaacacttagcgggttacatgtggaagatggaatacggcttagagaaaggccaccacttccacatggctgttttcttcgatgggcagcgagtgtctcgtgacatcaccctcggggacttgctgggccgctattggcaggagaaggtcacagcctccaaaggcatgttcttcaactgcaataagaagaaggatgcctatgatcgttgtggcattggcatggtcaatcgcggagatgacgagaagtgggcatgcctggaagatgcgctgcgctacttgacgaaggttgatctgtacctgcgatttcgacctgacggccgcgcgcgaacatttgggttaggcggaccgtatggtggggtcaaggccggtccggctctcgcatcgtctttcggaatgggcgtcaaggcttccgcctag

SEQ ID NO: 503695 - DNA, 225 bp, Stenotrophomonas maltophilia
atgtctgaaaagctctgcctgaccaaggatgagatcaaggtgctgacgcgtacgcctcagaaagctcgccagctgcagttccttcgccagaacggtatccggcattacatcgatgggcacggatggccggtggtcctgcgggccgcagtgggcgtcatcgacccgccccctgctgccaagaccgtcgaatggtggccgaacaaggccggaccacgtcctggctga

SEQ ID NO: 503696 - DNA, 366 bp, Stenotrophomonas maltophilia
atggacgagttgccagccacactgcagcttgagcaggagatcgccctattgaggcagcagctgaccaccctgcggatcgacctttccggcaaagactggctgactgtggaagaggcggcgcactactgcggggtgtcggtcagtcagttcaatacgaaggccggagagtacgacctctcgccccgacagttcatggggaagaagctctacgagaaaaacgagctgtacagggcaatccatagctccagcggctggaaatccaaagtggctgccggcgcatcgccctccattgtccccaggccccctcagatagaggaggcattggcgcggctgcgccgctacgaccaacgcaacgggaagcgctga

SEQ ID NO: 503697 - DNA, 708 bp, Stenotrophomonas maltophilia
atgccggctgcaggacgccctcttggggacgaccacagaggcaggggagtgggcgctgtgaaaggacttctgatgctctttatggggctggcattggcattggcattggtaagccacgctgacgcgcggggcgtgcgggtcagcggttacgtcaagaaagacggaacctatgtagccccgcactatagaagcgctccgaaccggtctacgttggacaactactcaacccgggggaactacaacccctatacgggccaggctggcaagaaggatccgtacacgctacttccgccgagtggaggatacggctcccgatacgtgcccagtgccccggcgtcgacctatgcccaaccggcctatcgaatcccttcggctccgacggcaccgactacgtcgcgcttggcggactccagcggcggctggcccagattcaacgcgccggccacggcaagtccccaggatgtaaacgatgtggaacgctacggtagcgcttgcgctaactacctcgcgtcggcggccggaagtctctgcaacgacttcttgctagccgctgatgagatggccaggtcggcagagactttggccaagtgtgcttcgcggatggaccccaggcagacctgcgcagtcgaggctgatgacgccatgcagtcgtccattcgataccaagtcagcgcaagcaaggcacagagttactgtcgcgggccgtag

SEQ ID NO: 503698 - DNA, 363 bp, Stenotrophomonas maltophilia
atggatggaggccagaaggtgtggcacaccaaggaagcgcgcgccgcaaacgtccggcaggcaaagcggtacgccgagcgctggtgcgcggccaggctgtaccctgatctgccactgcgccaggctgtggcccggctgaccgacagcacgccgatccaaccggagcccccgctgcccggcctgccgccaacccgcgaacaacagcaacagggccggagcctggccgaggcctgggctgcagcatcggcccgagtgatggccgcactggagccgatccggccgctggtggagatcaagcccaaggcgaaggggccatggaaggggagactccgacccggcaaggccgatttctcaacggcgtga

SEQ ID NO: 503699 - DNA, 450 bp, Stenotrophomonas maltophilia
atgagcgcgaacctgccgctgcgcgatgtgcaggtgccacccgctccatcatggtggccgccggcaccgggctatctgatgatcggcggcgtgatgctgctgttgctggcggtggctgcattcttctggtggcagcgtcgccgtcgccgccaacgctggttgcagctgttcgatcaggagctggcatctaccgccgatgctgctgcggaactggcagccatcgccggactgctgcgtcgcgccgcacgccaggcgcagcccggcagtgaatccctgcgcgatgatgcctggtggcagcgcgtggatccgcagggcacattgccggaagcacgccgaagcctgttggccgaaggtgcctatcgcccacgcgtggacgtcaacgaggtggccgcagtacgccgctgggcgcgcgagcgctatctggccatgctgctggagcggcgccgatga

SEQ ID NO: 503700 - DNA, 3243 bp, Stenotrophomonas maltophilia
atgaaaaacgcaggaacatcgcgtcgccatggccccggcctgtcctcgctcgcccgctcaccgctgatgatcgcgctgctgttggcattgccctcggcatgggctggcacgctcgatgccgacgaaccgcatgaagataccgaagccctgtctttccagatgcagtcccaggcgctgtgggccgcgttcggaccggcctctgcgccgcatgctcttggcggcatgacatcgatcagtgcattgctcgcaccgaccccgcacgggcagctgaccttgaccaccgatacgtcctaccgcgactccaccctggacggcaatcatctggtcgtcgtcggctcgcgatcctcgctgcgtggctccacatcggtcggctacggcaatctcatcgactccaacggcgaacgcaatgttgcggtcggctacaacgtaaaggtccgccgcggctacagcacggccattggcggtgacgcctactccgatggcgtcggtacggttgcgctgggtcatttcgcccgtgcatattcggaaaactccatcgccatcggcagcggttccgctacggtcaacagcagcgccggtgaatcccggatcgcgattggtggaaacgcgtacgccggcacggccggctacacgggggcgatcgcgctgggcggggagagtcgtgccgagtacgatgcgattgccgtgggcaagagcagccaggccaaggccgaaggggcgctggctgttggacgattcgcacgagcgaccggggaaggcagcctggctctgggtaaggacagcggcagcaccggcaagcaggccattgcgctggggcagggggccaacgcctcgggctattcagcgtttgccatcggtgcgggggccaaggcagtggctgaagggagcatcgctttcggctacggcgccaacgctgacagcagcgcgcgccttgcggtcgctctgggcgagaaagccaccgcctcgcacaacagttcggtggccctgggcgcaaactccacgacatccgcatccaatcaggtttccgtcggcagcagctcattgaagcgcaagatcgttaatgtcgcagacgcggcgctgggtacgtccagcagcgaggcagtcacgggcaagcagctgtacgccaccaaccaggctctggccgccaccaccattaccgccaatgcggcaaaatccacggccgacagtgcgttgtccaaggccaacaccctgacaggcctgctcagccagaccagcggcagcggcaacgtgcgtctgggcgcggccaacagcggtaccgtgctggatgtgcgcaacagcgccaatggcagccgccgaatcaccggcgttgccgatggcacgctcagtacctccagtaccgaagcggtgagcggcaagcagctgcataccaccaaccagaacgtggacgccgccaccaccaccgccaatgccgcgcataccaccgcaaacacggcacacgccacggccaacaccgcgctggtgaaggtgaatgtgctcgacacgctgctcagccaggccagcagcgccagcgacgtgcggctgggtgcaggcaacagcggaatcgttctggatatcggcaaccgctcgggtgccgcgcgacgcatcaccaacgtcgccgacgggcggctgagtgcaggcagtgccgatgcagtttcgggccggcagttgcatgcgaccaacgagctcgctaaagcccaggacgtacgtctggatggacagggtgaactgattgccgacaaccgcaatgagctggagcggctacgcgatgccttcgaggactttgatccggacctggagggcgtggtgaagttcagcgccgaccgcagccatgtggacatggatggcgcgctggtcaccggcgtgggcgcgggcgatatcgactcggccaccagcactgatgcagtgaacggcgggcagctgtttgcctccaaccagcgcattggccaaatggaatcggtggggcggttgatggcctttggcgatgaggcgggcattgtggccgccggtgccggcatctatggcgtggcactcggcaacggggcaagtgcttcgccaacgtccgagggcggaaccgcgataggcgcgtactcgtttgcgatggggatgaactcggttgcggtgggacggggcgcctatgtcttggagtcatcagcggagggatttgcgctggggacgagcgcacgtgttgaggaaactggtggtcttgctattggtgcccgtgcatatgtcgaaagtggtgccgagaatgctgtcgcactaggtcgagcttcagttgctggcgagagcaataccgtgtccataggccatgcatccctgcaacgtcgtctgacaaatctcgcccgtggcaccgccgcgcacgacgcagtcgccatcgatcagctttcggacagcctggccgcgctcggcggcggtgccggtctcgattcgaagggcaacatcattcgcccgaactacaccatgcagggccgttcgcagagcacggtaggcgaggcgctgaacgtcctcgacggcgcggtggtcacgcaggcggaaaagaccgagcgcgtggagcggcagctgggcgccatgttccaggacggcgccacggtgcgcgccgatggcatcggccagctgaacctggccggcgccaacggcatggtgctcggcaacgtggccaacggcctggtggcggccggcagccgcgatgcggtgaatggcggccagctgcatgcgatgcaggatcagctcaacacccgtatcgatggtgtcgaaaagcggatcgacgaacagccgcagcccagcctgcgcactgcttcggcatcgggcgacacgccacagcctgcgtccgcaggtgacggcgacggagcgatcgccgctgcgccgcccaaggccgaagctcccgcaccggacgcaccgaccccgcaggtcgataccgccgaactggagaaaatgctggcccgtgccaacgagtacagcgatggcatctcgcgcgaggtggaccgccgcctggacaagatggacaagcgcttcaaccgcatggcggcgatgaccagcgcacagagcgcgatggccatgaacaccgccggcctgaatacctacaaccgccttggcgcgggcgtgggctacagcgagggcgaatcggccatggcggtgggctaccagcgcgtgttgaacgacaagggctcggccaccttcagcctcaatggggcgttcaccaacagcggtgaacgcagcctgggcgtcggtgtgggcatcggctggtaa

SEQ ID NO: 503701 - DNA, 1134 bp, Stenotrophomonas maltophilia
atgaaatatcgggacctctggaaatggatgctcgcctgcgcgctcgcggccgtgctgccgagggccgcggcgcagcagccgcctgaaacccacccttccagcgcacaccaggacatcgtgatgagctgggaccgctcggcgatacctgcggagatcgtgctgtgggcgccgaagacggtgctggcctattcggcggccgatccggatgcctatgggacggcgcatctggtgtgcaggtcggagacggatgcttcggaggggcggtgcccggttgttgggtgggaggaagcatcaagcaggataggggaaatctggctggaagccgaggagggccgcacagggcttcgtgctgatattcgcgtcgtcgggataacgatgcggccattcaatggaccggcctgctttgcgcattactggtcaatcgcgacgtacgctccgtggtcatcactgctagagacctgtcggcctcatcaatccgctggaatcggcgcccagctctccatacccgctgctgaacttgagcgcctggtggccggacgctggaaagctcgattgagtctggagatgccagcccaggccggtggccccagcctcgccacgtacaccttcaacctcgacttcaccatcaccgaccacgacgcggtcgcgatctacttcccgctgttcaaccacgtcaccccgcatgtcggcctgaacctgcgctacgaccccatcgcgaagatgatcggcgggcgcaacgaactggacatgtgcctgtacgacggcctgggctcgcaggccgcgtacctgggggtgaccgtgcgtgacagcactgggcgcacgcccggcggcagcggctactcggtatggcatgtcgatggcggcaacgacgacagccagcgtctggattacaccgtcaccctcgaccacaacggcacaccgatgccacttcgcaatggcatcgagcaacagctgcacggcatcgacagcgcgcggttgcgcatggtgttgctgcccggcatgaaccagccggtgttctgcgtacccaccccgctcacctttgaaaccccacgcgtgcccgttgccgaaaaacgcaacggccgctacgacggcgcgctgcaggtcgagctgcgcgtccctaccgcaaccccgtga

SEQ ID NO: 503702 - DNA, 1146 bp, Stenotrophomonas maltophilia
atgcccaggaccaccggcacttacaccaccaccgattcgggcggcgagcttgtcaaggccttcgtgccccatccattgccgcctacgatgccgccccttgatcctgcttgctacatggccaatgcggcagccgaggcggcgctgggacggctctccgccatgtcaggtttggtcgcttctgctgaatggctgatctacagctccatccgcaaggaggccttgttgacctcccagatggagggcactcaggcgacactgacggatctgctggatcaagaatccggaatcgacgtggccagtaccacagacgtcagcgacgtgacgaattacctgcaagcgttcgcgtatgtgcgagaccagctgaaacacgattggggcctgccgatctcaacgcgcctgttgtgcgaagcacatagcatccttttgaacagtgcgcgcggcgagcagaagttacctggtgaagtgcgccgctcccagaactggatcgcaggtacccggccaggcaatgctctttacgtcccccctcctcacatggaagtcggacggttgctgggtgagatggagcgctatatccacgagcctacgacagaccttcctcctctggtccgcattgccttgatccatgcacagttcgaaacgatccacccgttccttgatggcaatgggcgcataggccgcttgctgattgcagcattgctggaagactggaagctgctgccggagccactgctctatgtctctggcgaactcaagaaacatcaagacgagtactaccggcttctgtcggccatccgcgccgatggcgactgggagagttggatccgcttcttcctcgactgcacgaccgaagccgccgagaacgcccaaagaaacatcatcgacatcgcctcactcatcgcagccgaccggagaaaggtcatggctgcgaaagacggcacggtgcaggcgatccgcttgttcgaaatgctgcctacgatgccgcgcttcaccattacatttgcagctgaaaggctgggggtgacatttcccaccgccagcgcggctgtcaaagtcctgcaaagcgttgacgtccttgtcggtaccgggaatcagaaacggaaccagcagtttagctacaagcaatacaccgaactgctgcagcgctag

SEQ ID NO: 503703 - DNA, 363 bp, Stenotrophomonas maltophilia
atgtggtattgcgcacacgccattttctactacgagagtccaggacagggggcgttccgggtgcatgaaaacgtgtatctgatcagtgccgacaacgatgaacacgctcttgagaatgcagaagcgcttgcttccgggtatgaggatctgaccggtcgcctggtgggtgaagacggtaggccttccctctgtcgattcgccggaattcgcaagctgatatcagtggcgagtgatgaggacactgccgagggacgcctgcactcgggtgtggaggtcacgtactccgtcatggcggtggatacgttggaccaggtgaagcggcttgcccgtggtgatggcgtggcagtgctgtaccaggaatag

SEQ ID NO: 503704 - DNA, 2865 bp, Stenotrophomonas maltophilia
atgaacgttcgtattcctgcagtgcggctcggcttattgccggccggcattgcgcttgccttggcaccgtccttcgcttcggcgcaggacgcagctgccggcggcacgaccgacctggaccgcatttcggttaccggctcgcgcatccgccaggcgagcatggaaaccgcgcagccggtgatcgcgctgcagcgcgcagacattgaaaagcagggcttcaccagcgttgccgacatcgtgcagaacctgtcggcaaccggttcgccggcgatcagccgcgccgatgccttgagctcgggcgaagaagtcggcggccagtatgttgacctgcgcaacctcggcccgcagcgcaccctggtactgctggacggcaagcgcatgggcgtcagctccggcggctacaccgatctggcctcgatcccgacctcgatcgtcgagcgcgtggaagtgctgaccgacggcgcatcggcgatctacggctccgatgccattgccggcgtggtaaacatcatcacccgcaagaacttcgatggcctggaagcgagcgtctaccgcggccagtacggccagggcgacggcgacaaggaaacctacaacttcgtctacggcatgaccaacgaccgtggctcgttgaccttgggtgccgagtacagcgacgagaagccggtgctggccaaggaccgccgcttcagcgcctatgccaacggcccacgtcatccgttcccgaccgaagatgacgccaacggctggtctgcgatcaccgagaagggcgtactggtcaacggcggcaagaactacgtcgtgaaccctggcgccgatccgaccgattttgccaactaccatgagctgaccaacgccgacctgtccaacccgacgcagcagatgtatctgtcgaccgggatcaagcgtcgctctgtgttcgccaacggccagtacgatttcaccgacaacatccgcggtaccgccaacgttctgtatacagaacgcgaggcgctgcagcagatcgccggttacccgtaccgctccagcgcgtatggcaccaagctgtccaaggacagtgcgttcaacccgctggaccaggatgtcgacttcatgcgtcgcacctgggaaatgccgcgccagaccaagtccgagctgaataccttccgcttctcggccggcctggaaggctcgttcgagttcggcgataagtacttcgactgggatgtcggttacgtctacaaccgtaacaagggcaccaagaccggcaccggcaacctgttcatcccgaacgtgaagaatgccgtcggcccgtcgttcgtcgagaacggcgttgcttactgtggtgccccgggtgcggtcatcgccggttgcaccccgtggaacccgctgcttggttatggcatcgacggcactggctcgctgtccaacccggatctgcagaagtatctcttcctgccgacccacgacacgtcgctgaccacctccaaggtctacagcgccaacctgtccggcgcgctgttcaccctgccggccggtgacctgtcgtttgcagcaggctacgagcaccgcgaagagcaggccgaatacaacccggatgcgctgctgcagtcgggcctgagcaccgacctggccggtgcgtccacggccggtggctacaagctcaacgagttcttcctcgagctgaacgtaccgatcctggccgacctgccgttcgccaaggaactgtcggtcgacatggccggccgttactcggattacaacaccttcggcaacaccttcaacagcaagttcggcctgaagtggaagccgatcgatgacctgctggtgcgcggtacctacgccacgggcttccgtgcgccgacggtggctgacctgtacggcggcacctcgcagaccttcgacaagtacaccgatccgtgtgacaccctgttcggtgcggcggtacgtaacccgcaggttgccgcgcgctgcgccggtgccgtcccggccaacttccgccaggaagcatccggcggcatcgatgccactggcccggggtctcagtccaactacgcctacctgtccggctccaatgccgaactgctgccggaaacctccaagacctggaccgtcggcctggtgtacagcccgaacttcgtacagggcctggacatcagcctggactggtggaagatccgcatcgacaacgtgatcgcggccgaatcggttacctcgatcctcaaccagtgctacattctgggcaacgccaacgcgtgtgatcgtgtcacccgcgatccggagaacggctcccaggtgaccgacgtcacccgtacgctgatcaacggtggttaccaggaaaccgctggttacgatctgggcatcaagtaccgcctgccggagttctccttcggcaacatcgtcatcgactggaagaccacctacgtcgattacctggagtacaagcgcgacaacgaagagcagactgccgtcgagcagcacaccggctggggcactggcgactggggtggcaacttccgcgtgcgttcgaacctgaacatcgattggagcctgggcaacttcggtgtcaactggggcatgcgctactactccggcctgaaggaagagtgttcctacgaccgcaccggtggcgccgagtgcaacaacccggacttctcctcggcctacaccctggccattccggtccgcagcaccggttcgaacaccttccacgacctgcaggtgcgttacaacactccctggaatgccaccatctcggcaggtgccaacaacgtgttcaaccacgagggcccggtcatgtacagccagccgaactcgagcttctcgtactacggtggcttcgacatcggtcgcttctactacatgaagtacacccagcgcttctga

SEQ ID NO: 503705 - DNA, 1836 bp, Stenotrophomonas maltophilia
atgcagctcagcaaacacccgatccgctccctgatggcggctgcgatcgcgctggccgcgcttccggccatggcaggcgaaaacccgtactcgaaggccgtgttcttcggtgacagcctgaccgacgccggttacttccgcccgttgctgccgccggccacccagggggccaccggtcagttcaccaccaacccgggctgggtgtggtcacaacaggtggccaactactacggcctcaacaacggcgccaacggcaatggccagaacggtgacaattacgccgccggcggtgcccgtgtcagcgtggacgtaccgagcgcgctgggcgtcatcccgtcgctgaagacgcaggctaaccgttacctggccgcgaacggcggcaaggccgatcgcaatgccctgtataccgtatggggtggcgccaacgacctgttcgccgcagctggcgctccggcgcaggcccaggccatcatcggcgcagccgttaccgatcagatcgccctggtcggcgcgctgaagcaggcgggtgcacagtacgtgctggtgccgaacctgccgaacgtcggcctgactccggcattccgtggcccgaatgccgccaccgccactgcgctgtccgctggttacaacaaggccctgtacggtggcctgaagcaggccggcatcgagttcattccgctggataccttcaccgtgctgagtgaagtggctgccaacccggccatgtacggtttcaccaacgtcaccagcaccgcctgcaagatcgatccgaacaactcgacggtcagcattcttacctgcaacccgaccagctatgtcagcccggatgcgtaccagacctatctgttcgccgatggcgtgcatccgaccgtcgccggccaccagttgttgggtcagtacgccgtttccgtgctggaggctccgcgcctgcagcaggtgctgagccactcggcacagaccgtcggccgttcgcgtgccgaccaggtcagcaaccacctgggcgcccgtccggccgatggcctgtcgtggtggggtggcgtgcgcggtgacctgcagcgctatgatcacgccgacctgtacgacggcgtggcgccggccggcctgttcggtgtcgactgggcacgcaacggcgtggtggtcggcggcttcgccggcttcggtcgcatgagtgccgacttcggcaacagccgtggcgacttcacccagaaggacaccaccgccggcctgttcgctgcctggtatggcgaccgcgtctgggtcaacggccaggtcagctacacctggttgtcgtatgacatgaaccgcaaggtccagctgggcccggctacccgcgaacacggtggctcgccggacggcagcaacctgaccgctgcactgaatgccggttacgagttcggcaccgaaggtggcttccgccacggcccggtcgctgcggtgatctggcagaaggtcaagatcgatggttacagcgaaagcgctgctgcgggcacgctggccaccgccctgggctacgaccgtcagaacgtcgactcgaccgtcggccgcatcggctggcaggcccgcttcgatggcggcaccgtcaagccgtacgtgcaggtgacctacgaccacgagttcgaggacaccaagcaggccagcgggtggctgcagaccctgccggaactgggcagctaccgcgtgccgggcctggacttcgacaagaactacgccactgccgtactgggtgcgcgcatggacctgttcggcctgcagggcaacgttggcctgagcaccacggccgcgcagaagcgtgcccgtgacgcgacgatcttcgccaccgtgggtggcagcttctga

SEQ ID NO: 503706 - DNA, 735 bp, Stenotrophomonas maltophilia
atggctgcgatttcctttccgctgatgctggcactgctttccacccaggccccgatggccgcaaacgcggaaggtgactacaccagagccgcgggggcttcgatcgggcctggcatctgcgaccccggcatggacatgctgccgaacggcggaggggtggtgatccggcgctgcggcaagaatggaacggtcgctggcgttggcagcaatatcgatgctgcgacggccaacaccaatggcttccttgccgtcgccgaggaaggtcccgtctgcagtgtcttcgcgcgcgacccctatgtcagcctcccggcaccgggtgtcggtatcaaggcgcagtgcagttccacaccgctttccgcctatggcatgacgaccaccactgcgggacagaacgtacttgagctggccatcaacctggcggcgacgcaggcctggtgcaatgtcgactactactatgggtcggcgcatggctataagtatccctacacctgcaaccgcccgggccagtcctggagcgttgccggtcttggctccagcgtcgacgattcaaacgcaatggcaatgcggcttgtgaagaaatcttccaagaccggtacgcactgctattttgacaacgcccagttgaatggcgtcgtcttccgcgcatacctgcactgcaacggatcgacctataccggtttcgggagctctgtgactgctgcggccaaggacgcggctgcgcaagcgggcgcataa

SEQ ID NO: 503707 - DNA, 405 bp, Stenotrophomonas maltophilia
atgatccccgcacttttgcccctcaggcgttgctttgatttttcagggcgatccaaccggaaggagttctggtcgtactccctgtctgctgcccttgtggtggcagtgggctacaccttgatggacggcggatactggctgacgggcaccgtgctgctcgacggggaggccttcgagccgttccggacgctggggtgggtcatgacggtctgcgcggtcatcgtcctccttccgcccatgctggccctggccgttcgacgactgcacgacatcgacgagtctggctggtacgtcgtgattgccttcatcccgttgggcgtattcgtcctctttcctgtcatgctcctgccgggcaacgaggaagagaatcgattcggcggtgtttccggcctgccaggtgcctga

SEQ ID NO: 503708 - DNA, 867 bp, Stenotrophomonas maltophilia
atgactgccgtgaatcaccggaatctgctgcaggacatgctgccgcgatggagagcactggccaaggccccgggcctgccgcgccgcacgcttcgcctgccggattggcaggcggactggaacgcaggtatggccttgcttgcacgccatgcgcgcaatggcggtgaatctgtggaggaaccgctgcagggacatgcggccctggagcatgcctacggctgggagacgattgcacagaccggcagcaacctgctgctgaaaggcatcgaccgcggcttcgcccccgcggcgttgcagcagatgcatgccgacgtagcagatctctggctcgagcatgcgcatttgctggcccttgcccgggacagcctgcaacagcaaggccacgacatcgcgctggctgcgtcgttgcaatcgcgtacaacgcagcactacgaatacgcactgcagttgttgtcactgggcgtgctgctggatgcgcaggaacgcctgccggcgctggtggagaaggtgctctgtttcgacaccgaccgtgtgctggactacctcagcgcgccggcgctgggcctggtggaagccagtgatgaggtctttcatccgcgaccgttcgccgagctgttcgcgccgctgcgcgacggtgaagcgttcgacccttcactgctcgccggctacctgcaggtgcagtaccgcgacttcttcctgctgccgccaaaggctcaaaagcggacccggcgcctgatcgggccgaacgcgtggggctactgggcatttgaagtggctgcgctggtggtgctgtatggcggtgacgacgccacgctgcgcacctgcccgcactacccttccgacctggtggacttcgcccggcgttga

SEQ ID NO: 503709 - DNA, 1212 bp, Stenotrophomonas maltophilia
atggtgcacagtcgccgccgcccagcctgcatgaccgttgatcgaatcgccctccgccgcttcacccaatggctaccgttcctgatatgggtagcgatctgcgtggtgtggtggtcgccttggggtgtggtcgttggcctggccgcatgtcttgccctgggcggcgtgctgcagcacttcgatctggtcggcgatgccgtagggggcgcactgctgcgctcgcgggcgaagctgcccttcgcgccccggccgcccacgcatgatgtgctgttggattggggcgagctgggcatgggcggcccggcctacggcaccctgatgctgcgcgatggcgccattgtcgagggcgtatccaccgcaggaagccacgatgccagcggcgagtggctggcgctggcgggcagcgcgctgcgtgtggccagtggctacagtgatcgcagcgaagcggtgatcgtctacgacgaagcggacaagagggtgatgcacctgctggcgattgttcccagcctgttctggcaggagctgcacgagcgccggcagcttggcggggatgccgaagccgcgatgtggttgcgggatattcccagtcgatcgaccacgctgcgcccctgccggggtctatggctggaacaggagcatccggcgctggccgccggggtgccgcaggtgttgcggcatgtcctgcctgatgcccgggtgctgcaggccatcccgctgcttcccgacgacctgcgcctgactgcgcatccgaccttgttcgcgcgcatctgcccgtacgcgctctgtcttgatggcgagcccagtgaccgtcacgcctgcgatctggagacggtcattgccagcccgtccggtcgatgcgtggtggtggcgggaagcgtgcttgatgggggtctgcgtcccatcgagggcgtatggctcgtccactggcaggggcgttggcaggccattggccgccgtgcgatgggcggcactggcaagacccggagtggggcctggatcgatgtcatcgcggtcggcgatgacggaacgcttcgctgcgaagcctatgaggaacactggacgttcgaggcgatcacacgcgtccccacgccacatacggcattggcgctgcctgtggaatggcgggaaaccgcattggccgtgcgtgtccgcgatgggggcttctcgctgcgcctgccccgcgcggatcagcggccctcagtcacaggttag

SEQ ID NO: 503710 - DNA, 366 bp, Stenotrophomonas maltophilia
atgcgaatgggaattccgctgttgttgctgtttggcctgatggggagcgccgcacacgtacaggctgcgcccacccacgcagtctcccggctctacttcgatgccaacaacaccctgatcggccagggcctgcgctactgcacgggcaagacacagcaccagggcgttgcctcacacgccaatacccgctggatcgatgtttcctacgcctgccagggcgactcgaccgacgtttcctatggcagctgggtgcctgcgcaactgcggcaggacttctgcacgctgtatgacgcctgcacgtcactgatgccgtggccggaacccggcctgcccggcaccctcggcaacggcttctactcagactga

SEQ ID NO: 503711 - DNA, 477 bp, Stenotrophomonas maltophilia
atgtaccgcatcacgatgatcgcgttgttgctggggctgtctggcgctgtctccgccaagccggagaagaccgccatacagatggatgggcaggccccggtggccgagcaggtccggcgggttgagaaggccctcgatgacggcgagtacagcgagatttccgccgatgaccgcgcccaggtgcagcaggcactggcgcgcatcacccaacgcatgggcgaccaccgcacgcttcaggagctcccgccgcaggtccaagcagaggtgttcaacgaccaggagcgtatcaataccgttcttgtccgcgcccacgaggacagccgccagatctgccagcacacccgcaccaccggcagcaacatgcctaaaagccgctgcctgaccgtggccgagcgccgccggatcgaggaaaagggcaaggccctgctcaacgaccagcgcaccttcaacaacttcaaccctgccaccaaccactag

SEQ ID NO: 503712 - DNA, 555 bp, Stenotrophomonas maltophilia
atgcccctgcgcatggcacttgctggcgtgaaggtggtgcgaatacagtcaacactcaactcaaacaaggattcgtttgtcatgaagtccctcctgatgtcggcggtcctgatctcgggcctgaccctggccaccgcggcctctgcatcgaaccagtccggtgaggtctttatccccggcaagccgctgcagcagcagatcgagcgcatcgaaatcgaactcaacgatggcgagacctacagcgaactgaagcagaccgaccgcagccgcgtacgcgaggcgctggtgcgcatgcgtacggccgtcgagcagcatcctgaccgcgattccatgcctgaacaggtacgaaccgatgtcttcaacgaccagcagatcgtgaacacggttttgacacaggcacgtgaagatagtcgtctaatatgccaacgtgaaaaggccacgggttcgaaccggtccacgacgcagtgcactaccgttgccgagcgcgcccggcggaaggacaaggcacagcgtgatatgggccaggcccagcgcatcggcaaattcgtaaattag

SEQ ID NO: 503713 - DNA, 444 bp, Stenotrophomonas maltophilia
atgaagaaccagaagggcttcaccctgatcgaactgatgatcgttgttgcgatcatcgccatcctggctgccatcgcgctgccggcttactcgaactacaccaagaaggccaaggtctcggaagtgatcctggcggcctcttcgctgcgtaccgacgtgtcggagtacgtggccagcaacaatgcgctgccgccggcgtcttggaagccggacttccagcagaccaagtacgtcagcaagctggagtgggatggcaaggccatcgttgccaccgcccaagcgatcggtgacaacctgattgatgccaagaacatcaccctgaccccgacaggcgacggcagcaagggtgtggtcccgagctggacctgcggtggctcgatcgatgccaagtatcgtccgggttcctgccagggtaccgtcgctgagagcgaaggcggcgagtaa

SEQ ID NO: 503714 - DNA, 3051 bp, Stenotrophomonas maltophilia
atgagccgtccatccaacagccatggcccgtggctgctgctgatcttcatcctgtccgggttcgccgggctgatctaccagtccatctggacgcagtacctggggctgttcctaggacactcttcgcacgcgcagtcgctcgtgctgatcctgttcatgggcggcatggcgctgggcgcgtggctggtcagccggcgcagcgcgctgctgcgccggcccctgctggcctatgcggtcatcgaactattgatcggtgtgctcggtatcggcttcgacggtctgttccagggtgtgaccggctgggcctacacgcacctgatgcccggcatggagggggcgtcctcaacggcgctgcgctgggcgttggccaccgcgctggtgctaccgcagtgcatcttgctgggggcgaccttcccgctgatgagcgccggctatatgcgcctgcagccgaaggcgcagggtgaagtgctcgccgggctgtatttctccaacagtctgggcgcggcggtcggtgcgctggtggccacctacctgttgcttcccgcggttggtctgcccggcaccgtactcagtgcgggactgctcaacatcgtcgtcgccatcgtcgtctatcccctggcccgtgacgtcagtgccccggcggtgatcgccggcccggcgatcacaccgggatccgatggctcgcgccgcagtacggtgctgctggtgctactggtggccgccggtacaggcgcatcgtcgttcgtctatgagatcacctgggtgcgcatgttgtcgctggcgctgggtaccacgctgcattccttcgaactgatgctggcggccttcatcctcggtatcgccttcggtgggctgtggctgcgccgccgtgccgaccgcatgcaatcaccgctgcgggtggccggctgggtgcaggtctggatggggctggccgcgctggcctcgatgttcgtgtacgcccaggcctttgattgggtgggctggttgatgcgggtcatcgtgcgcagcgccgacggatacgtgctgtacaacctggcgagtgcggtgatcgccggactggtaatgttcccagccgcattcttcgctggcatgacgctgccgctgctgaccctggccctgctgcgcagcggccaaggcgaacgctcaatcggccaggcctatgccttcaacacactgggcgcgatcgtcggcgtgctggcagccatccatttgttgatgccgctgctgggcctgaagtacgcgttgctgttggctgcagtaacggacgtcgtgctgggcttgatactgctacaacgggttcagagcgttgcagccagttggctgcgttcgccggtgctccaagccggcgcactaggtgctctggccatggtggcgacaattgtgctggtacgtttcgatccgttggtgctgaattcgtcggtttacagacatggcaatgctcgtttggccgacacggcaacaatgttgttctcccgtgatgggcagactgcaaccgtcgcggtttacgagaacaccacagccgatggcagcatgcgagccatcgctaccaacggcaaggtggatgcaggaatggctgtatctatgcagcaggcgcccaccggcgacgagtcgacgatgatcctgctggcagcactgcctcttgcgctgcgcgacggttaccagcgtgtaggcgtaattggcttcggctcgggactcagtacgcacacgttgctgggcgatcgccgagttggccgagtggacacggtggagatcgagcccgctatggttgaaggcgcacgcctgtttggcgggcgtgttgagcgagccttcaaggacccacgctcacatgttgtgatcgacgacgccaagtcctatttcgccgcgagcccacgcaagtacgacttgatcatctctgagccctccaatccgtgggtgggcggtaccgccgcactgttcagtgacgagttctatgcattcgtgccccagcagctcaatgagggtggcgtgttcgtgcagtggctgcagatgtacgagatcacgcccgagctggtgagttcggtactcgcggggatgctggagcagttctccgatgcgcgcgcctacctggccaaccgcggtgacctgatcctcgtggccacgccgaagggcaagttgccgccgatgaacgaccgcctgttccggcagtcggcactgcgcgaagagctggcgcggatcggtgtgcactcgctgacggatctgcaggatacgctgtcaatggacgatgcagcgctgagggcttttgtgcccctgtacccggccgcgcgcaactccgactacttcccgacgctgaagctgaaggcgccggtggcacgtttccagagcgcgtttacccgcgacttccaggaagtgatggtggcgccctgggccatcgtggcacgaccggaagaggtgcatgccggcgacagcgtgaagaagccggcccagcccgattcgaaccgcgacgacccgcgtcccgctgctcgggcattggctgccttcctgcagggcactccgtcgttggcgcaggacgtccgcgccgccgactggcttcgtgcgcaggcgcttcgcggcctggccagtcgctgtgaactggacaaggccccgctgcagagcgcccagctggtgtttgcgctgtctggtgacaccacgccgttcctgcctgtcgcacaacgcgcggccctgtgggcgcagccggcatggctggcgtgcccgccgcagacccctactgtctctgccagtctggcactggtggccgccgtggccaccgatgatcaccacaccgtactcacggaagggcggcgattgttgcggggcgagcatggatcggcgctgctggctgatgccggctccggctattatctgttcggggcaatgcaacatgccgcacggtcgttgggggataccgcaacgtcgcggcagctgacggaccagtactggcaggcgcttgcgcctgacgctcgacggaacgggccactgcgcctgctgagctacctggcctccactggcccggtgcaggctgcaaccgctgattcccagccgtcagggcaagagtga

SEQ ID NO: 503715 - DNA, 291 bp, Stenotrophomonas maltophilia
atggcgaccgaagcggctgttccggagatcgtgaccttccgggatgcagcggctcgctacaaacaattggttatccccaagaagcgcgcatcaacggccaaggtcaacctggcagaactggcgaagctggaagaattcttctgcaatccaccagcgccgctggcgaagatccggccgcttcacgttcggcagtacctggactggcgaacgaagaacgggacggtggccatggtcagcgccaaccgcgagaaagcgctgctcagccatctgtggaacaagtgtagggaatga

SEQ ID NO: 503716 - DNA, 336 bp, Stenotrophomonas maltophilia
gtgtaccgagagcacaccggcgaactggccttcgcttcctgggcgaagcccctacgcatcatgggcgtgacgactgctccgttcggagcggctgagggtgcctacatgcaggtcccggctggtcggcggtacgcggtgatatcgtctcgctcgtgtcagcggatcgagcgtggcgtgggcttccgcctgaccgggccgcagggggatgggaccggtgggggaagttcggggcgcttctactacgccggcgctgccgctttgatcccccagtccgacaatgcgacgcagttcagtgcatccggccacttcgtgctgatcgacgtgaccggccactaa

SEQ ID NO: 503717 - DNA, 891 bp, Stenotrophomonas maltophilia
atgagaagaagcgtagcttacgtaggcatcgccatcgcactactcgcagccgccgcagtcgtcgcatactcgatgcgacctacaaataatctcgccccccaaccgacaagcttaaaaaatgaggagcttgaacactcctcagtgtcgccagttcgcgaggatctctcccatctcgtttctagagcaaaaattgaccctaaggtcgtaatccaaaatcggggccacgcctactcgatttcgcgaacacaatcgccacctcaaggtgacgccctgaaatatgtacagtcactcctacagagatccagaacaggggacgcaactgcgacatatgacatatacctagcagtcaatcagtgcaaatcagcgctagacaccccctccctatccctccttcaaatctacagatcacagggaattgaagaacaatacaagaactcgcttgagaaaaaccttgtcaactgcgaagcattgctgagcgatccggaactctcatacgagccgtggctaaagagggctgcagaccagggatcgattgaggcaaaaataatgtttgcgatggattccaaatccatcttgggaaatcgctcagattacctatctcatccggaaagactagccaactaccgtattgaggcgatgcaaaaccttcagtacgccgcatcgacaggcagcgtagatgctttgatggcgcttggaaacgcgttcgataatggcatcctcaccgaaaaatccccctcccaatcattggcatacttcaagtccgcctactcacttgcgcccaacccaagccttcaagagttgatttctcgagaatccaaatcactttcatcgagggaggttgaaatcgcaaacagactatccattcaaataacccagaattgttgcctctaa

SEQ ID NO: 503718 - DNA, 246 bp, Stenotrophomonas maltophilia
atggctgaacgggtgaacgatggaatctggattgcctcgctggaccggcaccggcacggcccgggaggtccgttccgctggtgcagcagctgcgagcaaggccgggcaggggccgagctgtgggtggccaggcacgaggcccggctgcgcgaggacgtcgcctcgatcttggcgcggcaggagaaggtccggggcaaccggctggccaaggccgaccaggatccgccattcggatggatgggatag

SEQ ID NO: 503719 - DNA, 318 bp, Stenotrophomonas maltophilia
atgttgagtgcagtactcatcgccgcgctggccgccagcccggccgcgcccgtaccgtatgccgattgcctgctcggcaacatccagcccgggctgtctgatcgtgccgtgcaactggtgcaggaggcctgtgctgcaaagcatccggagagcttcgccgcagcaatggaactggaacgcagaaccagtctgcagcggctcacctatttcgaggcggcaagagcggaggcggcacgttccgcgaatgcggcagcaacggccgcacaggaggctgccgacgcggcggcggataaagcgaagaatgcgcggacgaagtag

SEQ ID NO: 503720 - DNA, 921 bp, Stenotrophomonas maltophilia
atgagaaagcggctaatcggattcgtcacgctggcagcggcactggcagtggcagccgttgcagtctccagctatcggcagcaggagacggctggcaccacaccgcaggaatccgacagcagcggaagccagcaaggcacgcctgctcatggagagcagcttccagcatcacgcgcaacggccgcacagacgcttgaaagcgagaacaagattcctcggggctcgtacaaggcagtgggaccgaaagcctacgaaatcgtcagggcaaatgaattccgccctgctggtgacgcgctcgcccacgtcaagcaactgatgcagcgctccgaatctggagatgccacggcgacctacgaaatctatcggaccgtcgagcaatgccagaccttcatttccgatcgcgctgacaagctggccgattcagctgccagcgtcgggtcgggcaactggttcctggaaagatccgagcgaatcctcaaggagtgcgagtcactcgctctggatcaggacatctatcacgccgattggctctcgaaagccgccgccatgggctcgcaggaagcgatgcgcgcctactcactctctccagagaaggccatcggttcgcttgatgacgccatccgtgacccggcgaagcttgaggcatggaaggaaacagccaccgggtatctgcgcgagctggaagcacaggggaacgtcaacgtcatcagcgacatggcaatggcctacacctacggcggcatcgttcctgcagatcctgtcgccgccctggcatacacccgcgtcctcaacagactggacccgcgattcgccacaaccaatgacattgcaacccgtgagaaaaacctgagcagccaacagaaagaaacagcccgcctgtcatccaacgagatcttcaagaactgttgcatcccacgataa

SEQ ID NO: 503721 - DNA, 366 bp, Stenotrophomonas maltophilia
atggctgatatcaatcgattgcaccgcacgctgtgggttcccttcgcgttgatggcgctggctgcctgcgcgccggccaatgatcccgcgaagaccgttgaacgcgatgcgggcacggagagcactccggcgcgcccggtgggtgacgccatgcagatgcagccggctcagcctgcggaagcggaggtcctgcctgacgcggtggatgtgcagcgcaatgcggacggttcggtggatgtgcgcaaggtaatgcctgagtcggtggccctgcgccgtaccgacgacgggggcgtggagatccgcaagggggaggcgcccgccgaacatgcaggcatggcaccggcccgcgctgtaccgcagcagtaa

SEQ ID NO: 503722 - DNA, 390 bp, Stenotrophomonas maltophilia
gtgagcggtgctggccagcccgccgacgcggcgctggctgccgagctggaggcgctggaacgcgcgctgcatgcgccgcaggtgcgcgccgatcgcgagcaactggcggcacttctggacgaggatttcagcgagatcggcagttccgggcgatgctacggccgtgatgcggcgttgcaggagatcccgctggagcgcgcgcaggggctgatcgaatcggaacggtacgcggtgtggctgttggccgaggatctggcccaggtgcgctaccgcagccgctatcacgttgatggccaggcccagggctgggtgttgcgcagttcgctgtggcgacggcatgcgcaggaatggagggtggtgtttcaccagggcacgcctgaggcgcggtag

SEQ ID NO: 503723 - DNA, 1107 bp, Stenotrophomonas maltophilia
atgagttcgaccgacagcgctcacgccgactgcgagaactgcaacaccgccctgcagggccactactgccatcgctgcgggcaatcggcgcacaacccgctcaagcacgtgggccatgccatcgaagaagtgttcgaatccttctggcacctggacgggcgcatcttccgcacgctgcgcgatctctgggttcccggccgcatcacgcagaactacctcaagggccgccgggtcggatacgtgcagcctttgcggctgttcgtcatcctcaccctgtttacgttcttcatcggcaaactgttcgtgcacgtcgacgacatccgcatgggcggaggcgattcgctgtatgccaagtccatcaccgttgaacaggtcgaggccgcacgcgcgaaacagctgacgatgatcgatcaacagcaggccagctcacctgctaccggcaacgccggcttcgccatggccagagcggcggtgaatgcggcagccgcacagcgtaaagccgagctcaccggcaccagcaaggaggtcgccacgaccgagcccggcaccttcttcaaccacaccgtcaacggcaaaccgtgggacgctgacaccaaccccatcgtggtggccggctggccccggttcgccaacaactggctcaacaagcgcctgcacaacggcaacgccaacatccagcgcatggggggcaagaccgatctgtacatgcaggcgatcctgaccgcattgcccggtgccctgttcttcctgatgccggtgttcgcgctggtactgcgcatcgcctacgtgccacggcagatggggtatctggaacatctggtggtggcgctgtacagccactgctggctgatgatggtgctgctggcaaccttcctcatcgccggcatcagcagcgcgctcgcatcccccgccttcgccgccgccagccaatggctgtatgccctgctgtggctggcggtcccggtctatctgctgtggatgcagcaacgcgtgtatggcggcaacaaggcgctgaccgtgttgcgctaccttgccatcggcggcgtctacctgttcctggtgagcttcgtggtgatgtatgcggtgctggcgggaatctcggcctga

SEQ ID NO: 503724 - DNA, 1035 bp, Stenotrophomonas maltophilia
atgccgtcggctgttgaaatccatccgggctgcctattcacaccgctgccgttgatcaaggaagcggccgatccccgcatatgggaagaccatggagtcgttgtctccagtccccagccactgtcaggacactcattttcctcagtgacgcacactgactggcggatggacatgaaagcggctcgggcactgctgctgattacagcccgattcaatcgtgtccacagagtccacgtggctgagagctattcactttcacccagtgccaaggacggaatcattcaaagcatccgaccgctggcaactagcgatgttcaggattggaggagttttctggagcagatggctcagtgctccggaattgcaccgttccaacttcgctcagatcgctcctgggtcggggcagcatcgcccttagaggcaagtcttgtttgccccgcaatggcaagagtgccgcaacagatggcggatctagtgtcattcctcgcagatcatctcgacaaccccaatgaggagattgacgaagccgcggcatttcagttcttgacgatccatccgttgcatgacggcaacggcagagtggcccgaaccctcttgatcaaaatggcctccaggaaacgtagcttgtatccgctttacattgcgtggcggctcatgttcgacaaaattggcctaactagatcatggcgggagcgatccatggacggtggaaccttattcgatgtgaaccactacatccaatggcgtcataccagctctaacatcgggaaagcctatctcgatgcagaagcggcagggtgcgatacccgcgttctggattgtctagcagccttcggacagatttccccagccggcatctgtgcactcaacagcacggtaaatcatgggctttccgcaaaaatagtttccaaacacgaggactgtcgccacatcaagttctatagcgaaacgcttcgcacccttctccggaagatctgcaaggacagtgcttcgggagaaaattgccctcctcaatcgataaatgcacaaggatga

SEQ ID NO: 503725 - DNA, 489 bp, Stenotrophomonas maltophilia
atgcggatggctcattcgttcgtcaatggcaaggcctattgggaaggaacgccgatccagatggattccctagccatctggttccttcaagtagctttgcaggaacaggtcaacagtttcgcctcaggcgccagccttgtggagaccaatgctcgcatgcggattcagcttggtttgacatgtgacattcagctcgatgcgtcgagtcagtatcgcgtcgggggaacgctgaccaagccggaacagtattgtatcgagatgctgaaagcattcgatgctgaggccaacgacaatcagaatttcatgatttggttcattgaacatcaacgaaaggttggcgtacccctcgaaaactacgttccgtatgggatcgtcgagctcgttgacacgcgaaactctatcggcgagaaatggcgtgcagtgacggaagacgcatcctgctcaaaatggtggacacaggtccagaaaaacatgtgcggggtaaagtaa

SEQ ID NO: 503726 - DNA, 705 bp, Stenotrophomonas maltophilia
atgcacgcgagatcgattctgtttacggccattttggcagtcatcgccacggcttgttcagaacaacccgccccagacaagggcgcagtggcaccggcggcagaaggcgccgagtcgtcccactctgttccgggacagacaccacgcgctaccacgtcccagcactcgacgggtggtgaatcccatagctttgacgcggccgtggttgcgcagcgcttgtgcactggagactgccgtgacgccggccctctgcaagcaagatcgcaagaagaggctgaatggctaattcggcatcaatatccttcgcaggctgaactcgagcggcttcgatcagagtcgctggatgtattgcagcaaaaggcgtcagtgggcgactccaccgcagccgcggtgctgggaaaacggattgccttggagaagaacttcatggacggccaagtcatgctccgaaatcaggtgctatcgggcaacttctatgcgctttacgcgatctcagagtcgtatcgcgaatcgaaagtgccaaacgcggtagatggtgcagcatatctccgtctggcttacatcatgggcgaccacaaagcagcgaccgagattgcgaagatgggtctcagctctgcggagctggcggctgccgacaggagagcgtctttgctctacaagggattcgcaggagaccaggtgcctgatccgcgcccacaagggtag

SEQ ID NO: 503727 - DNA, 171 bp, Stenotrophomonas maltophilia
atgatgtgcctcgcgtaccagctgtcgcgcggccacgatcagcccgtcggtgtggaaggcgcccaactgttcgtccgggtcgccttcgttacgcacgtgggcgggcccgtgccacgaatggaagcagagggttccatccctgcgctgtcccgccgccccgggcaggcgtag

SEQ ID NO: 503728 - DNA, 126 bp, Stenotrophomonas maltophilia
atgcgcgaagcgcatccacgcatggcgtggatccacagcgtggtgggcgtgcgcagggagggcgtgcccatcgctgtgaccggcagcacagccctgcgtcaccgtgtcgcagggggcaaaccctga

SEQ ID NO: 503729 - DNA, 882 bp, Stenotrophomonas maltophilia
atgcagccaatttctcgtatttccttcgaaggccaggtgggcctggtgaccggtgccgcgggtgggttgggcctggcctacagccgcctgctggccgagcgtggcgcgtatgtggtgatgcatgacgtcggtgccggcaccgatggccgaggtgccgatccacagcgcatcctgcgcagcgtcgaagcgctgcagcggcagggtttgccggtgcaggccgcaagcggtcccatcgaccatcgtgccggttgccatgcgctggtgcaggaactgctgcaggcgcacggtcgcattgacttcctgatccacaacgccggctgggtcgagtaccagacgctggaagcgatcgaggacgaggcgctggagcagatgctgtgcctggccgcgaagacgccgctgtggctggcgcaggcggcgtggccggcaatgcgcgcggcgggcggtgggcgcatcgtcatcaccacctccgatcgcgcgctgtatccgcagtacgcacagcgcgggctgtccgcttacgcgatgggcaagttgggggcgctgggactggtcaatgtgctggcgctggaaggcgccgagcatggcatcgtggtcaacgcggtttcgccggtggcaaagacgcgcatgtggggcatcgacggcgagcccgacgaactgcatccggacgcggtcgcgcagggcgtggcctatctgacgtccacgcgctgccaggacggcggctgggtgctgcgcgcaagcaatggccagttccacgcactgcgcctgcaggaggccgagcatgtggcgtatccgcgggatctgcgcgcggtcagtgccgacagcatcgagtcggtggcgctgcaatggccagccattgcccgcgccagcgtggacgcgcgctgctga

SEQ ID NO: 503730 - DNA, 879 bp, Stenotrophomonas maltophilia
atgatcgacctgcgcctgcttcgccagttcgtggccgtggccgaagagcttcatttccaccgcgccgcagcccgcctgcacatgtcgcagccgccgctgaccgcggcaatacgacgcttggaagacgaactcggaagtgaactgatcgtgcgcggcaaccgtaccctgggcctgaccgtggccgggcagacgctgttggtggaggcgcgggcaacgctgcagcaggccgagcaggcattgcagcgcacgcgcgaagccgccgccggacagtccggcagtctgcgcgtgggctatgtgggcagtgcgctgtatggccggttgccgggcctgatccgccgcttccgccaacagtacccgcaggtgcagctgcatctgcaggaagcgacctcgcgtcagcagcagctgtggctgcgtgagcagcgcatcgatgtcggcgtgttgatcccaccgattcccgccgccgagctggtgctgtacggcttcgaccacgaccgcctggcgattgcgctgccgcgtgcacatgcgctggccaacgcgccggaggtcagtgtggcgatgctcgccgatgagccgttcgtttcatggccggcgggcgagggcatcggctttcatgcgcaggtgctgggcctgtgcaccgcagcaggattcaccccgcgcgtggtgcaggaagcgcagggcatgcacgcggtgctgtcgctggtggcggtggacgccggcgtggcgatcgtgccggccagcatggccagtttccgttcgcaggaaatcgtctatcgcctgttggccgatgacgcagcgcgcttcgcgctgcagttctgcgcgcgcccggaagctccgtcgccagtgctgcgcaatttcctggacgccgcgaccgcgagctga

SEQ ID NO: 503731 - DNA, 2091 bp, Stenotrophomonas maltophilia
atgcccgctctgccgtcgcgtccgctgctgtacacgctcgccctgcccaccctgctggcctcggccatcgcccaggcccaggacaccccggcggcgcgcaccctggacagggtaacggtggtggccgagcgggccagcaccgcgaccaagaccgacaccgccctgaccgagacgccgcaggcgatcagcgtggtcacccagcagctgttcaccgatcgcggcgcgcacaatctgcaggaagtgctgcgctacagcgccggcgtcaccgccgatgcctggggcctggatacccgcaacgatgcgacctcggtgcgcgggctggacccggtgcagtaccaggatggcctgcgccgcagctacggtttcagccccctcgcccgcccggaaatctatggcctggagcgggtggaagtgctgcgcggcccgtcctcggtgctgtacggtgccggcgccaccggcggcatcatcaatgcaatgagcaagcgcccgaccttcggcaccctcaacggcgaggtcggcgtgcagctcggcagtttcgaccgcaggcagctgcagggtgacatcggcgccgcattgaacgatgccggtacgcttgccggccgcttcgtcgggctggtgcgcgaatcgaacatgcagaccgatgtattgaaggatgaccgcgtctatctggcaccgtcgatcagctggcgcggtgaacgcagcaccttgaccctgctggccagctatcagcatgacaagaccggctccagccagcagttcctgccgctggccgcgaccctgcttgcaccgcccggacgccgcctcgacccgtccaccttcatcggcgatcccgacttcgaccgcatcgactcgcgcgtctacagcctgaccgcgctgttcgaccacagcttcaacgacacgctcagcctgcgctcggcagtgcgttacatcgatggcagaaccactctgcagcagatgtacgtggacagctacagcaatccggccgatcccttcatcgacgccgatcggcgcgtggtcaaccgcacggcctatggcacccgccccgacgtgcagatcttcagcgccgacaatgcgctgcagttcgacttcgccaccggtgccttccagcatctgctgctggccggcgtagactacagccaatacaaggagcagctgcagcggctggacgccaccggcacgccgatcgacatctacaccccggtatcggtcgcaccgatcgtgcgtggctgggatcgtcagccggaccagacctccacccagctgggtgtctatgtgcaggaccagatccgctgggccgaccgcatctcgctggtgctgggcgcgcgccgcgaccatgcacgctcgaagaccgaaggccagcccagccagaccgacaatgccaccacctaccgcgccgggctgatcggcgaactgggtgcgggcgtttcgccctacctgagctacagcgaatcgttcctgccggtatccggccaggatctgttcggcagcgccttcaagccgatgcgcggccgccagtccgaggccggcatcaagtggcaaccggcgcgcagcctgctgctgacgctggcggcgtaccgcatcaccgaaaccaaccggcagaccaacgacccggacaacgtattgaacgtggtgcagaccgggcagatccgctccaagggcgtggagctggaagggcagttccagttcgccaacgacctgacagtcaccgccgccgttgcgcgcaacgaggccgaggtcagccgcagcaacttcgcattggaagtgggccagcgcctcaacgacactccgcaggacctggcctcggcctgggtgtcgaagggcttccagctggatgatgccgcacgcctgcgcctggggctgggcgtgcgccatgtgggcaatacggtgtcgctgggcaatggcgggcgcatcatcacgcccagctatacgctggccgatgcattgctggaagtgcaggtaaccgactggacgatggcgttgaacatcaccaacctcaccggcaagcgctactacgcgccgtgccgcacttttggcgactgcttcgccggctacccgcgcgtggtgaccggcaccatcagctatcggttctga

SEQ ID NO: 503732 - DNA, 669 bp, Stenotrophomonas maltophilia
gtgaagggcgtaacggtggtgcggatcaccctgtgggtgctgtggagcctgtgggcgcttgcctgcgcggtgctggtgctgggcgcgatcgccaaccacatggcctcacgcacgcaggtgctgcctgtggtgctgagcccgggtgcgacggccgaggtcacggtctaccgcttcatcgatgaccaactgcggctgcgcctgcgttacgcggatgacggtacttccacggcgatcgatcctgaggtgcgcctgcgcgtggaaaccccgacagatcagaccgacttccgcgccgaaacgcgttcgggcgtgccgggctccggcatcacccgcgcgctggaatcggttgagcctgctggatttgccgcctcgtacttcggttatggccggggggatgcgctgccgcgcgggcgttcgtggctgcgggtgaccgttctggaggtcgagcccgcgctggcgggacgcgtggcctcggtggaactgctgccaccgatggacgtgctgaagctgaccgacctggactacgtgtggctgtggtcgttcttcttctggaaggtggccgcgctgttcctgctgattccgggggctgccttggcggtattcaccatcaccttgcggcgttggcagcgtcgggcatcgaagcagccgatttcagtagcggatacgggttga

SEQ ID NO: 503733 - DNA, 807 bp, Stenotrophomonas maltophilia
atgtactgcacgggccggatgtaccggctggtggattgggagaacatcgtggatctggggcttgaagggcgtaccgcgctgatcaccggggcgggcagtggcatcggtgccggtgtggccaggctgctggcggcacagggagtacgcattgcgatcagtgcacggcgtgccgagccgctgcatgcattggcggcggagatcgaatctgcaggcgcgccggcaccgatcgtcctgttgggcgacctcaccgatgcggagcaggtacgccacattgcggatgcagcctcggcggcactgacgcgtgtcgacatcctcgtcaatgcggctggaggaggccggccgaccacggtggatgcgggggacgatgtctgggaggaagccatggccttgaacttctcttcggcacgacgcctgacccaggcactgctgccggcgatgcaggcgcagggctgggggcgggtgatcaacctcagcggttcaatggaaccgcgcgcggtgaatgctgccacggcggcgaaggcggcgttgcatctgtggagcaaagggctgtcgtcggcgctggcctcacagggcatcacggtcaatgcaatcgcgccgggacgcatcaacagtgctcagatccgggaccgcctgcatccaaccgaggaaagccggcgtgagttcatcgaacgcaacattccgatcgggcgttttggtgatccggaggaggtggcgccgctggtggcctttctggcctcgcccttggccggctacatcaccggcgcggtgattccggtggatggcggcatgcactacttcgcgcattag

SEQ ID NO: 503734 - DNA, 519 bp, Stenotrophomonas maltophilia
atggcaaccaagaaagctgcgaagaagaagcccgccgccaagaaagcggtgaagaaggtcgcgaagaaggccgctgccaagaaggcagtgaagaaggtcgcgaagaaggcgaccgccaagaaggcagtgaagaaggctgcgaagaaggtcgccaagaagaccactgcgaagaaggcagtgaagaaggcggcgaagaaggtagccaagaagtccactgccaagaaggccgtcaagaagaccgcgaagaaggccgtcaagaaggtagccaagaaggccaccaagaagactgccaagaaggcaacggcccgcaagccggccaagaaggtcgcgaagaaggccactgccaagaaggctgtcaagaagaccgccaagaaggcagtaaagaagaccgcgaagaaggcgaccaagaaggctgccccgaagaaggcagcgaagaaggttgccaagcgcaagccggccgcccgcaagaagaaggctgctccggtcgctctgccggcaaccccggcgccgctgatctaa

SEQ ID NO: 503735 - DNA, 669 bp, Stenotrophomonas maltophilia
atgaaagacaatctacagctgctcctgtcccacctggggcgcaccttcctgttcggcctgatgatggcgcttccgcctgcgttggcctggctcgacatccattggctgggcaatgcagtcggcgagtggtcgctggtcgaactgacccaggaaggcttcctggtcgccagcgtggctgccttcgtccggcttgcattgcgacgtgccgatgatcgggcctttgccgttctggcggccgcgctgttcgcctgcatgctcctgcgtgaaatggatgaggcgctggacctgatcgcacacggcttctggaagtacccggtggccgtgctgatcatcggctcactggcctgggccagtcgcgactggcgccgggccatgccggcgctggtgcgttttctcgtatcccggccgggtaccgtgatgacgatcggcctggttctgctgctgttctattcgcgtctgatcggcatgacgtcgttgtggaccggactgctgggtgaccagtacatccgcgtgttcaagaacaccatcgaggagaccaccgaactccttggttacaccttcattctcgcagccagcgtcggctatgtggcacagcgggtacgcgaaccgctgacggcacggaagcgcgccgtgcacgagggtgccgggatgcagcaacggccactctag

SEQ ID NO: 503736 - DNA, 1188 bp, Stenotrophomonas maltophilia
atgcgtcgtctgctgttatgcctgtccctgcttgctgctgcgccactgcacgctgccgacatcaccttctgggacgttccgcaacgcggtggcaacagcatgaacatgtcgcctccggaccggaaatacttcgaggcgctgcgtgcgaccggtgcgacctgggtgcggctggtgccggacaagtggaaggggcggggcggtcgtgacttcctgatcggcaacgccgatgactatcgcggactggttccggccgacctggccacgctgcggcgggtgctggatgacgccgatgcggccgggctgaaagtggtgctgacgccgctgtcgctgccgttgctgcgctggaagcagcacaacggcgatgtggtcgaccagcgcctgtggcagtccttcgacaaccatgtgccggcccgtcgcttctggcatgacctggccacggcgctgaagggtcatcctgccttggccgcctacaacctcatcaatgagccggtgcccgagtacggtgcaggcctggccgagcatgcgtccactgaggcgatgcagcggtggtatgccggtgtgcaggacggcccacgcgatctgcgccgcttctactcggagctgatcgccagcatccgcgaggtcgacaccgcgatgccgctgatgctggatgcgggctggtatgccgccgccgacggattcaactactggccggcaccgctggcggattcgaagctgctgtacagcgtgcacatgtacgagccgtatgcagcaaccagtgcaccgaaccagacgcgtgccaaaccctggcgctatccggcgcaggtgccgttcggtgcaggcagcgagcagtgggatgcggcgcgtgtacgccgttacctgcagcagccgatgacgtgggccgcctcgcatggcgtcggtgccaaccgcatggtggtggccgaattcggctgcatgcggcggtggccggactgcagccgctacctgcaggatgtgctgcaggtgctggagcaggacaaggtgcactgggccttctacgccttccgcgaggatggctgggacggcatggactacgaactgggcgacaagccgctgccgtggtcgtactggcaggcgcaggaaaagggcggccatgtcgagccgccgcgctcgatgcaggcgcccttgttcgcaccgatcctgcagcgtttgaaggcgggcaaccgataa

SEQ ID NO: 503737 - DNA, 1461 bp, Stenotrophomonas maltophilia
atggccaaagcgccgcttgacctgacctccggcccgatcggccgcaaccttctgctgttctccctgccgatcctggcgggcaacatcgcgcagtcgctgaacggttcggtgaatgcggtctgggtggggcgcttcctcggcgaggcggcattgaccgccaccgcgaacgccaacaacatcatgttcttcctgatcggctcggtgttcggcttcggcatggcctcgaccatcctgatcggccaggcgatcggtgcgcgcgacatcgcgcaggcacggcgcgtggtcggtaccagcgccaccttcttcatcggcctgtcggtgatcatcgccatcgccggctggttcatggcccatccgctgctggcggcgatgggcacgccggccgcctcgctgccgctggccgaggcctacctgcagatcatcttcctggcgatgccgacgctgtacgcgttcgccttcctcaccgccgcgctgcgcggtgccggtgattcacgcacgccgttccgtttcctgatggtgtcggtggcgctggacatcgtgctgaacccggtgctgatcttcggcatggggccgttcccggcgctgggcattgccggttcggcctgggccacgcttgtcgcgcagacgctgtcgctggccggcctgctgctgtacatgcggcacaagcgccacaccctgtggctgggccgcgccgacatgcgcctgttcaagctcgacctgaccatcctcaaggcgctggtcatcaagggcgtgccgatgggcctgcagatggtgctgatctcgctgtcggtgatcctgctgatgaccatggtcaaccagtacggcaccgacaccggcgccggttacggcgctgccctgcagctgtggaactacctgcagatgccggcgatggcgatcggtgcggcgtgttcttcgatggcggcacagaacgtcggtgcgcagcgctgggatcgcgtgcgcggcaccgcgcgccagggcgtgctgttcaacttcctgttgaccggcgcgctgatcctgccgctggtggtgttcgatcgccagctgctggcactgttcctgccaccggccagccaggcgctggacatcgcccgccatctcaaccacgtggtgatcggctcgttcctgttcttcggcgtcagcttcgtgatctccggcgtggtgcgctccaccggcgcagtgattccgccgctgctgatcctggccggttcgctgtggggcgtacgcgtgccgttcgccgaactgctgcagccgtactggggcgccgatgcgatctggtggagcttcccggtcagctcgctggtgtcgatgctgctgtcgctggcctattaccgctggggcggctggcgcaaggcgaagatgatgggcaagccctcgcacgccgaagaactggccacgccgtcggagattccggcctgcccgccgtcgccggtggcagacccggatgccgcgccactgcggtag

SEQ ID NO: 503738 - DNA, 495 bp, Stenotrophomonas maltophilia
atgcgcggtactgccggccgctggccggcaatttcaaactcctccggaagcatcgcgcaacagccggccagcggccggctctaccgcttcttcttcgccgccggtcattaccacggtagcgccggccgctggccggcaacctcaaactcctccgggggcatcgcaaaacagccggccagcggccggctctaccgcttcttcttcgtcgccggtcattaccacggtagtgccggccgctggccggcaacctcaaacccatccgggggcatcgcgcaacagccgaccagcggccggctctaccgtttcttctttttggcagcgttgaacgtggccgccgcgcgcatcagcgccttgaacgcggcggcatccggcatcgcgccttcatggatgtcgatcgcacgtcgcgtgttgccgtccaggctggcgttgaacaggcccttcggatcggccaacgccgcaccgttggcaaaggtcagcttcaccgcctgtttgtag

SEQ ID NO: 503739 - DNA, 2799 bp, Stenotrophomonas maltophilia
gtgaaggcaggtccgggtgcgctgcagtgggggctgctccgcgccctgctatgccttgcactgggtgttgccgcactaccgatggccgatgccggcgagcccgccggcacgctggagatcgacgtgggcgccggcccactggtgccggcactgcagcaatgggcccggcagagtggcaccgccctgctgttcgacgcacgtgaactggatgatctgcgcaccggcggcagccgtgaccaacgcgataccggggcctccctgaagcagctggtcgccggcctgccggtgaacatcctgcgcacttcatccggtgcctttgtcgtgcggcgcgtccatcccgagccccctgccacgccgccgaaagcggtcgcagccccgcgcctgccgcgcccggctcccaagtccgccgacacgccacaccaggtggaactggcgcccatccatgtcaccggcagccggctgccgcgctcttcggtgcagaccacactgccggtcaccaccatcgatcgcgacgatatcctgcgcagcggctacggcaatctgttcgacctgctgcggcacctgcccggcatgaacggccatccggccatgagcacctcgcgcggcggcgattcgcagtacctgccggtgggcgcagcggccaccaccagcctcgacggcatgggcccgcgggcgacgctgttcctggtcaacggccggcgcctgccgcgctatccgatggtgtcgctggaacagggtgggctcaccgacctcggcggcattccgctgagcttcgtcgaccgcatcgaactggtacgcggtggtgcctcggccatctatggggccgacgccatgtccggcgtggtcaacatcatcctgcgcgaccaggccgatgggcccgaagccatgctgcagaccggcctgagcagccgcggcgatgcgggccagtaccgcctgcaggccgccacgggcggcgcgcgtggcaacggggaccgctggtttgccggactcgatctgcaccgtgtcgaacatgtcgccggtgaccagcgtgactggcacgcggaaacctcgctgtatccgatcggcgcgatcttcggcaactggtacgtgcccgcccggcgctgcgagccgcccctgaagcggcgcgaggatggctgctggtttgacagcgcgcggccgcggtcgctgcagcccgcctcggataccgcgtcggccttcctgcactaccggcatgaacgtggtgagggacgctatgcctatgtcgaggcgcgggccagtcacaaccgccagcgcttcgatctgggcccgaccgccgttgcggtggtgtcgcgcggaatcaccttcaacagtgtgctgcgtgaggccggcaacgtgcgccccagcgtccgcgccaccgatgccgaccttaccttcggcatcggccgcgaccagggccggcgcagctgggaggcgggcatcagcgcgcagcgcagcgacgtgaccttgtccactgcaggcaccgtgcgcacgacacgcctgcttgaagcaacgcaggcgcgcaggttcactcccggtttcgacgcgccgccggcggccgaggcggacacgctgtttccgtccatccgcaaccgcggcagcaccgcacaatggcagggctggtggggcgtgcagcgtgagctgatggcaatgcccggcggcaatgcgcagctggccaccggcatcgacctgcgccatgaacgctggacctcgcgcccggacgcactgctgagccagggcgaccttgcgctgggcctgccacagcagcgacgccgcctgtcgcgacaaagcagtggcgtctacgccgagctgggcctgccgctggcccccacgttgcgcgcggacctggctgcacgctgggaccgcgacggcggcttcatggcgttctcgcctcgtgccgggctgcgctggagcccgacgccgcactggtcgttcctgctggccagcgggcgcggctatcgtgcaccgagcctgttcgagcaacggcggcctcccggctacttcggctcgatcacacttccggtgtccagtgcccttccggaatgtgcgatcgccacgcgtggtggcggctgcagcgtcacggccaacgtggttgagaacgatgcactgaaggccgagcgatcacgcagccattcgctggcagccacgtggacgcccgacgacacattctcgctgtcgctgacccacaacatcgtggaactgcgcaacgagatcctcgccctgcagccgagcgatgcggtgtggaaccgcagcacgtgggaactggatgaagacggccacctgggcagcctgcgcctgtcgttcgacaacatcggccgcaccacctcccgcaactgggtgctgcgtggcgagtaccgcatcgacagcggcagcaacggccaatggttgttttcgctcgatgcgctgaagcagcaggaactgcttcgccgccgtgaccatgaggccgccgtggacctgcgtggtcatgtgacacccgagctggctgcggtgttgaacgtgcaatggcagaacagcaactgggacatcgcgctgcgcggcaaccagatcgggcgcacgcgtgcctggctgccgggggcggagtgcccgcagaagcaggtcgaccggaaccactgcatgaacccacggcagctgcgctggaacctgcacctcgcacgccggctggggccgcgcatcgttgcagcactggacgtgcacaatgtgcttgatgcgcaaccggtgaactatctggtcggcaacggcgggcagatgcccgggctggacgatccgctcggccgctactatctgcttaccctgcagttccgctga

SEQ ID NO: 503740 - DNA, 882 bp, Stenotrophomonas maltophilia
atgaaagagaagtcgctgtcttcgctcaacggcctcggcacgctggccggcgccctgcttgtcgccctcgccggcgccgccctgttcgtactgggggtagcagccaaggccagcaccggctcgcccaacctgctgctgatgctggcaggcatcctgatggcggcgctggcggtcttcgccctggccggcctgtacacggtccagcccaaccaagcggcggtgctgagcctgttcggcaaatacgtgggcaccgtgaaggacaacggcctgcgctggaacaaccccttctatgccaagcgccgggtcagccagcgcgtgcgcaacttcgagagcggcaagctgaaggtcaacgagctggacggcagcccgatcgagatcgcggcggtcatcgtctggcaggtggtcgatgcctccgaggcagtctacaacgtggacgactacgagagcttcgtgcacatccagtccgaatcggcgctgcgcgcgatggccaccagctacccctacgaccagcatgaggatggccagctggccctgcgcagtcatgccagcgagatttcccagcacctgaagaacgaactggccgagcgcctggccgacgccggcgtgcaggtcatcgacgcacgcatcagccatctcgcctacgccgccgaaatcgcccaggcgatgctgcagcggcagcaggccaacgcggtgatcgccgcacgcacgcgcatcgttgccggtgcggtcggcatggtcgagatggccctggccgaactgcagaagaacggcgtggtgcagctggacgaggaacgcaaggcgcacatggtcagcaacctgctgaccgtgctgtgctcggaccgcggcacccagccgatcgtcaatgcaggctcgctgtattga

SEQ ID NO: 503741 - DNA, 2853 bp, Stenotrophomonas maltophilia
atgcgcaacgccaaccgccaatctaagccaagccgcgtcccgttgactcttgctgtgctggcctgcctgcaggtcgcaccggctctggcccaggaatccacccagcaggaagcaaaggcgtcaagcagctcaagcacttccacccgcgcaaccgatcttgacaaggtcacagtcaccggctccctgatccgccgtgcggactacgagaccacttcgccggtgttcaccatcaacgccgaaaccaacgcgaagcagggccaggtcaacgtggccgagttcctgcagaagtcggccatcggttcggccgaaacccagatcacccaccagttcggcggcttcgtcgtggacggcggcaccggcgtacagaccgtgtcgcttcgcggcctgggcgccaaccgcaccctggtgctgctcgatggccagcgccccggcccggccggtacccgtggcgccgtcggcgccttcgacctgaacgtcattcccaccgccatcctgcagcgtgccgagatcgtgaaggacggttcgtcctcgatctatggttccgacgccgtggccggtgtggtcaacctgatcaccaagaagaacatcgagcgcccggagctgaccgttaccggccgcgtcccgaccgaaggcggcggtgaagtgttctcggcgtcgctggccaatggctggaacttcgagaagggcagcatcatcgctgccgtcgagtggtatcagcacaacgagctgacccgtggcgaccgcgacttcctcaactgcagcaacgacctggtcaaggacgccgacggcaaccgcatcgaccgcgaagatcgttcgctcaatgccggtacgccgctggccaactgcgtcaacatgctgcacaacgtggtcgacatcggcagcacccgctatgtgccgtcgggtgatggcaccactgtcggcccgctgccgggctaccgcccgcgcaagacccagagctacgcgcgcggccaggccttcttcgatgagccggtgaacttcgcgcgctggggccagggccacatcatcaacaagcaggagcggaagaccgcctacgtggccaccgacttcggcttcgattcggtcaactggaagacccagttcctgttcaaccgtcgcgaaaccgagacgttctcctggcgccagttcttcccgtatgcctacatcccgggtaccgagatcgtcgccaacccggtgatgctgttcaagtcccagcaggatgtcaccgtcgattacttctacgccgccaccaagcttgacggcctcttcaagggcaccgacacctgggcgtgggaagtcaacgcgaacttcagccactccagtggcaagtacggcaatctggccatccaggcctccaagagcggcgacctggactacaccgacgcgccgccggcggtgaactacttcgacccggactacctgagcggccgcaaggtcgacgagctggtcgacaagctcggtgcgtgggactggggcaagaccacttacaagcaggctaccatcaacgccatcgtcagcggcgacctgttcgagatgccggccggtgcggtcggttttgcgggcggcctggaataccgctattactcgctcaacgaccagccgagcgaactgtcccgcactggcgacatctggggctcgtcctcggctgatgtgaccaagggcaacgacaaggtcaaggaagccttcgtcgagttcgacgtgccactgctgaagggcctgccggcggtggaatcgctgagcctgaacgcctcgggtcgcgtgttcaagtacgacaacgttgccgattcggacaatgtctggaaggtcggcctgaactggcaggtcattccgtcgctgcgtctgcgcggttcgatcggcacctcctaccgcgcgccgggcctgtatgagctgtaccttggcaacgagactggtttcttccagcaggcgaacgatccgtgcgtacgctggggtgaaagctccaataccaattaccaggccaactgtgcggccgcaggtatcccggccgactatgccggcggcggcagcagcggcacggtgtaccgccagggcggtggtaattcgctgattccggaaacttcgcgtgcgaagaccgccggtatcgtgttcaccccgaccttcgccaacctgagcgtggccatcgattacttcgactacgaagtgagcaatgaaatcgcgcagctgggcagcaccaacgtcatgcgtggctgctacggcggcacggtgtacccgaacagctactgcgatctgctgacccgcaatccggccagtgctacccagccgtatgcggtgacccagatccagaacaagttcatcaacatcaacaagcagcgcacccgtggctacgacctgaccgcaaacttcgaccacgatttctcgttcggcaagttctcggccgagacccaggtcacctacacgatcgaagacacccaggaagtgttctccagcgcagctgcgagcggcctggaatcctcggagctgctgggtgacatcggccgtccgaaggtggtgggcaacctggcgctgagcctgacccgtggtgactggtcgtacaactggctgaccacttacatccacaagaccgaagacatcgatctggacccggtgttcacctaccagggtcgtccgaactcctatcgtgacatcgtggccgactcgcgcatctaccacaccgcttcggtcagctacgcgcaggccgattgggaaatcctggtgggcgtcagcaacatcttcaacaagaccccgccgttggtttccaccggtgtcgccgattcccgctacggcaacgtaccggccttcgccacccagtacgactactacggccgcaccccgttcgtgcgtctgaagtacaagttctga

SEQ ID NO: 503742 - DNA, 2028 bp, Stenotrophomonas maltophilia
atggaactgcgcttgtcccccgcccgccttggcgccgccgcactggcggcgctgtgcattgcccctgccctcgcaagccctctgccagccgaggatttcgccaagatccccaccatccagtcggtcaccatgagcgccgacggcaagcagctggtcgcgatcgtcgccgcgcccggcagcgacaacagcgataccgccctggccaactggaacctggataacctcggcgccggtccggtcgccatcacgccatccggtgaccggatgaagttcatcgcggcaagcgcactgaaggcgggacgcaacctcgtcatcgggcgccaggaatggacaggcaaactcggcggctgcggtgaaggcaacagtacgggagccaccaagaccttcctgaccaaggcctacctcaccgacgccacccagaccaagttcgacgaggcgttcgccaacaacacccgcacgctcggggtcagccccgagacccttcgctgcctcgaacttgcgggtaccgcctcgctcgtccatgggctgccgctggatgcagacagggtcatcatcagccagctcaatgaggccacgctgcaggccaactactaccgcttcaacctgcgcacgggccagaccgaactgctgttcaagggcagctcccgcacgtcacccggcctgttccatccccgcacaggtgaagtccttacccagacccaggtcgaatccgccggctccgacgatttcgaacaacgcattctgatcaagaacagcgccggccagttcgaagtgcacgcccccctgaccacccgactgagcgaacgctatacggtggaagtcgtcggcatagacgatgacagcggcaagctgtacgtgctgaccgaccagttctcggatctggtgcaggcgcgactgtacgatcctgccaaaaaggagttcgacaaggagcctctggccgcccatccatccttctcgatcagttcactgatcctaggcacgcgcaagagcaacttcaaccaggtcctcggcttctatatcgacggtccgcagcgacaggccgtgtacgtggatccgcagatgaaggccctgcaggagggcctgcagaaagcctatcccggcctgagcatctacatcaccggctacaacgacgacctttcgcgcgtcctgttcaccacggaaagcaaccgcaacccgaagagctacttcatcctggccgatcgcaaggatgtcgtgccactcggcaatgagcgcccctgggtggacagcaagcagatcggtgaacaacgctgggtgacctacaccgcacgcgatgggctgcagattccagcgattctggatctcccgccgggctggaagcagggcgacggcccgctgccggcactcgttcatccgcacggcgggccgtgggcacgcgactacaccggctgggatgaatccggctgggtgccgttcttcacttcgcgcggctacgccgtgttgcgccctcagtaccgcggcagcgccggccttggccgcaagctctggctggcaggtgacgccgagtggggccagaagatgcaggacgacaaggatgacggcgccgcctggctcgtctcacagggcatcgccgccaaggaccgtatcgcgatcttcggctattcctacggcggcttcgcggcggccgccgcgacagtgcgcagcccctccccctaccagtgcgccatcgctggcgccccggtcaccgatcttggccggctgggcacctcctggagccagaaccgcctgcaacgcattctgcaggggcgcacggtgaagggcatggacccgatgcagaacactgcgaaggccacgattcctctgctgaccttcgtcggcgaccgtgacgtacgcacgccgtccttccatgcgaggaacttctacaacggcgtacagggcaaggtcccagcccggttcgagctgatccccgacatgccgcacagcatgccgtggtaccccgcgcacttccggacgacattgacgctcatggccgactacctgagcaaggattgcggccccggcggcctctga

SEQ ID NO: 503743 - DNA, 402 bp, Stenotrophomonas maltophilia
atgaaatcaacaatcaggcgcagtcagcgggattactcgctggccttcaagttgtccgtggtcgatcaggtcgagcgtggagaactgacctataagaaggctcaggagcgatacggtatccaaggcagcagcacggttctgaagtggcttcgccgccatggtcggcaggattggtcaggtggtgcatcatctgcccccatgacgacttctcccaaaagtggaccggccacgccgctgacgccggaacaacagatcaaggccctgcaggtccagttgcgggaggccaacgagaaagcacagcttttcgaagccatcgtggatgtcctcaaagaggattacggggtgcgcgtcgtaaaaaagccttcaggcaagtcctcacgcaagggcgcctcaaaggcgtaa

SEQ ID NO: 503744 - DNA, 1344 bp, Stenotrophomonas maltophilia
gtgtttgagatcctgatagttttggccctgatcgtgttcaacggcttcttcgccatgtccgaaatgtcggtcatgacctcgcgcaagagccgcctgaagcagatggccagcacttccaagcgcgccgccaaggcgcttgagctgtccgagaagccggagaacttcctgtccaccgtccagatcggcatcaccctgggcggcatcctgaccggcgtgtacggcggtgaggccatcggtaacagcatcgcccatcaccttcaggtgttgttcccgtcgctggccgacaccatcaccctgttcggcaatccgcagccgctgtcgaacctgatcggcaagacgctggccgtggcgctgatcaccttcctgacgctgattttcggtgagctggtgcccaagcgcctggccatcacccgttcggaagacatcgctggcatggtagccctgccgatgggctggctggcccgaattgcattcccggccgtgtggctgctgtcccattcgacccgcttggtcctgcgcctgatggggctaggcaaggatgaagtcgcctcggtgactgaagaagagatccgcatgctggtggccgagagccacgaggccggtgtgatcgacgcccacgagcgcgacatgatgaaccgcgtcatgcgcctgggcgaccgcaccgccgacagcctgatgaccccgcgcaaccgcatcgcctggctggatacccaggctgggctggagcgcaacctggaaatcatggccgagcacgagttctcgcgctacccggtgctgcgcgacaacgacatggacgtggtcggcgtgctggaactgaaatcgttggccacacgcatggcgcgcggtgacaacgcgctgttccagaccctgcgcgagccgctgtacgtgtctgaatccacccacgcgatgaagctgctggagatcttccgcgaggaacagcagtcgatggcgctggtggtggacgagtacggcgaaatccagggtctggtgaccatcagcgacctgatgggcgcggtggtcggccgcctgcaggcggtggagaacgccgacgaagatgcgctggtggtgacccgcgaagacggttcgctgctggtggacggctcgctgccgatcgaggacctgcgcgagctgatcggcagcaacgatctgcccgatgccgaggatggcgattactacacgctggccggcatgtgcatccactacttcggccgcatcccgcacgcgggcgagtactttgactgggccggctggcgcttcgaggtggtcgacctggatggtgcgcgggtggacaagctgctgctgcgcacgctgtccgacgagcaggccgatgagctcaccgcctga

SEQ ID NO: 503745 - DNA, 513 bp, Stenotrophomonas maltophilia
atgcatcatctttcatcgaccgacaatgcgccgatcctgcacctggtgtgcggcaagatcggtgccggcaaatccaccctgtcgcagcagctggcggcgcagccacgtcacgtgctgatcagcgaggacgcctggctggccgcgctgtatcccgaccagatccattccgttgccgattacctgcagcgcgcggccgcgctgcgcggagcgctgacgcggcatgtatgcgcgatcctgcgggccggcgtttcggtcgtgctcgacgttccgttcaacacgccggccgcccgtgcatggggccgcgaactgttcgagtcggccggtgttgcccaccagctgcattttctcgatgttgccgacgccatctgcaaggcgcggctgcatgcccgcaacgcgcgcggtgagcacccgttccagcccagcgacgaagccttcgagcagatcacccgtcacttcgtggcacctgcgcaggaggagggcttcgtggtgatccgtcattcacaggaggcttga

SEQ ID NO: 503746 - DNA, 213 bp, Stenotrophomonas maltophilia
atgcaacccgccttcccgggcgggttgcatggccgtggcgaccgcgcgctatcccgccttcccgtggggaatgcggataatcgacgcggtgctgtgcaggaccatgccgccagcgtagagcgcagcctggccggcgggcaatcccctgcggcagtgcagcgcgcgcaaggttttgcggggatctatgctcggcgccattcccgcatggaatga

SEQ ID NO: 503747 - DNA, 1074 bp, Stenotrophomonas maltophilia
atgcgacccttgcctggatacgcgcttgccctctgcctgatgccttggatgacatcgctggctgcaccgccgccagcgccgcgtaccctcagcggcgagctgcagggcgcaccctggcggctggatgtgccggcgaactggaatggggacctggtgatgctggcgcacggctacgagccggtgggcgtgccacgcactacgccgatgactgccaatgacagcaccgcaacgctgctgtccgcaggctacgccgtcgcgcagagtgcctacgccagccagggctgggcagtggccgatgcgatcaccgacatggagcgcctgcgccagcacgcgctgggcgaactcaagcgcgtgcgccacacctggctgctcggattctcgatgggcggcgcggtgacactcgccagcctcgagcgcttcccgcagcactacaccggcggcgtctcgctgtgcggtgccaatctcagtggcgaacagatcgccgcagatctgctgaccacgctggtcgccttcgattactttttccccaacgcagcaggcctgccggccaccggactggcttcgcatgaagcggccgtgctgccgcagggagtgctctatcagggcatcgccgacgcgctgcaacggaatccccagcatgccgacatgctcgccaagcgactgcaggtcgctccggatgcactggccgggacaatcagcctgcacacgctggtcctgcatgaactggccacgcgcagtggcggcatgccggtcggcaaccttggtgtggtgtacagcggattcggtgacgacgccgcgttcaatgccggcgtgcagcgcatcgctcccgtgcctgcggcacaggccgatgtccgcgcgaagctggcactgagcggcgcgttgaagcgaccgctggtggtccagttcaacaacaacgatcccaccatcgtgccgcacatgcaggcgatgtatccgcagatggccgcacaggccggcgcgcgaccattgccgcgcgtgctgccgccggtgggcgaagggcattgtggcttctctgaagcacaggttgtcgacgccttgaaggcaatccagcgttga

SEQ ID NO: 503748 - DNA, 201 bp, Stenotrophomonas maltophilia
atgatcaagacgaccttgaagaccgtgatgttccttggcatggccgtgaccgggctggccttcgccgcaggcccctgtgaattctgcagccagcagtacgaatattgtctgcgcgcaacttcaggcccactggccaagacacccgcagaatgcctggcccagtacaagatgtgccgcgaaatggattgccagtcctcctga

SEQ ID NO: 503749 - DNA, 765 bp, Stenotrophomonas maltophilia
atggccttcttcgaacgactgagcgacacccgctacctgccgaccgaacacacgggcggcgcctggaacatccgcgaacaacacatcgcacctgcgatcgggctgctggcgcaccacctggaacgtgacgccgcagcgcgtgggcacggttttctgatcgcgcgcctgtcctacgacatcctcggcaccattccgatcgaagcgatggaggccgacgtacaggtgctgcgcggtggtcgcaccatcgaactggtcgaagccacactgcgccatgacgatcgcccggcgctgcgcgtgcgtgcatggctgatgcgcccgaacgatacgcaggccatcgccggcacgccgatcaccggcattgcgccgccggaatcaatgcccgcgtgggacccaggtacggtctggccaggcggtttcatcaagagtgtggagatccgccgacatgatcaggggcccggccgtgccacctactgggcgcacgcgaagcacgcgctgctggacggcgagccggtcagtccgctggcccgtgccgccaccctgttcgatctgtccaatggcatggccgtgcgcgccgatccgaaggaggtcgccttccccaacctcgatctgaccgcgcacctgttcggcatgcccgaaggcgagtggctgggcttcgacacgtcggtgtcgtttggccaccagggtctcggcttgaccagcaccgtgctgcacgatgcgcgcggtccgatcggcatgctcggccaggcactgaccgtacgcccgtga

SEQ ID NO: 503750 - DNA, 270 bp, Stenotrophomonas maltophilia
atgagcaaatcttctgtggaagtacgttggctgacgttccgcctgatgaacggccagtcgatcggaccggatcggctgaaggatggatgggtgattgcttcggagacccgccactgtggcgtgcggcgtgaagccatcgaaggcgcgggcgtggtctacgcgctgtatgcaccggccaacctcgcctcaccgcggcgcgcggagatgcgcatgcgcgaattcctgatgagctccggctacaccttcaccatgggtacgctgggcggctga

SEQ ID NO: 503751 - DNA, 522 bp, Stenotrophomonas maltophilia
atgcttctccggcaactcggtgctgacgacgccgacattctctggcaggcacggttgcaggcccttcgcgagtcgcctgcggcgttcctgtccacgctggccgaggcgcagaatgactcggcggacgtgatgcgcgcccagcttgccgatcccggcacgcgctacttcggcacgttcgttgacggcatgctggtgggcttcctgcgttacgtacgcccggtgcggatggcgcgacggcatacggcggaagtgcacagtgtccatgtgggtgctggccatcgaggccagggtatcgcccgtcagcttcttcttgccgcgttcgcggctgcgcgcgcggaaggcatcgaatcgctcactctcacggtgctggcggacaacgccgccgcgcgcgcgctgtatgaatcgctgggtttcaccgaatccggcgtcgagccgcgcgctgtgaagcgcgacggccgctatgtggacatggtgtcgtactggatttcagtgaccagccacccaccatcgccggcaccttga

SEQ ID NO: 503752 - DNA, 402 bp, Stenotrophomonas maltophilia
atgttccttcgcggcaagcccctgttgatcgccctgctgctgcatctgctggtggccctgctgtactgggcactgattccgctgggaatgaactggtatcgcgaccatttcggcttcacctcgcatcgcgacatcggccttggcatcgcccagttctatctgttccatatgttcctcggcgcccagccactgattgcggtgctgcggccgctgttcgccaagctgttggtgctggcggttccgctgacgttcgcgacctggacgctgatgcacaaccacccgctgcgcctgctgtacttcactgtcgggcctggcctgctggcgctggccgcgatcgccacatcggtgtgctatgcatcacgcagccgcctgcccgctaccatggacaccgccgatgcctag

SEQ ID NO: 503753 - DNA, 501 bp, Stenotrophomonas maltophilia
atggattgcggcaggccgatgcaggaagttgaggatccgccagcgacgaacgcctgcatcgtgcccctacccatcgcattccgtgctcccccttccttctggctgctggcatcactcatctggctactgctggttgccgcgctcatccatgccggcttcaagccagactactggcaactgcgtcacaccgagtccgggacactgccctatcccatcggctcggtgatcacgttcgcgctgatcgtcctcgtggaaatgacagcgctgggcctggctgtgcagccatggcggttccgccgcctgtggctgcggatcctgatcagcctcattccatggctggggtggaacgtcctatggggcttggctgccatgcatcaatcccccgtgcgcgacgtccactcgaactggctgctcggcatgagcaccatcctgctgctggcactgctcgtggttgtgccggcctcactctggcctcgcctgcgacgctggctcgggaactga

SEQ ID NO: 503754 - DNA, 348 bp, Stenotrophomonas maltophilia
gtgaaacgccctcgccgctggctgctgattggctcgatcacgacagcgactgtcggtgtgatcgtgctcgtcctgaccaccccactggtctcgaacgccacgctgctactgatggagcgcagcaacttcatccctcgtgaatcttcgatcttcacgttcgagccatatgccatcaaccagggctcgtcgaactactggttgtacggaaaggaccggacctactactaccacttcacctacgaagacgacgtgccctacgtctacatccggcgggacaaccgctgccccggtttcgaccggcaggatgcccggacctggtgcagcgccctgcccggcaaggcacgctag

SEQ ID NO: 503755 - DNA, 333 bp, Stenotrophomonas maltophilia
atgccgatgcttgccctgatgctgctgctctccagcctgttcggcgctggcaacgggcccactgaagaggcccttcgcagccagatcctgcgtgccgaaacccagcagccggacgtcgtacgacaggattgcggttcgccctccctgctgctttaccggctgcgccaggaccgggtcctgaggctggccaaccagcccctgcaacccgaaaccggcgttgcccagcccacgcgtggtgcaacggttcgcgtcgcccagctctgggagcgcgtggacggtcactggaagctgcagcggatgatcagcatcgaagacctggtcgtgcaacgctga

SEQ ID NO: 503756 - DNA, 525 bp, Stenotrophomonas maltophilia
atgtcccatcgtcttcgccctgcccggctccaccgcgggctccatctgatcgagctgctgatcgccgtcatggtgctgtcggtcctgctggcgttggcctggggcccttggcaacgcacgctgcggcacttccaggcggaagcgctgcgcgccgaactggtcgccagcctgtcgatggcgcgcagcgccgccatcaccgaacgccgccgcgtgacggtctgcggatcgtcggacggcatgatgtgtgaccaggcatggagccagggctggcgggtgcaggtcgaaccggccaacagcgcgaccgccgccgcaagggaactgcgcgtgcacaggacacgccagcgtcatgtcgacctgcgcaccagcgatcatcggcccgacgtgcggttccggcccgacggccgcaatgccggtaccaaccagtccatcgtgttgtgcgtggatggacaggagcacagccgcgtcatcatcagtgtccccggacgggtcaggagccagcgcccgcgcaggtccaccccctgctga

SEQ ID NO: 503757 - DNA, 414 bp, Stenotrophomonas maltophilia
atgcacgcatcctcaacccatcgttttgcagctggtttcaccctgatcgagctgatgatcaccgtggcggtgatcgccgtcctggcggccgtggccctgccgtcctatcagcggcacgtgctgaagacgaaccgggccctggccaaggccgatctggtcgagatcgcacagttgctcgagcgctaccatacggtgcagaacagctatgacggtttctcgctgccgttcaaccagtcaccgcgacagggcaacaagcgctacacgctgtccctgaacggcaaggccacggccagcacctacacgctgcaggcggtgccggaaaccggccaggacaaggatgtgtgcggcacgctgacactggatcaggccggacgcaagacgccggacaagaagaccaatgcggagtgctggtaa

SEQ ID NO: 503758 - DNA, 4575 bp, Stenotrophomonas maltophilia
atgaacacttcgcgccgcttctcccgcatcgtctcgactccctggctgcgcgcgggcgctgctgttgccgtgctggctggcgtgggtgcgttggtctacccgctgtttgctgcgctcggtgactacgacatcgcgcaggagccgctgtatagcaagaagacccagccgccgctgatgatgatggtgatgtcgcgtgacgagcagctgttcaacaaggcttacagcgattacagcgacctggacgaggatggcaccctcgacaccacttaccaggacaagttcgattactccggctacttcgattccaacctctgctacacctatgccagcggccagttcaaggccagtgcacaggccagcggcacctggaagcacagctgcggtggaaactggtccggcaatttcctgaactgggcaacgatgagccgcctggacgtgatgcgctacgtgctgtacggcggtcatcgcatcaccgacagcgccgccagcaccgtgctggagcgcgcgcagatccccaatgatctgcacgcgtgggtgaaggtttacagcggtagcgatatcaacagtttcaccccgtacaagaccaccatgtccttctgcaacgctaccatcgaatccggtggtgcaccgctgatgcgcgctgcgtcgggcaactggggtgagtgggcggccaccgccagccgccagtgcatcactggccgaagcgatgaaggcaaggccgattcacctggctctgccaccaacttcaatgtccgggttgaggtctgcgccagtggcagcggagctttcccggaggcgttctgccgcaagtacaacgatggcaccagggactacctgaaaccggctggcctgctgcagtcgtatggcgaaagcggccgtcttcgcttcggtctggtcacgggcacctatgtcaatccgcgcgatggtggcgtagtgcggcggaacatcggaaagatcgcaggtaacggcaccggcttctgtgcggccggcgacgaaatcaacctgtccaacggtcagttctgcaacagcttgtccggtggtgcggaaggcatcatcaacaccatctccaacttccgtatcgaccagtggaactggagcaataactggaatgactgtaacgactacagcatcctcaaccgacagggcttcggtgacagaggcaatctgaccgatccgggcaatgcttcgaagaaatgcagtgcgtggggcaatcctctggctgagatgtatgccgaagctgtgcgctacatcaagggtgaaaccaagggcatctacagtgcgtccggagacctgagcggtctgcccaattcggttgcctggaaggacccttaccgttccccgaacgatggcggcaattcatactgcgccacctgtaacatcctggtgatgtcctcaggcctgccgtcgttcgatagcgacaacatcgggtcgattaatggcctggcgactgcgacgtcggcaacggatgcgatcggcaatcttgagggcatcactggcggcagttacatggccggtcgtgttggcctgaccgagcgctatgcttcgatcaatacccacgaggatatctgccgtgcggccaaggttacgggcctgtcgctggtgcgcggcatctgtccggatgtcccgtccacggaaggcagctacctgatggccggcctggccaaggccgctgccgagacggatctgcgtccgcgtgtgcaggacaagccggatacctacaagctcacggcgaccacctataccgtggcgatggctgagagcctgcccaagtttgagattccggtgggcaacggcaagatcaccctggccccactgtgccaggccaacaacaccggttcggcaaaaatcaccagcaatggctggcgcagttgcttcctcggttctgtcggcatcggcaccaaacagtcgacggtctcgccgaatttcgtctacggacgtacttaccgtgcagacggcaaggctggcagtttctcgctggtatgggaggactcgttgtggggcaatgaccacgacaacgacgtggtctccatgctcagctactgcgtgggcgctacctgcagcgacggcgacaacaccaacttccgcaacatctgctggcgttccagcagtgcagagtgcagcaacaatgccgtacgcaataccgtgggcagcgatgaggtgctggtccgcattgagaatctttccgcctatgccggcaacgcgatgctgaccggttacacgatcgtgggttcgaatgcgtccgacaacgtgcaacgtctggtgctgcggcctggcgataagaacggttcggtactgacgaccagttccgctccgccggcagaatggacaggtgccattgtcttgcgttaccgcctggggagtggccaggccaatcagttggaaagcccgttgtggtacgccgccaagtacggcgtgcctgctggcaagaagtgggacagcaaggtgcctggcgtgccggacaattatttcctggcgcgtaatccggccaagctcaagtcggcactggaatcaatcttcgacagtgctgctgcaggcgaggcgccggtgggcggcagcgcgaccggcgcgcgagtgaacgcgggatccttcactgtcgccgcgcactacaccgttccatcgggctccaatgattggacaggtgacctcattgcaagtcaggtcaccgcaacgggtggcatcggcgcggagctgtggcgcgcgtcaagcaagatgagcgcctccgggcggacgatcgtgatgtcgaccgcaccgacctacgtgaacaaatccaaccagttggtggccgctgcggcagccgatttcaccgctgacaacgtgccggggagggatcgcgccgagaagctgggcaacctggggctcaacaccatccccaactggttcggctcgcacacagtggccgacctggtcagctacctgcgtgggtccccggtcagcggtttccgtccccgcagcgtactgctcggtgacatcgtcaactcaggtgtcgagatcgtctccaataaggacgattacggctacaccgcgtggcaggcgcagggtggagtgggctggaagaccaccctgggtacgcgttatcgcgcgtatctgaccgcgaagacggcctcaggaggcatgccttcgatggtctatgtcggcgccaatgacggaatgctacatggcttcaacgccagtacgggtacggcagctggcagtgagcagttcgccttcattccgtcggcatcgctgcagcacatggctgaactggccaaccccacgtatgggcatcgctactatgtggatggcgggctaacttcgtctgacgtctactacggtgatgcatggcataccgtgctggttggttcgaccggcggcggtggtgcctcgcgcggcccttcggcgacctcggtcggcaatggttcggtgttcggtctggatatcggcacgcccaccagcttcgataccagcaaggtgttgtgggagatatccggcaagaccgaatcggacatgggttttgccttcggcaaaccagtcgtggtgcctgtcgctggcactgatccggacggcccgccgcgatttgtcgccctgttcggcaatggagtcaattccagtaccggtcggccagtgctgtacgtggtcgacatccaaaacggccaggtgctcaagcggctttatccgactggcaccaagtacgcgattgccaacggcctcaatcacgtcaccgccgtggcattgcacaacagcagtggactggccgacacggtgtatggtggtgacatgcagggcaacatctggcgcttcgatctgaccggtggcgatcccgccgcttggaatgtctcgctcagtggaacaccattgttcaccgctgttcgcagcgccgtcgcgcagccgatcaccggatcgatcgaagtgtcggccggcccgggcggtggcgtcagcctgttctttggtaccggccgctacttcactgccgacgacaacgcggtcacccgcaattcgccggtgcagacgctgtacggcatatgggacgatctttccagtgcgatcagcggccgcgacgtgctggtcggacaaaccatcagtgccaacggaaccggcttccgtgacatctccggctacgccgtggactacgcgtccaagcgaggctggtatgtggacctggtggtcggcacaggcgtggaaggtgagcgcttcttcggctatccgaccctgcagggcggcaatgtgatgttcacaacctacgtgcccgggcaggcggtctgcggtacgggcggtggtgtcaactggcgctaccgactgaacatgctgacaggacagccggcgatggggggccttaccgatgaggttggtggcaatgctctgtgcggcgcgaactgtggtgccggcgcgctgacccgtggtggtgacgttgcttccggggcgcccgtactcggcacaaacgtcaacagtacgacattgaagggctgcgatcccagcgacccgaagtgctcggtcgatggttcgattgaccggtgcatcgtggcgctgaacactccgggcgcggatactgcatacggccagcgggcctgcggtcgccagtcctggcgccagatccgctga

SEQ ID NO: 503759 - DNA, 489 bp, Stenotrophomonas maltophilia
atgcatcctcgtcgacgcattccttcgttcgcatcgtcccgccaacagcacggagccgtgctgtacgtcgccttgatcatgttgatcctgctggcgctgatcggtattgcaggcatgcaggtcaccagcatgcaggagcgcatggcggccaactacctgcgctccaatcaggccttccagaacgccgaatccgatgtgcgtgtgcaggaagcggcgatccaggccgccatcaacagcggcaagatcttcgaggccaaccaggaggagtgcagcccggtgttcgatccggcaacctgggccgatggcaagaccgcggcaacggcgatcaacacccgtcgtctggataaatgcgtgccggtcggacctttggggctcgggcgccgcaagaacgaagagaccgagaacatctaccagatcaccgtcctggccagtgatgatccggccaatccttcttccagcgctgtcatcgacacgatcttcattccatga

SEQ ID NO: 503760 - DNA, 1188 bp, Stenotrophomonas maltophilia
atgcgcgcaccgtcttctggccggtacacggccggcttgtccatggtcgaactgatgatcgcgctgaccattggcgttatcgtcatgcttggtgtggtccaggtgtttgccgcgtcacgtgcggcctaccagttgtccgacgggctggcgcgggtacaggaaaacagccgtttcgcgatggatatgttgcaacgcgagctgcgcatggccggacattttggatgtgtcaacgatcaggcgcggaactcgcccgacaacgcctctctgttcaccacgttcgccgccgcaccgcatccggcactggacttccagacctccatccaaggctacgaggctgctgcgactgcgccgggtgacgcgctgaccttgaccgccacaccagcaaccgggggtacagactacaaaccggcactccccgctgaattcgcggcggcgatgaccaatcgagtcaatggcagcgacatcgttgcgttgcgctacctgatgccggatggcgtgccggtcaccgccagcgcaggcaccaccgggcagccggtcttcagcttcgacaaagcgcggctggccgtactgcagagcggcctctctgatccgggcctgtacggtgcagccgactgtgcgagcgccaccatcttccaggcgcgcgctgtggacaaagctgctggcaccatcaccttcggagccgcgccgaacaacaccggcaacttcacccggccggtcactgctggccaggcaatgctgcaccgtgccgagagtgcgctctactacgtcggctacgatgcggctagcgcccgctcctcgttgtatcgtgtccgcttcagtgcggtccccaacggcgcactggttgctggcgcgccggaggcgctggtcgagggtgtggagaacatgcagctgttgtatggccaggatcgcggactgaccagcgtgtatccgaccggtttcatcgatcgtcaaggcaccgcggaaacagtggaggcgtcggccaatcctgccgccaacgcttggcgtcgcgtcggggcggtgcagatggggctggtgatggcgagtcccgacccgtcggcggcccctcaggctgaccagaaggccgttctgacgtcgatgggtgtgacgtacaccgcacccacggacggccgcatgcgcgccgtctatcaaaccaccatcgcccttcgcaaccgcctctttggcaactga

SEQ ID NO: 503761 - DNA, 468 bp, Stenotrophomonas maltophilia
gtgagtgcgtcccgatcctgttccccgcgcggcgtgcaagggggcttcagcctgatcgaagtgctgatcgccattctcgtgcttggcgttggcctgctcggtttcgcgctgatgcagaccatgaacgtccgcttcgtccagagtgccaactaccgtacccaggcgaccaatctgacctacgagatgctggatcagctgcgggtgaacagatcaatggctccggcttacgtcggtgactacacagcaacgacggcggccaagaactgcgttcctcctaccggcaaggatatcagcagggatgccttcaccctggattggcgctgtcgtctcggcaaagcgctcggggagggagctaccggcaaggtggcgcgcaacggcaaccagtactcggtcagtgtgagctggggggatgagcgctggaatgcggatgctggcgacaccacgttcactgccaggagtggcctctga

SEQ ID NO: 503762 - DNA, 519 bp, Stenotrophomonas maltophilia
atgtctttgcgccggcaaaacggctttacgctggttgagttgatggtcacgatcatggtcctggccgtgctcgccacgatcgcctttcccagtttccagagcaccctgcgatccaatcgcatcgctaccgcgagcaacgagttgatcgcttcactggcattggctcgcagcgaggcggtaaagaatcgtcgtggtgcgggtgtctgtgcgtcgtctgcgggcagtacatgtgatggcaaaagctgggctgacggctggctggtctgggcggacaccaatggggatggtgcgctgagcgctggggagaccgtgctccgctacagcgccggccgacctggactgactacgatcgggacgccggatctgtccgtgggttttgacccgcgtggccgcaaccgcgccaatgcgtcgctggacctgaccctgcgcccggacacctgcggcaagcaaccgctgcaacgaacgttacgcatttcgccgaccggacaggtccggctgttgaaggaggattgcaagtga

SEQ ID NO: 503763 - DNA, 609 bp, Stenotrophomonas maltophilia
atgacctcgggaaacggctcaatgatgtttgtgatcggcgccaccttgttcgccatgctgctggtgctgggcgcgtatgccgtgcgccgcatcagcgcccgcgaacccagcggcaggcactggctgctgcgcagcctggccctgctctcgcccgtgtgcctgctggccgggctggcgatcggcatgatcggcccgcacctcagcggacggttggaaccggcccatctccccggtctgcttgaaacgtcgatggtgctgatgctggtgggtgcactgacccttccgctcctgtggcggatgatcgtgcaccgccgcctgggccgctccgtgaacgcactcccgttcttccacgccagccgtacctcgctgctggtgctgttcgtgctggctgtgatctacatgaaagtgggcaggaccgccgcagcggaactgatgccctggctgaccagcccgggcctgtggccggcggtggcgcgcatcgcggggcaatcgatgcaggtcgccatgattgcggtcgtgctgaccctctcactgatggtcgtgcggcgggcgatgaccggtttcctgcgccttctcaccgggctgttcaggcgctcgccggggctatga

SEQ ID NO: 503764 - DNA, 1536 bp, Stenotrophomonas maltophilia
atgcaaaccgaatatctgctcattggcggccttctattggccgtgctcatcctgcagctggtcgccctgctgcgccgcccgccgcatgaccgcctggaacaggcggtgcgcgaggaggcgcgggccgggcgcagcgagctgcgcgaacagatcgatggcttcgcccgcgcgctgaccgatctgtccacccgcaccgaccagcgcctcgacctgctgcgcgaagcgctgggcgaagatgcccgcaaggcgcgcgccgaagcggccgagagccagcagcgcggcgcggcgttgatgggacagcggctgcaggagctgcgcggccagctggagaccttcggccagcagcaggaagcccgcatccatgcgtttggccagcagctgcaggagctcaccgggcgtaccgatactcagctcggcgcgctgcggcagaccctggtggacgatgcacgcaagggccgcgaggagggcgcgcagtcgcagcagcgcctgactgaaagccttggcctgcgcctgcaggaactgacccagcgcaacgagcagcgcatcgccgagatgcgcacgacgctggaagagcagctgcgcgcgctgcagagcgacaatgcgcagaagctggaacagatgcgcgtgacggtggatgagaagttgcagtccaccctggaaacacgccttggccagtccttcaaactggtctcggagcgcctggagcaggtgcagcgcggcctcggcgagatgcagcagctggccaccggcgtgggtgacctcaagcgcgtgctgaccaacgtcaagacgcgcggcagctggggtgaagtacagctggagaacatcctcgagcagaccctgatccaggagcagtacgcgcgcggggtgaaggtacgcccggatagtggcgaaatggtcgacatcgccgtgcgcctgccgggtcgcagcagcgatgacacgccggtgtggctgccgatcgactccaagttcccacgcgaagactacgagcgcctgctggacgcacaggagcagggtgatgccgaactggtacgcgtgcagggtgcgcagctggagcgtgcggtgaaggtgcaggccaagtcgatctgcgagaagtacatcgtgccgccgcacaccaccgacttcgcggtgatgttcctgcctaccgaaggcctgtatgccgaggtgatccggcgccccggcctggtcgatctgctgcagcgcgaccaccgcgtggtggtcgccgggccgaccacgatcaccgcactgctaaacagcctgcagatgggcttccgcacgctggccatcgagaagcggtccagcgaggtgtggagcctgctgggtgcggtgaagaccgagttcggcaagttcggtggtgtactggacaacgtgaaggccaagctggaccaggccagcaagcagatcgaccagaccggggtgcgcacccgcgcgatcgcccgcaagctgagggatgtcgagtcgctgccggttgagcagagccgccagttgctgccggacgcgctgccagcagaggaaggcagtgacggcgacgaggcctga

SEQ ID NO: 503765 - DNA, 804 bp, Stenotrophomonas maltophilia
atgcgatgccctggagggttccacagatttcaaggaattcgagccctccgtttcacactgtccacagcaggtctgtatgacttatacacaaggtatgggcaaactgtggataaaaaagcccttttgcccgacctgcgaaactatccacaggttcccccccagcctgaggggcctctatacagggggtttcaggcgcataaatctcttcaaaatcaaatagataatgcatttctccacgaaatctgggcctaccatcaccaccatgctttagatttatacccagatttagaagctaggccggcccagatccgaccccaacgagacctgtggacagtggcgtctgcagatgaagcaaccgcagcgttgcgacccacgatctgcttcacccctcccgcaagttcggggaacgtgcatcaggctgaagacccggaacggcatactcgatcgagagcggctggacagcgcccaagctcacaacctggattccaatcgctcagcaccgattgcatcggaaaggcagccaggatcaatcggcaaccagcaatctcaaggaaggcattcacccatacctggagatccggccatcgcgatgctccacgtggaacctgcaaaaaaaacgcccgggaagatcccgggcgtcgttcggttccacgtggaacacgctgctgtcagagacgcagcggcatcaccacgtggcgcgacttctcgctgctggattcacgcacaagcgccgaggagttggagtcgcgcagctggatgatgacttcctcgtcgcgcagggcggaaagggcatccagcaggtag

SEQ ID NO: 503766 - DNA, 2001 bp, Stenotrophomonas maltophilia
atgtccgaactccagcacccgctgcccaccaccacgttcctgccgctgcagcgcaagtcgctggcgcgctacgttgcccatggcacgccaccgcagaccgcagtggagcaggccggcctgatggccgcgcagctgtgccggacgcgcctgcatccggcggccgagatcgagcgcctgctgcatgatgcctgcgcgttgtttgccggcaacgaaggtgcggctgcacagctggccgggaccggtggcggtggccaaccggaactggatgcctggctgagcgcattggctgcccacggcgtgctgctggcaccggcggagatcctgcaggacgtcatcgcgcagtcgccacgggagtacccgggcctggccctgcagcaggcctgccaggaaaccctggtcgaacatgagatccgctttcccgccaccttttccagtgatgacgacgaggccacgctggatgacgtcgccgccgcggatgcgcggtcggccgagcaccatggcctgtacacctccgagcaggcccgcgtgctgcgcgccatcgccgcgaatcccgatgagctgatcgacctcgatggctatgccggcaccggcaagggccacctggtgctggcgctgatggaggcgcggccgggccgctacacctacgtggcgccctcgcgtgggcaggtggaagccttccgcgcccgcgtgccggccagcactgcggtgcgcctgctgacccagatcgaattcgccaaccgcgtggcccagcacgccgcgcgcagcggccagaccggtggcttcgttgccagctaccggcgcagcacccgtacgccgcgcgagattgccggccgcatcggcctgcagggcatcggtgggcgcagcccggagcaggtgctgctgaccgcgttcgaggccatcaaccgttggtgcgcgtcgtcggcaacgggcttggcgttccagcatttcgaccgttcggtgcccgctgcgatgctcgatgtgtcgccgtacatggcggccgccgagcacgtctggcgctgcatgttcgacgccgagctacagcggggcacgctgctgagtctcagcccggcgcacatcggcaagtggctggcgctgcgcggcgtcacccccccgcaggacatgggcatgctgctggtggacgaggcgcatgacctgagcccgtcgtggaagcagttgctggccggccatgcgcctggcgtggtcagcctgggtgatccgcaccagtgcctgaccggtacggtgccgcgctgggccgcgtcgaaggtgctggaaatgcaccagtcggtgcgccagggcaaccaggtcgagggcctggtcaaccagaccctggcactggatggactgggccaggaaagtgggccgttcgtcggtgccaccgaccgcgccaccggtgtgctgcattaccgcgactgggcgcaggtgccgagcgagggcctgcgcatccatggcagcgtcgccgatctggccctggacgcggcacagctgcacgcactcgggctgcggccctacctgcatccggcatcgctgcgcgcgctgcgcagcgtgctgcagcggccactggatgcgtggcgccggcgccgcgacagcgcatcggaccaggaatgggagcgcttcctggccacgcaggccgacgaagggcagggcgcgctggtcgaactgtttgcgtctgccgatcgggtgcagtcattgctgcaagcgcttgatgaccaggacacgcccactgaagggcgggtggcgctgtgcctggccgaacacgcgaagaacctgcagttcgacgtggtctcgctgtcgcccggttgcttcagtgcggggcagggcgggcgcatctggcacaacccggtgcgcgcggtctatctggcgctgacccgtgcgcgacgccagctgcatgtgccggccgatggcatggaacaactgcagcatacggcgacactgcaggagcaggcgcgccagatgcgcaggcgcgagcggctgcaggccagcggctaccggcccgcgcgctag

SEQ ID NO: 503767 - DNA, 705 bp, Stenotrophomonas maltophilia
atgcgctctgccctcctgctgctgccgctgctgttgctgcccctgctggccaccgcggccgaacgcccgtcaggtgaagacgatgcggcggtgatcggcgccggtttcatggacagccacccggacatgatgtaccggcaatggggcgtcaacgcgctgcgtcgcaacgatgtcaacggcgcgatggacaacttccggctggccgcgcggtatgcggacaagcctgcccagggctacctcggcgagatgtactggtacggggtagagcagccgcgcaatccggtcatggcctatgcctggatggaggtggcggccgaacgtggctatccgttgttcgtcgagctgcgcaacgagtactgggccacgctgccgctggagcagcatgatgcggcgcgcgcgcaggcaagcgcgctgcgcgccgagtatggtgacgaagtcgcgcgcccacgcatggccgaagtgctcagaaaggggcgccgcgagatgaccggcagccgcgtcggctcgatgtccaacaacgtcgacatcgtgtacatggacggcggaatctcccgcaccatcaaggccgatcgcctctacgacccgaagtactgggacccgaagcagtacgaacgctggcaggacgaaacctggatgaagatccgccggggcacggtggaagtgggtgtgccgacccagtcgcacgccaccgacagcaagccttga

SEQ ID NO: 503768 - DNA, 699 bp, Stenotrophomonas maltophilia
atgcgcatcctgctgagcctgctggcactgctgctggcactgcccgctgcggcgctggacctggtgcccaccaccctgcagctgcccgccgaaggggggcacggcgagctgtggctgtacaaccccgggcccggccgctggcagggcgaggttcggatcctggcctggggacagcaggtcgatgcggaaaagctgcggcccagcgaccagatcctggccagccccgcccggctcgacctcccgcccggcacccgtcaacgcatctggctgctgcctcgggagacgtcgcccgttgccgtcgagcaggcctaccgggtgatcctgagccccagcggaccgggcctgccacgctactcgctgcccttgttccgggggcatgcgacgcccctggcgcggccggacctgcatgccgggatcgagcccggcacgtcgcagcctcttctgcgactgcgcaacgcaggttccgttcacgcccgcctgcacgatcttgcgttcgtcgccggcgatggacgccgcaccctgctgctgccgggactggccggctacctgctggcgggccgggaacgccgctgggccctccccgtccatgccgacggctatgccggtggccatttccaggcccggctgcaggacggccgcgtggtcgatctgaccgcgccggacccggcaattgcagcgagcgctcccagcgggctataa

SEQ ID NO: 503769 - DNA, 219 bp, Stenotrophomonas maltophilia
atgctggtcgccagtacgcccgcatgggccgatcccggcagcacctccctgcagatccggctgactgtggtcgagggctgcagcagtgatgccggcaacacccgatgcgcggcaccgcaccggcgcagcgacgcgcccgagcttccgcaacagatccgcgacctcgcgccgccggccgacagcgacgacgcggcgcctgccgtgaccctcatctactga

SEQ ID NO: 503770 - DNA, 1035 bp, Stenotrophomonas maltophilia
atgagcgccgcggaccggcggctgcacggactggacctggcccgctacctggcactggccggtatggtgctggtgaatttccgtctggcgatggccgtgccggcagagggtgagggttggctggcagggttcttccatctgctggaaggcaaggcttcggcgacattcgttacgctggctggcttgggcctggtgttggccacgcagcagcaagggtggtggccggccagcgtgcagacctggaggcgcgcgctgttcctgatggtgctgggcctgctcaacctgaccctgttcccggccgatatcctgcactactacgcggtgtatttcgcgctggcggtggcgtggctgcgtgcctcgccgcgggtgttgctggccagcatcgtgggcctggcggcctgttcgttctgggcgttgctgcattgggattacagccagggatggaactggcagacgctggaatacgccggtctgtggcaatggccgggcgcggcccgcaacctgctgttcaatggcttccacccgttgatgccgtggctgtgcttcttcctgctgggcatgctgctggcgcgccttccgttgtcgcagccgcgggtgcagcatgcattgctggtgctggggctgatgctgatcggcgccggccagggcgtgcagcatattgcgcagggaacgccgtggcaggcgtggctgggtacgcagccgatgccgccaggacccgcctacgtgcttaccggtgcgggcgcggcctgcagtgtcatcgccgcctgcctgtggctgacgcgcgtgcgaccgggcgactggctggagccgttcaccgcggccgggcgcatgaccctgaccctgtatgtgggtcacatcctgctgggcatgggcacgctggaaagcctgggcctgcttgatggcagtgcctcgctcgcgtcggtgctgttgtgggcgctgctgttcctgatgctggcgaccgctgcggcgtggctgtggtcatggcagttcgcgcgcggtccactggaggcggtgatgcgccgtattgcaggctag

SEQ ID NO: 503771 - DNA, 297 bp, Stenotrophomonas maltophilia
atggagttcagtttcacgctgatgtaccgagtgcctgataccggaaaagatctcagtgcatttgagcgaggtcttgcagaggtggggtgcgacgatgcgctgctgggcagtggttcgccgggcgtgttggcgttgcgattccagcgagaaggcacagccgcagacgatgtcgcgcgtgccgcatgcgtgcaggttcagagtgcgctaccggaagccgaattgataaccgtgcatgtcgatgttagcaatgctgccggcgtctccaattgcggtgcctccaaagctgagcctgtttga

SEQ ID NO: 503772 - DNA, 1245 bp, Stenotrophomonas maltophilia
atgaccgacagcccctacaggacctaccgcgttggaatcggcgtatcgctgctgttggcggcactgatcgccacgctctcgttgattgccgtggccagccccaacctgggttggggcgtcgtggcgctggccaccatcgcgatctgggtcggcctcccgctgctgctggtcctgctgctggtgtggctgcgctacatggtgcgacagcgcgggcaggtgccgggccgcatacacgtgctgatgttcgtgccaaccgccgccgccatgctcatcattccactgtggcacttcctgcaaggcagtgtggacagcctggccggcggctcacgcgcgtccatcgccgagctgcacgtcaacctcagcgggcaacccctttggctggacacctcgccgtatgcatccaccggttctggccctggcccggatctgcccatgcagggcgaaacgccccagcgcttcctggccttccaccgctaccccaacccgcagtccgatgcagacagggccttcccgtatgaacaagcgcgcctgaagcgctccgtcgaccactaccgttacgccacaccgtctggagatcgcgccgtcaccgatgtgccgctggtccgtcggacctaccctgaccttgcgccattcaacgcggcctggcgacgtgcgggtacacccgagctcgtgcatatctactaccactacagcgatcacgtagaggtcgcgcccgcgctcgcacgcctcagtggcttcaccaccgatgatctggagcgcagccgcttcgaaggcctgacgctgttcaagatccacaactacggcagtgcgcccatccttcgggtggaaatcaatggcctcacactggacatcggcgacggggccatcgcgaacatcccggaagcgccccgggattgcacggcctacggctacccggtcagccccgcgctgttgccgctcaacctgcccctgcaggtgcgctggcagactgcagacgcgccgacgcggtggcacagcgcgcgcgtgcaggtgcccgcgttccggcagccgcagccactgcaggggcaatccacattgcagcgcgtcctgctgtacatgctgcccgatgacgcgctggccgccgaacgctacgccgaggtctttgacggcgattcgcggcgcggcatcaaggccactggcctgccagccagcgctgccacctacgcggtgtgtggcagcgccagggcaacctatggcgaaggagcgggtaacgtgctggcagactga

SEQ ID NO: 503773 - DNA, 1377 bp, Stenotrophomonas maltophilia
atgaacccctgcaacaccctgctgcccgccgccctgatcgcgctgctcgcccccgccaccagccaggccgcgccgcctgctgaggacgccacgccactcaccaccggcagcgtgcggctggacattgccagtggccgcgtcgaaggcaacgtctgcgtatccaaccgacctgccgattcgctcggcaccttcgtgctcaacgccggcctgaatgtcgcacgggtcaccgatggcgatggcgcgccgctggacttcgaaggctggtacgaccccggcgtggatggcgaagcacgcgtgtacaccgtggccaagccacccgccacgctctgcgtgcagtacgtgggcgccttcccggtctacgcccggcacgatgccccgaccgacttcaaaggcctgatggccttcaacggcgacagcgcccgcttcaccgaacagtccgcatggctgccgcaggcgttcgatcccaaggcccgcgcgcgcagcagcgaaagccgctacgacctgcaggtggattgcgccggctgccgcttcctgtatctcaacggcagccaggccatcgaaggtgcgcagggccgcttccgcagtgagaaggcacggccgatcctgctgttcggcggcagtgggccgatcacgcgcaccgcgcaggtcacgatcctcaacgagaccctgcccccggcgaaggtcaatgcactgtccagcacggtgcagaagatagccgacgtgcacagccgctacatgggcgtgccgctggccgaccgccccaccttcctgcgcatggtcaccctcaaccagatcgagcgtgaccgtgaaggcagcgaatggggctttgccacctggcccaccatcgccatgagcggcagcatcggcaacgtggccgattcgctgctggccggtagcgagaaagccgagcgacgcgtgcagtacatcgcgcacgaaatgagccattactacttcggcacgctgaaccgtccgcagggcccctacttctgggtgctgctggaatccagcgccgagttcctgtcgatcaaggcgctgcgcgagatcagtggcgatgccgcggctgatcgctatatcgcgcggttgcagtcagccatcgacaagcaggagaagccgctgccggcgttcgatgccatcgatggcaactcggacctgggagagatgtatcgctacgtctatgcgcccttgctgctgctatcgctggagaagcaggtgggcgaagtgaagatgcaggccttcatgcgcgggctgctggccgcgccttcgccgaggaactgggcggagctgcaggccatcgcgctgaaggccggcatcgatgccaaggcttggcagcaatggcagctcagctgtgtagcagttggcaaaccgaggtgccagtag

SEQ ID NO: 503774 - DNA, 774 bp, Stenotrophomonas maltophilia
atgtttgcaaatccttcgagccgtcgtgcatccctcggagtgtgtcttctgttgacggcgggttgcagccaggcggggaccgccgacgaatcaccggccatcgccgcgctgaaaggccaggggctttccatcgtgaaggaatttgatgcaggggcggaggtgcgtgccttcgctgcggtcgcgggcgatcagccagtcgcggcctacctcaccaaggatggcaatgtcatcgttggcacacggttggataccaagggcaaccgcatcgatgatcccaccctgcaggagctggtggccaaaccaatggcggaacgtgcctgggcgcagttggagtcctccacctgggtgcttgacggaaaagctgacgcgccgcgggtgatttataccttcagcgatcccaactgtccctactgccatcgcttctgggatgcggcgcgaccgtgggtggacgccggcaaggtccagcttcggcacatcttggtcgggatcatcagcgaggacagccccaacaaggcagcagcgatccttggcgctcccaaccgctctgtcgctctgctggagaacgagcacacgttcgagcgaggcggcattacaccggccaaaagcattcccgccgacgtaagcaagaccctggaagatcatcagatgctcatgctgacgctggggttccgcggaacgcctggcattgttatccgcgatggtcaaggtgttctcaagaagtacaacggaatgccgcagcagggtgcgctttccgaggtgcttgggccgcgctga

SEQ ID NO: 503775 - DNA, 837 bp, Stenotrophomonas maltophilia
atgatcggtatcgggccgttctccatcgacatggtgatcttcgtgctttctgcgctgctggcctggttggtggcacggatgtgggcacgccgactgcccgattcgccccacaaagcggttggcagcctgttgttcgatgctctgctcgtggggctgctggttgcgcggctggcgtacatcgcgaggtggtggaaggaatacacacaggcgccttggtcgatgattgcgatcggtgacggtggattttcctggtggatgggcacgctcggcgcgctgttgtttatcgcctggcgcacgcgatcggcacgagcactgcgggtaccagtttctgcgggtgtgctggccggtgttcttgcctgggcggcggccggtggcgtcttcgcactgctgcagcgctcggcaccgcccttaccgagcgacccgttggtgatgctcgatgaccgtccggtgagcttggacgcgtatgtgggccggcctgtcgtcgtcaatttgtgggcgacatggtgtcctccgtgccgtcgtgaaatgccggtgctggagcaggcgcaatcgctctatccggaaactgcattcgtcatggtcaatcagggcgagcgagcgacggtcatccagagtttcctcgaacgtgaggggttgaacctggaccatgttctgcgtgacccggcatcggacacgatgcgcgtgatgggcgcgcgcggcctgcctaccactctcttcttcgacagcgaggggcgcctggtggatacgcacatgggcgaaatgacgatggccagtctcaagaacacgctcatgcgcagatttgcgcagaaatctccaaacaccataaatcgggagtaa

SEQ ID NO: 503776 - DNA, 1350 bp, Stenotrophomonas maltophilia
gtgccgaagccggctcctgaaacgactgatgccggtgtcgcagcagagatggcggaggatcaggcggcagcgcagaagctctcgacgctggggccggtcactggcgtgctgctcttctttggtttcggcctgctgctggcgttcacgccctgcacgttgccgatgatccccatcgtatccacgctggttgtcggcaaccaggcgggtccgcgacgcgcgttcctgctgtccttgacgtatgtgctggcgatggcgggaacctatgcggccgtcggtgttgccgccgggttggcaggggccaatctgcaggcgatgttgcagtcgccgtggttgcttggggccttcgccgcgttgttcctgatcctggcaagttcgctgtttggcctgttcgagctgcgcctgcctgcggccctggtcaaccgcatcggcgcttccggccaggagcgtgccggcgggcgcgttgcaggtgctgcggcactgggcttcctctcggcattgctggtcgggccgtgcatgaccgcgccattggcgggcgcgctgctctacatcggccagaccggcagcgcgctgtacggtgggcttgcgttgttcgccctcgggcttggaatgggtctgcctctgctggccatcgccgtgtttggcgcacgcgttcttccgcggcccggtgcatggatggagaccgtgcgagtggtcttcggctacgtcatggtaggcatggcagtgatgatgttgtcccggttcctgcccggcacggtggggctgttgctctggggcatgtggatactctcgatctcgattggactgatcgcgtggggccaggccgtggcagtgaggcgtcgcctggcgtgggcgctgcgatccgttgcggtctttgcgggcctgtggtctgtgctgatgcttgtgggtgcagcagccggcggggaatccagcttgcagccgctggcacatctgcgaacagcggcaagcacgcccggcaccgccggtgtggcctatgtgcaggccaagtccattgaggacgtggatgctcgaattgccgaggccggtgcacgcggccaatggacactgatcgacttctatgccgactggtgcgtcagttgccacgtgatcgagcgcgaggtcttcgggcatcctggggtctcatctcgcctggccggtatgcaggtcgtgcgcccggatgtgacgcgcaacgatgagcaggaccaggccttgctgaagcgatggcaggtgcaagggcctcccacgatcatcctggtggggccggatgggcgggagcgcagggcgcagcgcgttgtcggtgaagtcgatgcggatgatttcatggctcgcctcgatcgggcgggggcgccatga

SEQ ID NO: 503777 - DNA, 669 bp, Stenotrophomonas maltophilia
atgcgcgtgttgctggtggaagatgatcagctgattggcaagggcatcgtggccggcctgcgcaagcacggcatcgccgttcgccatgtcaccacggcccaggacgcagaagccagccacagggaagacacctttcatgcgctggtgcttgatcttggtcttcccgatcgtgacggaatggaccttctcgccagcatccgcgtcttcgagccccagcttccggttctgatcctcaccgcgcgcgatgcgatcgaccacaagctgaaaggcctgcatgccggtgcagacgactacatgatcaagccattcgatcttcgcgagcttgcagccaggctgcacgcgctggtcaggcggacccagggccgcgctgcgcaggtcattgtggccggccccctgcgcctggaaccggagagtggtttggcctggctcaatgaagcgtcagtcacgctgtcccgtcgagagatcgatcttctggcgcacctggccagcaccgatgggcgctgggtttcggccaaccttctgaatgagcgcctgtatggcttgaacgaagacggcagcagcaacgccctcaacgtgcatatccacaacattcgccgcaagttaggagccaccgcgatcgagacggcacgtggtcttggctatcgcttgggatggagacccacaccatga

SEQ ID NO: 503778 - DNA, 1329 bp, Stenotrophomonas maltophilia
atgagcctgcgccttcgagcagtactgattaccggtctttcgctgcttctgctgtgggcaaccgctgccaccctgatgatgcgtggcgttcactcgaaccttgatcgaaccctcgatgggcggctggccatgtcagcgcgcatggtcgcgggccttctggagcaggcaccgctggcgccaagctcggcaacatcggatttcagcgagtccgtccgcctcatcggcaaggacggcatcgcatgcgatatacggcccctgcgcggagacgttctggctcgaacggccaacgggccccattcggagttcgagtcgttgccggcaggcttcagcacacgagaggtcatgggacagaagtggagggtctatgtgcttcgcaccaatggctatcagatcacgacagcagaccgcatcgaacaacgcgacacgctgatcaatgaactgctcgctgccgccggcctgccgttcctcgttgcgcttctgggtggccttgcggcgctctggattggcatcggacggggtctggccccgctgaagacgctgtcccagcaactgcgtgccaagcacgcggacgatacttcaccaatctcgttgagccctgccccctccgagttgcacccggttctgagtgccatgaatgggcttctcagacgcctggctcggacgctatccagccagcgcgccttcaccgacgcggcagcgcacgaactgcgaacaccgttgacagtgatcgacacgcatctgcaggtcgcccggatcagcgatggcgacgacgtagccagctcgctcgccagtgcagaggaaggcgtgaagcgcctgcggcgaacactggatcagatgatgacgctggtgcgcaccgaggcatccaccagccagggagacgaatgcgcttcggtcatggacgtcgtcaacggcgtcgccagccatgccgcaggtgactcccgtacgcgactgaccatccaatccaaggggatcgatacaggcagcgccattccacggtcgatgctggaagttgcactccgaaatctggtagacaatgccttgcgatactcaccacagggcagcagcgtcgaactgcgggtggacttcagtggcaccgctggcttctgccggctgcaggtagccgatcgtggccctggcttgagcgccgagcacgccaagcagatcgggcaacgcttctggcgcggcgatcaggggcggcagcacagcgatggcgcaggactgggcatttccattgtcctggccatcgtcgaacgcttcggaggacggctggacatgaaagccagggacgaaggtggattgatcgccgagcttcttgtcccgctgtgctga

SEQ ID NO: 503779 - DNA, 1077 bp, Stenotrophomonas maltophilia
atgctgttcccgtacacctacgtgccacaccagatggagaggatgcatgcgttcatcgactttatttttcatgaagtttggtgtaaggcgccgacgggtggcgattacagtctggatctattcgttgcaaaccctgagctgcatgaagtgatgactgcatttcattatgacgacagcaaaggcgcagagtttttctctagtcatgtgcagcgcatctacggactgttctcggctctatccgaaacgcagatcatccagtttcgccagtggcatcgagggaataatgacttggagagagtgtgcgccaatgacccggcggcacagctcgcccgctatagtgacatcgctaccaatcacaaagatcttgccgtgcagctcggcaccttttttaagggcctctattcgcaatcgcttcttggtctcgcggcattgcgcgccaagattggtgatattgacagccactaccaagcgttcatgcaggtaaatagggtcgggaaatgcccgttctgtggtctcaatgatcttttgggggaattccatagcaagcgcgaggcctacgaccactacttgcctaaggctttgtatccgttcaactcaatcaactttcggaatctcgtcccgtcctgtcaccactgcaatagtagctacaagaccagcaagaatcccgcccacaaatttaaggatcccaccagggcagttgagcgtcgtgcgttcttctatccttatagacttgcagcgcaaccgatcgaactacaggtcaccttgctgcactcagacatagctaagctgacttcctcggatgtcttactgcaatttggcccatctgatgttgcggaagagatcgacacgtggaaggatgtgtacggcatcgaagagcgctacaaggcaaaactctgtggtgagaatgacggcaagtattggctgatacaggtgctcgacgaatgcagtgcttatgacaagaatcctgcggacatcttgtccatgcgtgcgcggcagaccctgagtcgaccattcgccgattgcaatttcctcagaatgccctttctcgatgcttgccagcagatcggtgttctctga

SEQ ID NO: 503780 - DNA, 1839 bp, Stenotrophomonas maltophilia
atgaagctgctgcgcctcaagatcaccgacccagcgggctttcgcagcttgccctatggctttgagcatcacttccgcaccgagtggagcctgcaggaagagctggcccagcccgaaggtattgcccccttcgtttgcgccggccccaacggcagcggtaagtccaacctgctcgaagcgatggcagcgatcttctttcagctggaggtgcaacgggtgcgccgcaatttcttgcccgacatatttcagtatgaccctgatgacaatccgggcggcatacaagagcacgaaggatatcccaacgcctatgagctggaatacctgatcaagttaccgaaggtgcaccgttctttcgatagtccgaagttcgctcacgtgatcgtgatcaaggagagggataagtcgccgtggctgcgctgggagaacaacgaagcattccctgtcgagggttttgctttcagtaaattgactgatgaagagcgtgatctattattgccgaagtatgtgctgggttattcctccggggagaacgaaattcttagcctgccgttcttcaagatgcgtttcatccagttcgatgagtactggaatgctctggctcgacagctcccttatcccggccgtcccgaaacgcggctggcctatctggacagtggcttcagtcaagctattctgttgtgcaatcttctgctccaggatgaagccactctccagcccttccgcgaggatgtgggcatagaggcgcttcgcgagtttcgcattgtcctgcgccgcagcatcccggctaaaagacagcatattgctgcctttacttcgggtgagtacgccttgcccaccgaaactcaggctggtcgtttcacagataccaatgtggtttatcttgatccggagaccggagattaccgactcaatctgcttcaaggactagaggccaatggcgatgagcgcactgaacgcacggccattgtggagaagctcaagcgctgtgccacgttgcatttctgcgatgaggcttccgacacgctgatcttggattaccggatcaatgaagcgaccaagcaagccttccgggccaatttcgatgatccggaaggccctgcactcgctttgttccaggccctgcaggttctactgacgctcaacttgtatagcgtcagcgacaccatcaaggccgacctgtaccgctccaccagccactacgtcagtgagacggtgccgacgctggcctccgcccagcgcatcatgcgcttcaagaatttttacttcacaaagcagggcataagaaagccgatgctgctcaaagatctgtcggacggcgagttccagatgctgcacagcctcgggctatgcctgctgtttcgcaagaccaattgcctgttcctactcgacgagccagaaacccacttcaacccgcactggcgcgccagcttcattacccgactgcgtcaatgcttgcccgatgtagaagatgcgggacaagaaatgctggtaaccactcacacgcccttcctgatctccgacagcaagccggaaaaggtgttggtgttcgccaaggatgaagccagcggcaaggttagcgtcagcaagccgaactacaacacgctgggtgcctcgatcaacaagatcaccatgaacaccttcggcaagcgcgaaaccatcggcggtcatgctcagtccttgttggaggcgttgcgtgcccgctttgaacagggcggcgaagacagggaatcgttgatcacggagattcagcagcaactcggtgattcggtggagaaggtgcttctgatcaaggccattctcgatggcaatcagtcagcccgtgagaaggggaaggactga

SEQ ID NO: 503781 - DNA, 1593 bp, Stenotrophomonas maltophilia
atgattttcaaacctctggcctcactagcgaagatagttgcgggtcaatcgccggattcatccacctacaacgcgactggcgaaggattgccattttttcaaggcaaggcggattttgaggacatgcatccaacggttcgcatgtggtgctctagtgagaagcgaaaagaggccgagccgggcgacattttgatttcggtgcgtgcgcctgttggtgcagtcaacatatgcaatcagaagtcaataattggtcgtggccttgccgcaatccgcacattatctgaacttgatggaaaattcctctattactggctaaaagccaacgagcagaaaattgatgctctcggaacgggctcaactttcaaggcaatcacgcaggacacactgaagaagattgaggtccctgttccacctctcgacgaccagatcagcattgcccatctgctcggcaaagtggaaggactgatcgcccagcgcagacaatacctgcaacaactcgacgacctgctcaagagcgtgtttctggagatgtttggcgaccctgttcggaatgagaagggctgggagaaaaggccttgcagcaaagttgccgaggtcattactggacatccattcaagagcgacctctacacaaatgatcaaacgcaactaagactctgtggcggcctaataatctacccccagcgtattgagtgggccaaatgcaactattggccagaacaattgcttcctggacttgagcgctttctactaagagccaatgatatagttcttgcgatggatcgtccgtggatatccagtggattgaaaatgtgcatggtcgatgaggctggcagtggctcgctcctggttcagcgaacagctcgtttgcgagctaaagaggttgagcagtattttttgtatatccatctaaaggatgtatcgtttaccaggcactgtaagccgacggaaactacggttcctcacataagcattaaggatatccagacatttcaagtattatgcccgccacgggagttgcaggctaaattttcctcggttgccgaaaaaatagagcacatcaagctttgcaaccagcatagcctcgccgatcttgaagccctctacggtgcactgagccagcaggctttcaagggcgagttggatttgtcgcgtgtgtctctacgaaaactaccaatccaacatatcgcccccgcttccattggagatcaagcaaccgtgcccgaacctgctgtagaaactgtggtggcgattaattttcccgataccgatttactcctgcccgcactgcaagatcgcacacggcttgcgccgctgctgcgcttctggctggaggcctatcgcacgcagttgggcggcgcggctttctccctcgaacgcttcatcgccggtgcgcaagcccggctggcggaacggcacccggacagcgatttcgaactacgtgccagcgactatgaacatgtcaaagcttgggtctttgaggcgcttgactctgggcgtttgaggcaagagaggaaccaagtttattgtgtgattgataccagagagaccgtacttggaaacttgattgagttaaaggccagtcagacatga

SEQ ID NO: 503782 - DNA, 1665 bp, Stenotrophomonas maltophilia
atgctacagaacaatcccgaactcaaaaataaaatagaccagctctggaacaaattctggagtggtggcatcagcaacccgcttaccgccatcgagcagatcacctacctactgttcatgaaacggctggacgaactggatcagaagagactggccgatgccgagtggaccggcgagaaatacacctccaagtttgaaggcgcctggattccgcccgaggaacgtaactggcctgtggcggaacagcgtcccatcgacaaacgcacgctgcgctggagtgagttcaagcgcatgcaggccgaagagatgctgcaacatgtgcagggcaaggtattcccctttctgaaagacctgaacggtgctgagtccagtttcacccaccacatgaagaatgccgtgttcatcattcccaagccagcgctgctggtggagtcggtgaagactatcgacgaaatcttcgaggtaatggagaaggactcacgggaaaatggtcaagccttccaggatattcagggcgatgtctatgaaatgctgctggccgaaatcgccacggctggcaaaaacggccagttccgtaccccgcgccatatcatcaagctgatggccgaactggtacagccacagctaggccacaagatagccgaccctgcctgcggcactggcggcttcctgttgggtgcgtaccagtacatagtcacccaattggccatcaaagcaggcgccaagaaccttgagtccgatgaagacggctttgtccgcacctcggtcgcggctgcattgaccgaaaaggtccagaccatcttgcaagaaagcctgtacggttacgacatcgacgccaccatggtgcgcttgggcctgatgaatttgatgatgcacggcatcgatgagccgcacatcgactatcaggacaccctgagtaagagctacaacgaagaagccgaatacgacatcctgctggccaatccgccctttaccggcagcatcgacaagggcgacatcaatgaaaacctgcagctctccaccaccaagaccgaactgctgtttgtcgaaaacatctatcgcctgctcaagaagggcggcactgcctgcgtgatcgtgccgcagggcgtcctgttcggctccggcagagcattcagggatctgcgccagacactagtggagcgctgcgacctcaaggccgtcatcaccctgcccagcggggtgttcaagccctatgccggggtcagcaccgccattctgctgttcaccaaggtctggggggcgcaggaaaaggttgccaaacctgccaccgagcatgtctggttttacgaaatggtcgctgatggatattcgctggacgacaagcgcagcaagcaggagggctctggcgacctgcaagacattgtcgccagataccacttacgcaatgccgctgccgacaccgatcgcactgccaagtgcttcatggtgccgcgcaccgagattgcggacgataagaacaacttcgaactctcgctctcgcgctacaagcaagacgtgttcgaggaagtgcgctatgacgcgccgggcgtgattcttgatcggttgattcaggccgaggtgggggatgtagacgaagcggagctcgacaaggtgcgaagcggcatcgtgcgcgagctgctggagttgaaggggatggtgggatga

SEQ ID NO: 503783 - DNA, 2799 bp, Stenotrophomonas maltophilia
atgagtaggaccgaagcacagacgcgagcggatatcatcgatcagcagctcgcgttgtcaggctggaacgtcaaagacccgactcaggttatcgaagaattcgacatcctcacttcgttaaccgaggctgtggccgagccgcgtatcccgtatcagggtcatcagttcagcgattacgtcttgctgggcaaagacggtaagccactggccgtgatcgaggccaaaaaaaccctccgagatgccgcgcttggtcgtgagcaagccaagcagtactgctacaacattcagaagcaactgggcagcgaactgccattctgcttctacaccaacggcctcgaaaccttcttctgggatctggagaatacaccgccccgcaaggttgtcggctttcccacccgcgacgacctggagcgctttgcctacattcgtcgcaatcgcaagccgctgacgcaggagttcatcaatacctccattgcaggccgggactaccagatccgcgccattcgctcggtgctcgaaggcatagaacagaagaaacgcgacttcctactggtgatggcaaccggcacgggcaaaacgcgcacctgcattgccatggtcgatgccttgatgcgtgcaggccatgccgagaaggtgctgttcctggttgaccgcattgccctgcgcgagcaggccttggccgcgttcaaggagcacctgcccaacgagcctcgctggcccaacgtgggtgaaaagctcattgccaaggatcgccgtatctatatggcgacctacccaacgatgctcaacatcatccgcgatgaagtccagcatctgtcaccgcacttcttcgactttatcgtcgtggacgaaagtcatcggtccatttacaacacctacggcgaaatccttgaatacttcaaaaccatcaccctcggtctgacggcaacgccgaccgacatcatcgaccgcaacaccttccagctcttccactgcgaagacggtttgcctaccttcgcctataccttcgaagaggccgtcaatcgcgttccgccctatctctgcaatttccaggtcatgaaaatccagacccggttccagatggaaggcatcagcaagcgcaccatttcactggaagaccagaaaaagctcatcctgcagggcaaggacatcgaagagatcaacttcgaaggcacccagcttgaaaagcaggtcatcaacaagggcacgaacaccctgattgtcagggagttcatggaggagtgcatcaaggacggcaatggcgtgctgcccggcaagacgatcttcttctgctcctctaaggcccatgcccgtcgcatcgaggaaatcttcgacaagctttatccccaataccatggtgaactggccaaggtgctggtctcggatgactcccgcgtctacggcaagggcggcctgcttgatcagttcaccaacaacgacatgccacgcatcgccatcagcgtggatatgctcgataccggcatcgacgtgcgagaaatcgtcaatctggtctttgccaaaccggtgtattcctacaccaagttctggcagatgatcggtcgcggcacccgcctgctggaagccagtaagtctaagccttggtgtaccgagaaagatgttttcctgattctcgattgttgggacaacttcgaatatttcaagctacaacccaagggcaaggaactcaaaccccaactaccgctacccgtgcgcttggtgggcctgcgcctcgacaagatcgtcaaggccattgccatcaaccagatcgatatgactgagcgcgaggtggccaaactgcgccagcagatcgccgcactgcccaaagactccgtggtgatcaaggacgctgctgtcgcgctgactgggttggacgaagagaacttctggatcaaactcacgcctcagaagctggaatttctgcgcgccgagatcaagccgttgtttcgtaccgtgtcggaagccgacttcaaggccatgcgtttcgagcgcgacgtgctcgagtactcgctggccgtactcaatgacgataaagagcaggccgacacgctcaaagaaggaatcgtcgagcagatcggtgaattgccgctctcggtcagcttcgtcaagcaagaagaagccttgatccgcgtcgcacaggccagccattactgggccacggccgacgaggaggcctttgatgagttggtggccaagctcggcccgctgatgaaatttcgtgagcagatggccagcccggggccggtgcatctggatctcacggacatactgcacaacaaggaacgggtcgagttcggcccccagcacgaagcggtgagcatcagccgctaccgggaaatggttgaagcgctgattaccaaactcactgagcacaacccagtgctgcagaagatcaagagtggcgaaacggtgagtgcagacgaggctaaccagctggctgaactgctgcatgaagaacacccatatgtcactgaagatctactgcgccaggtctacaaaaatcgcaaagcgcgcttcatccagttcatccgccacatcctcggcattgaagtcgtccagagcttccctgacgaagtcagcgctgcgttcgaccagttcattcgggcccataccaccttgtccagccgccagatggagttccttaatctgttgaagaacttcattatcgagcgcgaaaaggtggagagaagagagcttatcaacgcccccttcacggttatccatccgcaaggcatccgtggcgtgttcagcccggcagaaatcaacgaaatcctgctgctgaccgaacggttggtggcttaa

SEQ ID NO: 503784 - DNA, 1218 bp, Stenotrophomonas maltophilia
atgcacagtagttaccctgatgatccgtccggctcgatcgtcgaaaggatcgacatagcaccgcttggagcagggcctttggagggaacaaccttcacggtgaaggacaatatcgatctggcgggtcataagacctcctatggcagccccgcttggcaggccaggcatcctgcgccgaagctcaatgcgctttgcgtcgatcaggtattggctgcgggcgcgcgctgcgtgggcaaggtcgtcgcggacgaattcacgtatagcctcgacggcgaaagccaattcttcggcacgccggtgaatgccagggctccagatcgcattcccggcggctcttcaagtggatcggcagcgtcggtcgccaatggcgtggccgatttctccatcggcaccgattcgggcggctcaatccgtgttcctgcgagcctgtgcggtatctggggcatgcgcccatccctgcaccggatttccgaagccggcgtgctgcccttcatgccgagcgtcagcacggtgggcgtcgttgccgcatcattgaacctgcttgatgcagcgacacgggttttgctgcgcagcagctcaagccagccggcgccgctgcgacgtatcctggtcctcgccgatgcgctggacattgctgacgaagcagtgagaaaccaggcggaggccgccttgcaggcgatcgccacccgcacaggcatcgagccggagacagtccgcttctcgcagatcgtcggcgcggacgttccgctagtcgattgcaatgtgaaggcgcttcggaatctgcagacggccgaattccagagcacggttggcagctggatcgaaacacacaagcccgagcttggctttgccttctccatggcgtatggaaatgtgcaatcgttcgaccggcttaccgcactcgacagcatcacccgctgcgaatggttcttcgagaggatcaatgctttcctcatgcccggaaccgtcatctgcttccccacgacgcctgtcattgcccctctcaagggatcgctgacgacgctggaagccgtgctggacttctacgataggacaatggcgatcaccgccttttccggtgtcgcgcggctgcccgagatttccatgccgttgctgactgtcgacaattgcccggttggactctctgttgccgctggtcattatcaggatgaattcgtgctggcctcagccaggcagatgacagaaggaattgcataa

SEQ ID NO: 503785 - DNA, 2613 bp, Stenotrophomonas maltophilia
ttggcccgtggggccgagactgagcttcagcatgatgtcatcaagatcgaccccgatgagctgcgcaaataccacccagatatagggaaattccaggagagctatccctacacatggtcttcgtacacccatcctgacgccagcgcgtggtctgacaaactgctagatgccaccgttgcagggaagaagaacctgatcttcgacaccacgttgagcaacggtgagtggtcgtccgaactgatcaaggacctgcaatcgaagggctacacggtggaggtgcgcgccattgcatctccaaagctggagagcgagctcggggttgacgtgcgctactctcgcgacctggacagcaaaggcaatggtcgctacgttcccgctggtgctcgcgatgcgatctacgagaagctgcccaatagtctggacatggtgcacgaacgcaccgatgtgcaaattcgcatcttcaatcgtgaaggcaaggagttgtacgacagccacaccagcccgaagttgcctggggctgcattgcaagaggcgcgcgaagcccggctaaaagatcccgccctcacccgccagctgcgggatggctggcaggagcagcaggcctggcaccgtgatttgccacagacgctgtcccacaacgacaaggtcgctcggcccacgcgagagaacctactgacagagcgcagcgaagctcaagtggtcgaggggcttgagcggcaggcgcgacaaatggtcgatattgatcatgcggtgcgcattcgccccacccgcatccgcgcgggtggggcactgggcatcgcaggcctggcattggatgcctatgacgccggtgaggctctgcgagcaagtagccgactgcgtggcgaaggcaatgacacagccgcagagtcagggttgatccacttcggcgcacgcagtgtaggcggctttaccggcgcaggtctgggcatggcagtcggtgcggtcgcgggcgtcgaatcaggccccggtttgctggtcacaggcgccatcggcgggatagcgggcgcgttcgcgggcgacaagattgccgagtggacggacaaccgtcgcatctacaatcaagccgacagtcagggaaacacttggacctatgatccggatcatcccgatcaaggctggcagcgccccgcaccgattgacaacagcaacgatggcatcgacaacccgacgcgtggccttttgcgcgcgcctccagcccttgccaaccagctgaattaccaggcaaccagcgagtcggtgaaactggtgcttggcagcccgcccagccagcaagacccgttcacgcaacccgccaatgtcagcgacccgcaaagctggtatccggcgcagtggacacgtacggccgacggccagcagtggcaacgcgaagtgatcactgccgtgtacgagctgggccagcgcgagacgcggatcgacgtggccagtccagaacgagcggccgaactcgatcaggccgctgcccaggtcgtgctgcacaatgctgccaacagccgcccggtgattgcggcgcgctacgaagcagcctatgcccagaatggctgggcgtcctatggctcaatacccgaggctgtgcagcaggcacgcaccgatttggacgcgttggccgcctccgacgacaaccgctaccagcgccaggcggacggccgttgggtcagcgagggggtgatctacgattccactgccagcggcaatctgcgcgccgagttggacgccacccgcgatgtggtagaggcgacgttaccgccgccccacgctatacagaagccgtcgccgatgacggctgatgagcgcatgcgcgacacgctgcagggcgcctacgcgaacgctggggtggtcctgagtgcagaacaactggcagcgagcgcggttgcagtccaggccacacagaccgcgcagggtctggggcccgacaccactgccctgcagttgcagcggaacgccaacggcggttacgacgtggacagccctattgccaatctccgcctggccgctgacggcaagacttataccattgcggccgtgaccacgacggaggacatccatcggacacaaggccgggcttcctctaccggcatcgataacccgcaacaggccgcgggggccaccactgaacagccaatggagcagtcccatgcgggggcgccgatgccgcctcggcaggaaccaacaccgtcccaggcaatgactgccatgcaggccgacccgctgtatcggcagatccgcgatggcgtggccgcgctggacgcgcgttacgggcgcgaatttgacgagaccagcgagcggatgacagccagcctgatggtattggcaaagggcaatgggttgaagcaggtggaccatgtgttgctgagcaatgcaacttcagaacagcctgtcgcacacaacgttttcctggtccaggggaggctggacgatcctgcgcacctgcgtgcgttcatgcccaccgagcaggcagtgcaaactccggttgcggcgtcagcgcaaaagtacgaggcggtcagccgcgaggtggagcagcaatcccatgccacacagcttcaggaacagcatcagcaggaaaaccaagctagagcggccagcatggggcggtag

SEQ ID NO: 503786 - DNA, 354 bp, Stenotrophomonas maltophilia
atgccagtcgattctccgcctcccgttccgcaaaggctgcgcgagatgctcaaggactatcctgagcatattcaaaccctgcaggctgacttaaatcgcgtagttgaaaagccgtccaaaggcatccccttatctgaacaggctatttgggcattggaggctgcgctcagtaccttcgccgtggatgcccgcgaagaaaccaaagcggccgaggcgggcggcgatccggcggcgattgcacaagccaaggcaaaagaacgcctcatgtttcaagctagctccagcaatggaggaatgcggcttggattgatgaatgatctatgggattactttaaattgatcgagggcgtttga

SEQ ID NO: 503787 - DNA, 786 bp, Stenotrophomonas maltophilia
atgccgcggcctgaccgcctctggctggttctgttcgcaggcatgctggccgttgcggtcggcggctgcaaatcccatcccaaggccaagctgggccccagcgaggcgccggtctactcggtccgtgatccggacagcgtgcggcgccaggtgcgcctgcaggacctgctggccctggccgcccgcgacatgcaggtgggcaacctcgatgcggccgagcgcaaggcgcgcgaggcgctgaagctggcccccgagtcgcccgatgcgctggtgctgctggccggcatcgacgagcgccgtggccggacccagcaggctggcgagagcttccgcagggctgccgagcaggcgccgcagcgcggggacatcctcaacaattacggcgcgtggctgtgccagcagggccggccggccgagtcgctggtctggttcgatcgtgcgctgcaggcgccgggctacgccacgccggccgagtcccaggccaatgccgggggctgtgcgctggatgccggccagttcgaacgtgccgagcgcgacctgcgtgcggcgctggcaacgctgccgggaaacccggtcgcgctggaggcgatggcccagctcagcttccgccagggccgcttcatggaggcccgggccttcgccgaacgtaggattgcggctgcacccgcaacgcgttccgtgttacaacttgcgtctcaaatcgaagcgcggctgggtgatcgggcggcatctgaccgctatcttcagcgcattcgacaggaatttccgcaggaagcgggctcctaa

SEQ ID NO: 503788 - DNA, 444 bp, Stenotrophomonas maltophilia
atgggcgggaacggccaaccgagcaacggctccaccatcattccatgcctgcgctatcgcgacgcgcaggccgccatcgagtggttgcaacgcgccttcggttttcacgtccaagcggtgtatgccgacggcgatacggtgttccatgcgcagctcacctatggcaacggcatgatcatgctcggctcgagcagcagtagcggcgaatggtccaagctggcggtgatgccggacgaggtcggcggccgccagacgcagagcgcctgcgtgatcgttgccgatgccgatgcgcactatgcacgggccagggccgccggtgcccgcattgtcatcgacatcgccgaccaggactatggcggacgcggttacgcctgcgccgacccggaaggctatctgtggtggttcggcagctacgacccgtggcgcgcggaccacggccagtga

SEQ ID NO: 503789 - DNA, 1833 bp, Stenotrophomonas maltophilia
atgttccgttggtttgaatccctgattccggtgtttccgcccgtggacgggcgcatgccgccgcgcaaggtggtgccgttctacctgcactacctgcgcccggtgtggccggtgctgctggccaccctgatcgccggcctgctgctggcgctggtggaagtggcgatgttcgattacctgggccgcatcgtcgacatggtcgccgagcagccgggtgccggcttcttccagcgccacgccaacgagctgggctggatgctgttcatcacggtcatcgctcggccgatcctggtcggcctgcacaacctgctggtcaaccaggcgatcgtgccgggcctgagcaaccgctcgcgctggctgatgcataactacgtggtgcggcagagcctgaacttcttccagaacgacttcgctggaagcgtggccaaccgggtgatgcagaccggtacctccctgcgcgaatcggctgtgcagatggtcgattcgctgtggtacatcgtggtctataccggcactgcgctgtacctgttcgcacaggccgactggcgcctgatggtgccgttgatcctgtggctgctgacctatgcggtgatcctggtgtacttcgtgccgcgcgcgaaggagcgtgcgtggatcgcctccgaagcacgttccaaggcgatgggccgcatcgtcgatggctacaccaacatccccacgctgaagctgttcgcccatggtggccgcgagcaggcctatgtggccgagtcgatccaggaactggcggtgaagcaccgcgcgcagacccgggtcactaccggcatggacctggccatcgccatcgtcaacggttttctgatcgccggtacctgcggcctggcgctgtggttgtggaacggcggccacatcaccgttggcgcgatcacgttggcgaccggcctggtgatccgcatccacaacatgtccggctggatcatgtggaccatcaatggcatcttcgaggacatcggcacagtgcaggatggcatcaccaccatcgcccagccgctgaccgtgcaggaccgcgaggatgcggtgccgctgcaggtgacccgtggtggcgtgcacttccaggacatccacttccactacggcaagaagggcggcgtgattgccggactggacctggtggtgaagccgggcgagaagatcggcctggtcggcccttccggtgccggcaagtcgaccctggtcaacgtgctgctgcgcctgtacgacctggaaagcggccgcatcctgatcgacgatcaggacattgcctacgtcacgcaggaaagcctgcgccagcagatcggcgtggtcacccaggacacctcgctgttgcatcgctcgatccgcgacaacctgctgtatggccgccccgatgccactgacgagcagttgcatgccgcggtggccaaggcgcgcgccgcagccttcatcgatacgctggtggacgggcagggccggcgtggctacgacgcgcacgtgggcgagcgtggcgtgaagctgtccggtggccagcgccagcgcatcgcgatcgcccgcgtgctgctgaaggacgcaccgatcctggtgctggatgaggcgacctcggcactggactcggaagtggaagcagcgatccaggacagcctggaccagttgatgggcaacaagacggtgatcgcaatcgcgcaccgcctgtcgaccatcgcgcgcatggaccggttggtggtgatggaccagggtcgcatcgtcgagaccggcacccatgccgagctgattgcggctggtggcctgtatgcgcgcttgtgggcgcggcagaccggagggtttgtggcggcggatcaatga

SEQ ID NO: 503790 - DNA, 1074 bp, Stenotrophomonas maltophilia
atgcttggactgaacatggaaggatctaaattcgcgcccgcgacgttggcggcccttcttctcattccagcctcgtcctccaatgcatacgccaacggtgaaggagaaccaagcacgaccagcctgccagcggtccacgccatccattcaactcccggcccgcgcatctggcagttcaaaaaaggttcttcaaccctgctggtgctgggcacaattcagcctctgagggagagcctacccatcgacactcgtggcattgaagcagcgatctcgacatccgaggctattcttagctcaccgggtgtaaccatggagcacgatggtggtcttcttcgcagcctcatgctgtggccctccattcgcaagctcaagttcctcgcagatggtagaacgcttcgtgacgagctcacagtaaacgagtacatgaagtggagtgaactcaagcatctctatggcatgcgcgacgcgagcattgagaggatgcgcccaatgtacgctgcctggaaagttcacgacgcggcattgaagctcagcggaactcgaaccggccgctcactttcccaatccattgaacgtatggcccgcaagcaccggattcccatcgtcaacgcccgatttgcaatgccagtgaaggctgatagaaaaacgatccaaagctttcatattgactccgcaaacgaccataagtgcttcgcggaagccacttcaagcctgcagccctggctcgacgaggttgacgaacttggtcgatcctgggcagagggagacattgaatcgggagcgctcctgcaggctcctccatcaccgtctcgatgctgggtccgcctgaccaacgacgcgatcggcaacacgatgaacctcaatcttgatgtcgcgagccgaatgcactgggtcacagtgctccactccacgacttcccgctacaacagagtattcacctctctgccacttcaggatcttctacattcaaaaggcatggctgcggtactcttggaagagggatacatccctgatgctgaagtattctttggtgatcagccacagtccccagaccacgcaacgagccgaaactga

SEQ ID NO: 503791 - DNA, 978 bp, Stenotrophomonas maltophilia
atgtacgacacgaaagcatgtgagggtcaccggtctgcccaggaagccacctttcggcatagaatccagacagagcagcagcttggattggttctttctgatggggagaggtccgccatccgatccgcatgtgaagtcagcggactcggattggactcctattaccggtggtaccagtcaaaggcctccatcagatcccagctggcgcaccttgaccgcgcgtcactcctggaggcagtccacggcatcgaccgttccgactactcctcaatcgatgaaaagctcccgaagggcagaggagccgtgatcgcactaccgcatcacggtcattacatcctgtctgcagtccgcctgatggagcacatccgccacctgcgtgacatctacatcttatatggcgacccaaagaaccatgcaggaaacgacttgttcgatgacctgtaccggagactgttcgcacatgctggatgccgcgcgggcattattcactcgaatgcgggcgggatagccacagcgcttcgagcactgaagaagggagcagtagtcatcatgatgcccgacgtccaccgcattcgtgaggaaacctattgcatcccgtttatcggccgcccattggacatcatgttggggactgcagcaatggcgcggagaaccggaagctgcatcctgccgatcgtctccgtcgtcgatcgtgaacttcgaggctgtgcttccattggtgatcccatcgagccgactcagacgcgaacatcgctcccatcggaagcagctgattactggaccacggcgcagttctaccgctttcttgaaagttcaatgcgacctcagatcatctactggcagtacatccggcaacatttcatgaagaattccaggttcccaacgttccaccccaacacaatcgatgacgcttggaacatgttcttcaaggacccgcgaacccggccagacaccaggtacacggcatgcttggactga

SEQ ID NO: 503792 - DNA, 723 bp, Stenotrophomonas maltophilia
atgagcatcagccatgatggcctgagcgaaaccgaacgtaatccggaacatccctgcatgcatattgatggaatttttccttttccaacgagaatttcatcatccactgcaatcattctcgcgacgactcgatccaacatcaatcgcgctatcgaactctccactcggggcatggtcacctcaataattggcaaagaccccgcgtactcggaagccccgtccgacgcatttcaaaagctcgatgacagcccaggaacccatgccgtcattgtattcagtgatcaactcacatccagccttgacgcccctgtgcttacatcacagcgcggccagcagcgatttctgtcgctggcagagagcatcctcaacagcacctacggatttcgcctcgtggtaagcacatacgaaggcatgttcatgctacccccatgctctcctcttgtttccgtgctgcgcatcatctcgaaccatttagattccaacgccatgttgggaggagactggctcgtgcaagagctccagacagagagacatcccagtaggcgactaatcgaaaacagagtccgtcagcgcgcctttcattcagcccttatgcatatgtactggacgcatccagatttcaatcccaagcggtttgatcggattcatgggcaactcaagagcctctaccgagcgtctcagccagtaaaggaattcgaggatgtacgacacgaaagcatgtga

SEQ ID NO: 503793 - DNA, 174 bp, Stenotrophomonas maltophilia
atgcacgcatccaccgtcctttcagatccgaaagccattgccgcctggatgaaatcctccagcgcaaatgcaaccgccctggatactgtctttgaagccgagtccgatgccatcaaagttgccgcattcagcagtgactgctgtggctcgaacaactacgaagatccccggtaa

SEQ ID NO: 503794 - DNA, 1239 bp, Stenotrophomonas maltophilia
atgtactaccgcatctttggttgcctatcgatggtgatcagcctcgccgccgtggcaccagctgcggcacatactggagaggcgaatggcatacgtgaagacacgctggagcaggtcgtcctgctcagccgccacaacctgcgcgcgccggtggtggcctccggcgcgctcgccaacgcgacacccgagacctggccgcgctgggaggtggcaccgggcgagctgacaaccaagggcggcgtgctggaggtctacatgggccgttacatcggccagtggctgcggcaggcaaagttgctgccggcaacgggctgcccgcagccgagcgacttccacgcgcacgccaacagcctgcagcgcacccaggccaccgcgcagtttttcgttgccggtgcgttcccgggctgccacgtgacggtggaacagcgcatgccgctgggcacgatggatccgttgttcaatccggtgatccacaacggtgatgcggccttccgcgaacgcgcgttgtcggcgatgcaacaggcgcaggccgcatcggatctggcaccggcgttggcggcggtggaggcgatcacccgctacccgcagtcggctgcgtgcgcaggccgcagcgaatgccacctgacgccggccgattccattttcagcgcagagccgggcaaagaaccgcgtacttccggttcgctggccctggccagcgggttggtcgatgccttgttgatggagcactaccaggtaagtggcattcccggcgaaggctggggccgattgaacacggaggaccaatggcaggcgctggcgcaggtccgcaaccgctaccaggacatcctgttcggaacacccgaggtggcgcgtgacgtggctgcgccgcttttggcaagaataaacgggctgttcgaagatccggcgtcaccgaaggtgagcctgctggtcggccacgattccaacatcggttccgtgctggcggcgctgggaatcacggactacacgttgccgggccagtatgagaagacgccgatcggcggcctgctgcagtttgaacgctggcgtgatcgtggggccggcgaagtgcgtttccgcctggcctacgtctacccgaccaccgcgcaactgcgagatgcgctgccgttgagcgatgtacagccacccggtcgggtggagctcgcgcttcccgggtgtgggcagaatggatgcagtgacgtgcagttcgagcgcgtactgcatcgcgcggtgaattga

SEQ ID NO: 503795 - DNA, 591 bp, Stenotrophomonas maltophilia
atggacaagacctacgacgccgcctacttccaacgctggtaccgccgtgccgacatcggtggcagcgcccgcctggcacgcaaggtggcattggctgtggccagcgccgagtactacctggagcgaccgatccgcagcgtgctggatatcggctgcggcgaaggcgcctggcgcgcgccgctgctgaagctgcgtccgaaggtcgaatacctcggcttcgacagcagcgagtacgctgtgcgccgctacggccgcacccgcaacctgcacctggcccgcttcggtgatttcgcctggctgcggccctgcgccccggtcgacctgctgatctgctcggacgtgatgcactacgtgcccgaccgtgagctgcgtgccggactggccggcgtggcggagctgaccggcggcgtggccttcctggagaccttcgccgccgaggacgcgttcgagggcgaccacgatggtttccaggcccgcccggcgcgctggtaccggcggacgctggcccggcacggtctgcagccggtagggtcgcattgctggctcggccccgccctggcaggcgatgcggccgcgctggagcggatgtga

SEQ ID NO: 503796 - DNA, 456 bp, Stenotrophomonas maltophilia
atgcagagctactactgggtcaagaccttccacatcgtgttcgtggtggcgtggatggccacggtgttctacctgccgcgcatcctggtgaatctggccgagaccgcaggccaaccggcggtgaccgagcgcctgcagctgatgggcctgcgcctgtaccgtttcggccactcgatgttcggcctggcgttcctgctgggcctggtgctgtggctgggctacaaggtcattccggatttcccgacgatggttgcctcgggcggtgccggttggctgcatgccaagctggggctggtggtgctgctgctggtgtacttcagctggatcgggcgcctgctcaagggcgtggccaagggcagggcgctgccgtcgtcgcgcgcgctgcgctggatcaatgagatcccgctgctggccttcatcccgatcgtgtggctggtgctggccaagccattctga

SEQ ID NO: 503797 - DNA, 960 bp, Stenotrophomonas maltophilia
atgaatccgaactacctcgacttcgagcaacccatcgccgacctggaagccaagatccaggaactgcgcaacgccagtgccgggccggcggtcaatgtcgaggcggaagtgcacgcgctgcaggacaagctgcgcatgcgcaccgcgcagatcttccgcaacctgacctcgtggcaggtgctgcagctggcccgtcatccgtcgcgcccgtacaccgcagactacctccgcgtcatgttcgatgagttccaggagctggccggcgaccgtgccttcgccgacgacaaggcgatcatgggtggcctggcacgcatcaatggccgttcggtgatggtgatcggccaccagaagggccgtgacaccaaggaaaagatcaagcgcaacttcggcatgcccaagccggagggctaccgcaaggccctgcgcctgatgaagatggccgagcgcttcggcctgccggtgctgaccctgatcgacaccgccggcgcctggccgggcatcgatgccgaatcgcgtggccagtccgaggcgatcgcacgcaacctgatcgagatggccgaactgaaggtgccgatcatctgcaccgtgatcggtgaaggtggctccggcggcgcgctggcgctgggcgtgggcgaccgcacggtgatgctggagtactcggtgtactcgaccatcaccccggaaggctgcgcctcgatcctgtggaaggatgccggcaaggccaaggatgccgccgaacagctgggcctgaccgccccgcgcctgaagagcctgggcctggtcgacaaggtcgtgcgcgagccgaccggcggcgcccaccgcaacccgacgcagatggccaagcgcctgaaggcggtgctgctgaacgagctggacgcgctggacaagctgtccaccgagcagctgctggaacagcgctacgcccgcctgcgcagctacggcacgtacgaagcggcctga

SEQ ID NO: 503798 - DNA, 870 bp, Stenotrophomonas maltophilia
atgaagaccctgctgttcccgttcgccgccgcgctggccctggccgcctgttcgccctcgaaggtcgagttccagatcgacaacccgaccgacacgccgctggcactgagcatcgatggcaaggacctgccggtggccgcacagggctcgcgcccgatttcgctggccgtcggcgagcatcgcctgcacaccgaaaagctcggcgacgtgcgcttcatcgtctacgtcgacggtcgtggcgggctgatcaacccgaccctgagcgagtacgtggtcgcccgcgagatctatgtcaccgacgagagcaagctgaagaacttcggcaccggcaaggccggcatcgagctgggcggcgtcgacttcgaaggcccgttcgagaagcgccacgacctgttcatcgagaagacctggacctacggcgtgcgcgagcccttcccgaaggaaaaggtggtggcccacgtcgacgccagcggtggccagatcgtggccaaggtgttcaccgcgccggacttcatcgcttacgtggaagaaggcatgggcgagcccggtgcgttcaagcgcgagcagccggccggctacgtggccccggcgttcagcctggaaccggccccggccacccttccggcgctggtgccggccttcgaggcgcatgccgtgccgctgcgtgaggtctatgcgcgctggctgaaggccaccaccgccgatgaacagaaggccctgcgcaagcaggacttcgccgcgcagatggccttcacctcggccaccgccaccctgggcagcgggctgggccgggaggccaacgaggcctacaacgacttcgtttcccagcgcagccagctgatgggccgcagcgctctggtggtgccctga

SEQ ID NO: 503799 - DNA, 3591 bp, Stenotrophomonas maltophilia
atgtccaactcccgcttcgtacatctccacgtccacaccgagttctcgctggcggactcgaccatccgcgtgccggccaagcccgaccaggcggacccgaagaaggccaagcaggccaacctgctgtcgcgctcggtcgagctcggcctgcccgcgctggcggtgaccgacctcaacaacctgttcgccctggtcaagttctacaaggccgccgaaggcgtgggcatcaagccgatcgcgggcgccgacgtactgatcgccgaggaaggccaggacccgtggcggatgaccctgctgtgccgcgatcgcgaaggctacctgagcctgtcgcggctgctgacccgcgcctggatggaaggtcatcgtccggaaggcggcgtggccgtgcacccggactggttgaaggccggcaacgccaacctgttcgcgctggccggccggcagagcctggccgggcgcctggcgttggacggcaagcatgaactggccgagcagcagctggccgactggcagcgcgtgttcggcgatggcctgcacctggagctgacccgcaccggccgcgagggcgaggaaaccttcaaccagttcgcgctgatggcggccggccagcgtggcctgccggtggtggccagcaacgacgtacgcttcctgtcgccgacggatttcagcgcgcacgaagcgcgcgtgtgcatttccaccggccgcgtgctggacgaccccaagcgcccgcgcgaatacagcgaccagcagtacctgaagtctgccgaggagatgtgcgcgctgttcgccgacatccccgatgcgatcgacaacacgctggcgctggccgagcgctgcaacatcgagatgcggctgggcacctacttcctgcccaactacccggtgccggacgacgagaccctggacacctggatccagaagatgtcgcgcgatggcctggaagagcgcctggagaagaatccactggcgccgggcaagacccgcgaagagtatttcgagcgcctggagttcgagctcaacaccatcatcaagatgggcttcccgggctacttcctgatcgtggccgacttcatccagtggggcaagaaccagggaattccgatcggccccggccgtggttcgggtgccggttcgctggtggcctgggcgctgaagatcaccgatctggatccgctgccgtacaacctgctgttcgagcgcttcctcaatccggaacgcgtgtcgatgcccgacttcgacatcgacttctgcatggaccgccgcgacgaggtgatcgactacgtcgcgcgcaagtacgggcgcgagcgcgtcagccagatcatcacctacggcaccatggccgccaaggcggtggtgcgcgactccggccgcgtgctcggtttcccgtacggcctggtcgacggcgtctccaagctgatcccgaacatcctcggcatccacctgaaggatgcgctgggcaagggcaaggaaggcccgagctcggaaatggcgtcggccgaactgatccagcgctacgagaccgaggacgatgtccgcgacctgatcgatctggcgctgcagctggaagacctgacccgcaacgccggcaagcacgccggtggcgtggtgatcgggcccgaaccgctgagcgagttctgcccgctgtacgccgaacacgacgagaacggactcggcaagaacccggtcacccagttcgacaagaacgacgtggaagaagtgggcctggtgaagttcgacttcctcggcctgcgcacgctgaccatcatcgactgggcggtgaaggcgatcaacaagcgccatgagcgcgccggcatcccgccggtggacatcgccgcgatcccgctcgacgacacgcccacctacaaggacatcttcgccaacggcaataccggcgcggtgttccagttcgaatcctcgggcatgcgccgcctgctgaaggacgcacgccccgaccgcttcgaagacctgatcgcgctggtgtcgctgtaccgacccggcccgatggacctgattccgtccttcaacgcgcgtaagcacggccaggaagaaatcatctatcccgatccgcgcaccgaagcgatcctgaaggacacctacggcatcatggtgtaccaggagcaggtgatgcagatggcgcagatcgtcggcggctactcgctgggcggcgccgacctgctgcgccgcgcgatgggcaagaaggtgccggccgaaatggccaagcaccgcgagatcttccgcgaaggtgcggccaaggacggtgtggacgaagccaaggccgatgcgatcttcgacctgatggagaagttcgccggttacggcttcaacaagtcgcacgccgctgcctatgcactggtcagctaccagaccgcgtggctgaagcgccactacccggctgagttcatggcggccacgctgtcctcggacctggacaataccgagaaggtggtcggcttcctggacgaagtgcgcaacctcggcctgaccgtgctgccgccgaaggtgaaccactcggccttcatgttcgaagccgtcaccccggacaccatccagtacggtctgggcgcgatcaagggcgtcggccagggtgcctgcgaagcggtggtggacgagcgcctgaagggtggcgactacaaggacctgctcgacttctgcacccgcgtcggatcggccaagctcaaccggcgcacgctggaagcgatgatcaactgcggcgcactggatgagctcgggcataaccgcgcctcgctgatgctgcagctgccggaagtgatcaaggccaccgaccagatggcgcgcgaacgtgcgtccgggcagaactcgctgttcggtggccccgacccgagcgcgaccacgatccagctggacctgcccgaagccgaggaatggccgctgctgcagcgcctgaacggcgagcgcgacacgctgggcttctacctcagcggccacccgttcgatccctggcgcgacgacgtgcgcgacctggtcggcaacgacctgggctcggtggagaagatctggagcgccaacagcggtggcggtggcggcggcgaaaagcgctggcgcccggaagtacagaccgtgctggccggccaggtggtcggcgtgcgccgcaagggtgagagccagatcttcatccagctcgaggacggccgtggccgcgtcgagtgcagcgcgttctccgacgcgatggccgagttcggccacctgatgaccaaggaccgcatcctggtggtcaagggtggcctgcgcgaggacgaattcaatggtggcttcgcgctgcgcatccgccagtgctgggacttcgacgaagtctgcgccaactacgccacccggctgtcgctgcgcctggacctgcgccagcagcgcccggtctgggaacgcattgatgcgctgctcgaccgccatcgccccggccgcacgccgctgcgcctggatctgctgctgaagggtccgcagggcggtgtcgccggcatgctcgatgtgtccgggcagagcgcggtacgcatcgattccaagctgatggaggcgctgcgcgccgacccggccgtgcgcaccctgaaggtgcgctacagcccgccgtgggccagctga

SEQ ID NO: 503800 - DNA, 669 bp, Stenotrophomonas maltophilia
atgagccgccgctacgccgcagcggccagcctgaccctgttcgatggcgcggcggtggtcgagccggagcgcctggtcgccggcgtcgacgaagccggtcgtggcccgctggccgggccggtcgcggtggcggccgtggtgttcgacccggcacggccgcgcatcaacggcctggacgattccaagcagctgaccgcggcgcgccgcgagcagctgcatgaccgcatcatcgagcgcgccctggcctggcatgtggtgctggtggacgtggacaccatcgaccgtctgaacatctaccaggccaccctgcagggcatgcgcgacgtggtcgcagcggtcgcccacgtggccggcttcgcgcgcatcgatggcaacgtggtgcccaagggtctggtactgccggcgcaggcgctggtcggcggcgatggcatcgaccgcgcgatcatggccgcctcgatcctggccaaggtctcgcgcgaccgctacatgcaggaggtgcatgcccgccatccgcagtacggcttcgagcagcacaagggctacggcaccccggcccacctggccgccctgcgcgagcacggcccctgcgtggagcaccggcgcagcttcgccccggtgcgcgagtgcctggaaacagccccagcccccgcgatcacagccatcgcttga

SEQ ID NO: 503801 - DNA, 1260 bp, Stenotrophomonas maltophilia
atgagcagcacgaccggccaggcgccggccggcgccgccgtgattccgctggcctcgatggccggcagcgtccccgcgcagcgggtgctcagcgagcgcccgttgcggatcgcactggtggccggtgaggcctccggtgatctgctgggtgcgggcctggtgcgcgagctgaaggcacgctttccgaatgccgaattcgccggcatcggtggcgatgccatgcgcagcgccggctgcctgacctggcacgatgccagcgagctggcggtgatgggcctgaccgaagtactgcgccacctgccacgcctgctcaaactgcgttccgcgtttcgccagcgtgcactggaatggcagccggacgtgttcatcggcatcgacgcgcccgacttcaacctgggcatcgaacgctggctgaagcagcgcggcgtgcgcaccgtgcattacgtgagcccctcggtctgggcctggcgcgagaagcgcgccgagaagatcggcagcagcgccgacctggtgctgtgcctgttcccgatggaacccccgatctatgccaagcacggcatcgacgcacgcttcgttggccatccgatggccgatgacatccccctgcagggcaaccgcgaggaagcgcgcgcagcgcttggcctgccgacgtcggccaaggtgctggcggtgttgccaggcagccgcctgggcgaaatctcgcgcctcggtgaacccttcttcgaagccgcctggcaggtctccgagcgcatccccggcctgcacgtggtggtgcctgccgccaaccccgcatgcaagcggctgatcgaagagcagctgtcgcgctcggcgctgccggtcgcgtactcgcatgtgctcgacggccaggcgcgcaacgccatgatcgcggccgacgtggtggtgctggcgtccggtaccgcgaccctggaggccatgctggtgaagcggccgatggtggtcggctaccgtgtcaacgagctgacctaccgtctggtcaaggcattcggcctgatcaaggtcgaccgctttgccctgcccaacatcctggccggccaggacctggcaccggagctgatgcagcatgactgcacgccggacaagctggctgcggccatccagcaatggttcgaccacccgcagcgggtgaccgacctgcaggacacctatgcccgcctgcatgagcgcctgcgccgcaatgcgtcggcacgtgccgccgacgccgtcggcgagctgctgatgcgcgaccaggcccaggcatga

SEQ ID NO: 503802 - DNA, 792 bp, Stenotrophomonas maltophilia
atgactgacaacgcaccgcggatccacccgaccgccgtcatcgatccggccgcgcgcctggccgatgacgtccaggtgggcgcgttcaccctgatcggtgccgatgtggaaatcggtgccggcacggtgatcggcccccactgcagcatccacggcccgacgaagatcggccgcgacaaccgcttcatcggccacgcagccgtcggtggcgaaccgcaggacaagaagtatgcaggggagcgcaccgagctggtgatcggcgaccgcaatgtgttccgcgagttcgtcacgctgaaccgtggcaccggcggcggcggcggcatcaccaccatcggcgacgacaactggatgctggcctacacgcacgtggcgcatgactgccatgtcggcaacttctgcgtgttctccaacaacaccaccctggccggccacgtgaccgtgggtgactacgtgatcatcagcggcttcgccggggcccaccagttctgccgcatcggtgcgcatgccttcctcggcatgggcgcgctgaccaatggcgatgtaccgccgttcaccatggtcggcaccgattcgttgggccgcccgcgcggcatcaacagcgaaggcctgaaacgccgcggcttcgacgccgagcgcatttccgccatcaagcgtgcctaccgcacgctgtacgtggcgggcctgccactggccgaagccaaggtgcagctgaccgaacaggcgcgcgacagcgatgacgtgaaggccatgctggacttcatcgagcacgccgagaggcccttgctgcgatga

SEQ ID NO: 503803 - DNA, 459 bp, Stenotrophomonas maltophilia
atgaacgacacgctgcagcttccgatcgacgtctgccagatccaggaactgctcccgcaccgctacccgttcctgctggtggaccgggtgcttgagctcgacatcgacgccaagcgcatccttgcgcagaagaacgtcagcatcaacgagccgttcttccagggccacttcccgggccgcccgatcatgcccggcgtactgatcatcgaagcgctggcgcaggccggtggcgtgatgacccagctcacgctcggccgtgactcgcagtccaagctgttctacatggtcaaggtggaaaacgcccgcttcaacaagcaggtcgttcccggcgacgtgctgatgctggatgtgcagatgaagcgcctgatccgcaacatgggctggtactacggcgaagccaaggtcaacggtgaagtcgttgcctcggccgaagtcatgtgcgccggcgccaagggctga

SEQ ID NO: 503804 - DNA, 1023 bp, Stenotrophomonas maltophilia
gtgaatactcccacctacaccgcccagcaactcgccgagcagttcggcctgcaggtccacggcgaccccgccaccgccatccatggcgtggccaccctcgcccatgccggtcctggccagctgaccttcctcgccaacccgcgctaccgcgcccagctggccgacagccaggcctcgctggtagtcctgcgtgccgacgacgccgaggccgcccccggcgccgcgctcgtggccaaggacccgtacaccaccttcgccaagatcgccgcgctgttcgacatcgcgccgacgcgcccgccgggcatccaccccagcgccgtcatcgatcccagcgcgcaggtcgccgccagcgcgcatatcggcccgttcgtctccgtcggcgcacgcagcgtggtcggcgaaaactgcatcatcggcaccggcagcgtgatcggcgaagactgcagcctggacaacggctgcgagctgatcgcgcgggtcaccctggtcacccgggtcaagctcggcaagcgggttcgtgtgcatcccggtgccgtgctcggcgccgatggcttcggcctggccatggacgccggcaagtggatcaaggtgccgcagctcggcggtgtgcgcatcggcgatgactgcgagatcggcgccaacacctgcgtcgaccgtggtgcgctggaagacaccgtgctggacgaagacgtgcgcctggacaacctggtgcagatcgcgcacaacgtgcagatcggtgcgcactcggccatcgccggctgcaccggcatcgccggcagcgccaagatcggccgctactgcctgctcggcggccacgtcggcgtggtcggccacctcgagatctgcgacaaggtcgtgatcaccggcaagtccgtggtccgcaattccatccatgagccgggcgagtactcgtccggcaccccgttgaccgacaaccgcacgtggcgcaagaacgccgcgcgcttcaagcagctggacgcattggctcgccgcgtcctggctgctggcaaggagaaagaatga

SEQ ID NO: 503805 - DNA, 2364 bp, Stenotrophomonas maltophilia
atgacgcgactccccaatcgccgcctgctggccctcgccctcgccgccgtcaccggcgctcccgccctggcccaggcagccgagcccttcactgtcagcgacatccgcgtggatggcctgcagcgcatcagctcgggcacggtattcacctacctgccggtggagcgtggcgagacggtcaccgacaacaaggtcggcgagaccatccgcgccctgtacaagaccggcttcttcgaagacgtgcagctggaccgccagggcagcatcctggtggtgaccgtcaaggaacgcccggcgatcaacaagctgaccgtgaccggcaacaaggacatcaagtccgagcagctgctcaagggcctgtccgacatcggcctgaccgagggcggcaccttcgatcgcctgagcctggaccgcgtgacccaggaactgcgccgccagtacaacgaccgcggcaagtacaacgtcgagatcaccccgacggtgagcccgctggaccgcaaccgcgtggacatcgcgatcgccatcaaggaaggcaaggcggccaagatccgtcacgtcaacctggtcggcaccgagaagttcgagagcaaggacatcctggagacctgggagtccaaggagcacaactgggcatcgtggtaccgccgtgacgaccagtactccaaggaaaagctgtccggcgacctggaaaagctcaattcctggtacctcgaccgcggctatgtcgacttcagcattgattcgacccaggtgtcgatcagccccgacaagcgcgacatgttcctcaccgccggcgtgaccgaaggtgcgcagtacaagatctccgagatcaaggtcagcggcgacacgatccttccgcaggaggacgtcgagcgcatggtgatccagaagtccggcgacacgttctcgcgtgcgctgctggaattcagctcggacaccatcaccaactcgctgtccaacatcggctacgcgttcgccaaggtgaacccgatcccgaccaccaaccgccccgagcagaccgtggcgatcaacatgcaggtcgtgcccggcccgcgcgtgtcggtgcgtcgcatcctgttccgtggcaacacgcgtacgtccgacgaagtgatgcgtcgcgaaatgcgccagttcgagaacagctggtactcgcaggccgcgatcgaccgctccaagatccgcctgcagcgcctgggctacttcgagtcggtggacgttgaaaccccggccgtgagcggcagcaacgaccaggtcgacgtcgtctacaacgtcaaggaaaccacgtccggcagcttcgtgttcggcctgggctactcgcagtcctacggcatgaccacctcggtgcagctgtcgcagaacaacttcctcggcggcggcaaccgcgtgtcggtcgaagcctcgcgcagcagctacctgcagcgctacggcttcagctacaccaacccgtacttcaccgatgacggcgtgtcgctgggctacaacctgtcctggcgcgaactggactactccgacttcaacaccgcgcagtacaacagcaccaatggttcggcgcaggtggtgttcggcgtgccgatcaccgagaccgataccgtctcgctgatgttcggcatcgacagcaaccagatcaccacctaccagggctcgaccccgcagtcgatcatcgactacatcaacgccgtcggtaagcgcacgttccatgcatggcgcaccgagctgggctgggcgcgtgactcgcgcaacgactacttcatgccgacccgcggtacctaccagcgcatcggcctggaaaccacgctgccgggttcgaccatcgagtactacaagctgaactaccagatcagcaagtactggccgatcatgccgtcgctggtgatcaacacccgtgccgaagtgggctacggcgatgcctatggcaacgactacacccgcacgctgaccaacccggacggcaccacccgtacggtgaccgccagcggcctgccgttcttcgagaacttctacgccggcggtaccaactcggtgcgcggcttcgaagacaacaccctcggcccgcgcgaagtcaccaatggctacccagaaggccagccgctgggtggttcgctgaagaccgtcggttcggtcgaagcctacttcccgcgcctgttcgacagcccgtcggcacgcgtgtccgccttcgtcgacttcggtaacgtctacaacggcaccaagaacttcaaggccaacgaactgcgcgtgtccaccggtgtggccctgctgtggcgcgccccggtcggcccgatctcgatcagctacgccttcccgctgaagaaggaagacgatgacaagatcgaacgtctgcaattcacgttcggtggccagttctga

SEQ ID NO: 503806 - DNA, 1359 bp, Stenotrophomonas maltophilia
atgactgacttcatcggatcggtctggtggatgattgtcagcctcgggctgctggtcacgttccacgagttcgggcattactgggtcgggcgcctgtgcggggtcaagatcctgcgcttctcggtcggcttcggccggccgctgtggtcgcgccgggacaggcacggcaccgagttcgccatcgccgccatcccgctgggcggttatgtgaagttcctggacgagcgcgaggtcgaagtgcacccgcacgagcgcggccaggccttcaaccacaagaccgtctggcagcgcatcgccatcgtcgccgccggaccgatcgccaacctgctgctgtgcatcctgctgctgtgggcgatgttcgtgatcggcaagcaggattattcgccgaccatcggccgtgtcagcggcatcgccgccagcgccggcctgaccagcggcgaccgcgtgctgcgcgtggacgagcgcccggtggtcaccctcggcgaggccagcatggcgctgaccgccgccgcgatggaccgccgcgacgtgaagctggaagtgctggacccggccgaccaggtgcgcgtgcgcagcctgccgctgtcgcagctgccccccggcttcgatgaacggcgcgtgccgatcctggctggcctgtactggcagtcgtggctgcaaccggcgctggtcgagtcgctcaccgcggactccgtggtggccgggcagctgcagccgggcgatctgatcgtagcgatcgacggccagcgcatcgacggcgccgaccaggtcatcggcgagatccagacgctgggccgcgccggcggcccgggcatgatcgaggtcctgcggggcggcgagcgcctggcgctggaagtcaccccgcgccagggcaaggattcaaagggcgagccgatctggcagatcggcgtgcagttcccgacctcgttcagccctccctacgacaccctgctgcgctatggcccgctcgacgcggtcaccgtggccgtgcgcgaaaccggccgcctggcggccgattcgctgggcatgatgggccgcatcgtcaccggcaaagcctcgctgcagaacgtttccgggcccgtcaccatcgcccgggtagccaacatctcggccaaacgcggcctggactggttcctgcagttccttgccctgctgtcactcagcctgtgcatcatcaacctgttgccgatcccgatcttggacggcggccacctgctgtattaccttatcgagttggtcaagggcagcccgctgagcgagcgtgccatcgccgccggccagtacatcggcctggcgttgctggccgggctgatggggttggcgttctacaacgacatcctcggcctggtcccgcgatga

SEQ ID NO: 503807 - DNA, 1191 bp, Stenotrophomonas maltophilia
atgaatgctgtcgcagacctgcgccgggtcgccgtattcggcgccaccggctcgatcggtgcctccacgctggacgtgatcgcccgccacccgcagcgctaccaggccaccgtgctggccgccggtcgtcaggtgcaggcgttgctggcactgtgccgccagcaccggcccgcgcacgcggtgatcgccgacgaatcgctgttcgctgagctgcgcgatggcctgcgcgatgccggactggccaccgaggcgcatgccggccatgccgcgctggaccagctggccgccagcgatgcctgcgacaccgtggtcgccgccatcgtcggtgcggccgggctgtcttccaacctggccgccgccgccgcgggcaagcgcatcctgctggccaacaaggaatcgctggtgctggccggtgagctgctgacccgcaccgcagaacgcgccggcgccgagatcatcccgatcgacagcgaacacagcgcgatcttccagtgcctgcgctcgcgcgatgccagcgtggatggcgccggcgtgcgccgcatcctgctgaccgcctccggcggcccgttccgtggccgcagccgcgccgaactggcccaggtcaccccggcccaggccgttgcccacccgaagtggtcgatggggccgaagatctcggtcgattcggcgacgttgatgaacaagggcctggaagtgatcgaggcccaccacctgttcggcatccccggtgagcgcatcgaagtgctggtgcacccgcagagcctggtccactcgctggtcgagttcgtggacggctcgactctggcgcagatgggcctgccggacatgcgcaccacactggccgttggcctgggctggccacaacgcattgaatcgggcgtatccgggctggatctgctggcccagggccggctcgatttcgaggccccggacaccgacgccttcccctgcctggccctggcctggcaggcgatgcaggccggcggcaccgccccggcggtgctgaacgctgccaatgaagaggcggtttcagcgtttcttcagggccggatcggtttcctgaccatcccggagctggttgctaacgctctttcaacactgccgacccagccagccgatacactggaggtcctgttgtccgccgaccagcgggcacgccagctgaccctgaacgccatcgacgccgcctga

SEQ ID NO: 503808 - DNA, 837 bp, Stenotrophomonas maltophilia
atgaccaagacccgagtccttgccgcgctgatcatggcgccggtcgccattgccgcgatcctgctgctgccgacccaatggctggcagcggcggccgctgcggtgctgctgatcggcctgtgggagtggctgaagctggccggcatcgaagacaccctggcgcgcaccgtgctgctggtactgaacctgctgctgatggtgctgctggtgtgggccgatggcagcacgctggtgctgttccagatcaccacattggccggtgttgcctggtggctggcggcgctggtctggctgcgcttcttcaatttcggcgcgcaaccgtcggcgccctcgcgcatcgtgaagatgctggccggtacgctggccatcgttccggcctgggccgcgctcgtgctgatccatgcgggcggcgatccgccgggcaagcagggccacctgtggctgctggctgcgctggcactggtctgggcggccgattcgggcgcctatttcgccggccgtcacttcggcaagcacaagctggccccgcgcatcagccccaacaagacctgggaaggcctgttcggcggcctgctggccggtgtcgccgtggccgtcggcctgggctggctggccggcatcgataccgcacacctgccgggcctgctgatcacttcggtggtggccgtgttcgcctcggtgctgggtgatctgttcgaaagcctgatcaagcgccacgcgggcgccaaggactcgggccacctgattccgggccatggtggcgtactcgaccgtgtcgacggcgttctggctgcagtgccggtgttcgcactcggcaaggaaatcttcgggttctga

SEQ ID NO: 503809 - DNA, 768 bp, Stenotrophomonas maltophilia
atgccttcagtcccgcctccgttgccggccgccctgccccgccacattgccatcatcatggatggcaatggacgctgggcacagcagcgccgtcgtccgcgcgtgatcggccaccgcgccggcgcgcgtgcggtcaaccgcaccatcgagcgctgccttgagctgggcattccggcgctgaccctgttcgcgttttccagcgagaactggggccgaccgcaggaagaagtcgatgcgttgatgaagctgttcctcggcgcgctcgaccgcgaagtggacgagctgcatcggcgtggcgtgcgcgtgcgcttcatcggcgagcgcgaacgcttcggtgccgggctggtcagccgcatgcagctggccgagcagcgcaccgcagacaacaccaccctgaccctgtcgatcgccgccagctacggtggccgccaggacatcgcccgtgccgcgcgcgcgctggccgctgaagtcgccgccggccgcctgctgcccgaacagatcgacgaatcgctgctgggcagccaggtcgccctggccgacctgccgccaccggacctgttcatccgcaccggtggcgacacccgcatcagcaacttcctgctgtggcagctggcgtacaccgagctgtggttcaccgaggcgctgtggccagacttcgatcccgccctgctgcagcaggcgctggacgcctacggcagccgtgagcgtcgtttcggcctgaccagcgcccagatcgccgcactggccaccgagacttccagcccatga

SEQ ID NO: 503810 - DNA, 555 bp, Stenotrophomonas maltophilia
atgctcaacgacatcaagaacaacgcgcagacgcgcatggccaagagcatcgacgctctgaagcacaccctcacctcgatccgcaccggccgcgccaccccggccctgctggaccgcgtcacggtcagcgcctatggcaacgccagcaccccgctgaaccaggtcgcatcgatctccaacgccgacgcccactcgctgctggtcacgccgttcgacaagagcatgatcaaggagatcgaaaagggtctctacaacgccgagttcaccccgaacaccctgggcaccgcgatccgcatcaacatgccgccgccgaccgaagagcgccgcaaggagctggccaagcaggtgcagaaggaaggcgaaggcgccaagatcgcgatccgcaacatccgtcaggacgcgaacaaggaaatcgccaagctggtcaaggacaaggcgatcagcgaagacgagaagaagcgcggtgaggacgacatccagaagttgaccgacaccaacatcaaggacgtcgacaaggtcgttgccgacaaggaaaaagaactgctgtcggtctga

SEQ ID NO: 503811 - DNA, 729 bp, Stenotrophomonas maltophilia
atgtccaagctcgcctatcgccgcatccttctgaaactgtccggggaggcgctgatgggagatgaggactacggcatcgacccgaagatcatcaatcgcctggcccgtgaggtcatcgaagcccagcaggccggtgccgaagtggcgctggtgatcggcggcggcaacatcttccgcggcgccggcctggccgctggcggcatggaccgggtcaccggcgaccagatgggcatgctggccacggtcatcaacgccctggccatgcaggacgccctggaaaagctgggcgccaaggcccgcgtgatgagcgcgatcaagatcaacgacgtgtgcgaggactacatccgccgccgcgccatccgccacctggaaaagggccgcctggtgattttcgccgccggcgtcggcagcccgttcttcaccaccgactccggcgccgcgctgcgtgcgatcgagatcggtgccgacctgctgctgaaggccaccaaggtcgatggcgtgtacgacaaggacccgaacaagcacagcgacgcggtccgtttcgacagcctgagctacgacgaagtgatccgccgcggcctggaagtgatggataccgcggccttcgcactggcccgcgacagcgacctgccgatgcgcgtgttcgacatgggccagccgggcgagctgctgaagatcctcagcggcgcgaacatcggcaccctggtccaaggccgcgacccggcctga

SEQ ID NO: 503812 - DNA, 1539 bp, Stenotrophomonas maltophilia
atgcctcccgagctgacagctgccctggcgctctgccgcaacctgccctcgccacccggtattgccctgcgcatcatcgagctggcccaggacccggaagcggacatcgccaccgccgccgacatcatcgccatcgacatggcgctgagcgctcgcatgctgcgcatcgccaattcgccgctgtacgccagccgccgccgcatcgagaacctcggccaggcgctgaccatgctcggcctgaatgccacgatcagcctcgccctcggcttcaccgtcacccagggcctgaccggtggcggcggtgccgaccacgacctgcgccagcgcgcgtggaagcgcagcattctcagcgccctggccgccagccagctgggccaggcgcgcggcctgcgccggctggaggaactgatgctggccgggctgctgcaggacctgggcgtgctgtgcctggcccaggccgaatcggagcgctacctgccactgctgcgcgaagcccgtgacaataccgatctggtcgcacgcgagcgcgaggaactgggctgcagccacgccgatgtcggcgcctgggtggccgaacagtggggcctgccgcgctacctggtggagagcatcagccacagcgaggacgacgacgctgccgattcgccgttccaggcctgcgtgcagctgtccggcgctgtcgccgacatctggctggacgaagacgccgatgccgcccgcgaacgcgccctgcaccaggtgcatgaccggctggagctcgacagcgcccgtttcgatcaggtgctgacccgtatcagcgatgcccttccggacatcgccagcctgttcgaggccggcctgaactcgccctcgcgggtccgggagctgatcgaccacgcgcaggaactggccaccctgcgcaacctgcgcgagctgcaggatgccgatcaggcacgccgccgcgccgacgaattcgaggcgcgggccaagcgcctggccgaccaggcccaccgcgacgccctgaccggcgtgctcaaccgccgccagctggaggcggtgctggaacaggagttcctgcgcgccgggcgccagggctggccgctgtcggtggccttcatcgacctggacgacttcaagaaaatcaatgatgcccacggccacctgaccggcgacgaggtgctgcgcgcctttgccggcaagctgcagggccagctgcgcaacagcgacaccgtggcccgcttcggtggcgaggaattcgtcgcgctgctgcccaacaccagtgaatcggtggcgctggacgtgatccggcgtgtgctggccaacatcgtcgccacgccgatggccgagctggagggaggcccgctgttcgtcaccttctccgccggcgtggccacccagggcggctacgaacgctttgccgacgtgcaggacctgctgcgcgcagccgacgatgtgctgtaccgctcgaagaacctgggccgcaaccgggtgatcgcccgctcccccggcgccctcggccacgacgagctttcagccaccgccggcgccgagctgggctga

SEQ ID NO: 503813 - DNA, 876 bp, Stenotrophomonas maltophilia
gtggaaatcactgcttccctggtcaaggaactgcgcgagcgcaccggcgccggcatgatggaatgcaagaaggctctcaccgaagccaacggcgacatcaacgctgctgctgaagccatgcgcaagtccggcgctgccaaggccgacaagaaggctgaccgcgtggccgccgaaggccgtctgggcctggcccaggatggcggcaaggccgtgctggtcgaagtcaactcggaaaccgacttcgtcgccaacgatgacaacttcaagtccttcgtcaatgccgtcgccgctgccgccctggcatcgggcgccaacgacgtcgaagccgtgaaggctgccaagctggccgatggccgcaccgttgaagaagcccgcgccaccgccgtgcagaccctgggtgaaaacatccagatccgtcgcatggtgaaggttgatggcaacaacaccatcggcgcctacgtccacaccaacggcaaggttggcgtgctggtcgacctggtcggcggcgacgtcgagctggcccgtggcctggccatgcacgtggcagccctgaagccgccgcacaacaaggctgcggacgtcccggccgagttcgtcgagaaggaaaaggaaatcgagctggccaagatgtccgaaaaggacaaggccaagccggccgagatcctggaaaagatcatcagcggcaagatcaacaagatcgtcagcgacgtgaccctgtacggccagacctacgtgctgggcgacaccaccgtcgagcaggtggtcaaggccgctggcgccgacgtggctggcttcaagctgctgatcgtcggcgaaggcatcgagaaggtggtggaagactacgccgctgaagttgccaaggcgatgcaggtctga

SEQ ID NO: 503814 - DNA, 807 bp, Stenotrophomonas maltophilia
atgccccaggtcaccatgcgtcagatgctggaagccggcgtccacttcggccaccagacccgctactggaacccgaagatggctccgtacatcttcggcgcccgcggcaagatccacatcatcaacctggaaaagaccgtcccgctgttcaacgatgcgatgaacttcatctcgtcggttgcccagaagcgcggcaccgtcctgttcctgggcaccaagcgcagcgcccgcgaaaccatcaaggaagaagccgagcgttgcggcatgccgttcatgaaccagcgttggctgggcggcaccctgaccaacttccgtaccgtcaagcagtcggttgcccgcctgaaggaactggaagccggtgaaaccgacggcaccttcgagaagctggtcaagcacgaagtgctgggcctgcgtcgcgagcgcgacaagctggaagcctcgctgggcggcatcaaggacatgaaccgtctgccggacgccatcttcgtgatcgacatcggccacgaagacatcgcgatcaaggaagccaagaagctgggcatcccggtcatcgccgtggtcgacaccaactacaacccggaactggtggactacgccatcccgggcaacgacgacgccatccgcgctgtgcagctgtacgcccgcgccgctgccgacgccgtgctggaaggcaaggctgctgctccgcacgccgcttcggtgcgtgaggaagagttcgccgaagccgctgctgaaggcgaagagaagccggcccgccgcgctccggccaagaaggctgccaagaagggcgacgacgcccaggcctga

SEQ ID NO: 503815 - DNA, 699 bp, Stenotrophomonas maltophilia; identical to SEQ ID NO: 503768

SEQ ID NO: 503816 - DNA, 219 bp, Stenotrophomonas maltophilia; identical to SEQ ID NO: 503769

SEQ ID NO: 503817 - DNA, 1038 bp, Stenotrophomonas maltophilia
atgagagtgctgctgctcggcatgctgctgttcgccggcctgctcgcggcactaccggcccaggcgacagcggtctgcacggcaaccgcgaacccgaccctgccgttcggcaacatcaacagcaacgctcccggccctacggcggcgacgctgaacatcacggtgacctgtaccaccgccgcactgagcctgctggccaccaccggcgtccgcgtctgcgtgggtgtcggcgcaggcagtggcggcggcagcagctccaccttccgcacgatgtccacttccaccagcgacaccatgaatttccagctctacaacaacgccagctacggccaggtcaccggcctggtgccacgcggcacgccgccggcgcaggaactgaccatgagctacaacgtgccgctgctgaccggcggcagcggtgcgcagtccgtgcagctgttcgcgcagatccccgccaaccagatcctcgcttcgggtgcttacagcagcaccttcagtggcgccaacgtggtgctcacctgggcctggaacgaagtcctgctcggcaacgccaccgtgccggccgcctgcaacggcggcgcaaccggcaccaacagcgccagtgcggccttcagcttcactgccactgccaacgtgctgccgcaatgcggcagctacgtcaccaccaacatggacttcggcaacgtcaccggcagcatttccgccaacatcgaccggaccgccacgctcacgctgacctgcctgaagaacaccgcctaccagatcagcctcaacaacggccagaacaaccccgccgcctccaccacccggcgcatggccaccaccattggcagcggcacctactacctcccctatgagctgtaccgcgacgccgcgcgcagcctgcgctggggcaataccctcaatgtcgataccgttggcggcaccggaagtggcagcgcgcagcagctgaccatccatggccgggtgccgccggtcaccggccagcccccggccggtacctacaacgatcgggtgcaggtgacgatcacttactga

SEQ ID NO: 503818 - DNA, 2379 bp, Stenotrophomonas maltophilia
atgggcgcgctgcttgctgccctggctcctgcggcgacccaagccgccgatgtgtccggtgcagcggctaccgccaccgccgatgtatcaggcatctccgccgatgcgatgctgccaccgcccacaccgttgaccgccaaccagacgctgtacctggacgtttcgctcaacagcaccccacgcggactgctgcctttcatcgagaaccgtggccgcctgcaggccagccccgacgtactgcgccagctcggcttcaacgcccacggcgatgcaccggtgtacctggaccagatcagcggcgcggtggtgcgctatgacgcacgcctgcagaccctggcgctggacgtgccactggaccagctgaccctgccaaccaccgtgctcagccgcccgcagacacgcgcgcccgcaggcagtgcctcacccggactgctgctcaactacgacgtgtatggcagccgggtggatacgctgggcaacctcagcctgagctccgaactgcgcctgttcggcgtcggcaacggcaccttcgagaacaccgcggtcagccggcgctaccagcagcctggcgaccgtcgctggcgaggggagagcgtgcgcctggatacgcgctggagcctggatttccccgaccaggcgatgacgctggaggtcggcgatttctacagcggcttcgtcgactggacccgtccggtgcgcctgggtggcctgcagatcggtcgcaactacggcctgcagccctatcgcgtgctgacccccacgcccagtttcctcggccaggcggtggtgccgtccacggtcgagctgtacgtcgatggcctgcgccagtacagcggccaggtcccggtcggcccgttccagctggccgcacagccggggatcagcggcaccggcagcgcacaggtggtggtgaccgatgcgttcggccgcatgcagaccctggatttcagcttctatggcacccagcagctgctggccaagggcctgtcggactggtccgccggcatcggccacctgcgtgaggacttcggccagcgctccttcgcctacgacgaccgcaccgtggccagtgccagctggcgcggtggcatcagtgacacgttcaccggcgaggctcatgccgaaggcggtggtggcctggcccaggccggcatcggcggctggtggctgctgggtggcgcgggcgtgttcaacgccgcctatgcgcacagtgactatcacggcctgcagagcgggcaatgggcactgggctacagctggaacaaccgccgactcaacgtcaatctgcgcaccgtgcgcagccatggtgattaccgcgacctgggcgcactgcagggcaacctgccacccagcatcagcgaacaggccacggtcggcgccgacctgctgcggctgggcacgctcagcgccagctacctgcgcctgcgctaccccgatggcgaagacaaccgctacgccagcctgttctggtcgcggacctggagccagcgctggtcagcctacctctcggtgaaccagaacctcgaccagagtgatgaccgcagcatctatctgtcggtaaccgccagcctgggcaacaaccgccaggccagcctgtccagccagcgcaatggcgacagccagacctgggtggccgacgttacccagccggtgcccggcgatggcagtgcaggcggcatcggttggcgcgcgcaggtgcgccacggcgaggacggcagtggcggcctggccgaagtcggcatcctcaatgacgtcggccgctactccttcggggcctcgcgccagggcgggctcaactatgcctacggcagcgccagtggcagcctggtctggatgggcgggcacgcgttcgccacccgcgaggtctccgatgcattcgcggtgatcagcaccaatggtgtcggtggcgtgccggtgcggctggagaaccgcctgatcggcgtcaccgatgatcgtggcctgttgctggtcagcccgctgctgtcctggcagcgcaaccgggtctcgatcgacaccctggacctgcccgaggacatgcgtgccgaccgcatcgaggactgggtgacgccgcgccagcgcgctgggacccacgtgacattccagttgcgctcgcggccctctctgagcctgacgcttcagagcatggacgggcagccgctggaagtgggcagcgaagtgcagttgcccggcggacgccaggccacggtgggctatgacggcctgctgtatctggaagacgtcgctgccggcagcgtgctgtacatcaccaccagccgcggccagtgccgggtgaaggtacccgagcagcccaaggtagtggcgtccggcgcccggccgaagccggcaccgctgccgtgcatcccggaggtggcaccatga

SEQ ID NO: 503819 - DNA, 735 bp, Stenotrophomonas maltophilia
atggccggaccccgcccgtggcgcgccaccggcgtggcgctgctcgtcctgagcctggtattcgccgccccggtcgaagccaccagcctgcaggtcgccccgaccagcctgcagctggaagcgcgccagcgtgccggcgagctttggctgaccaacagtggcacctcgccggtgaagctgcaggttcgggtgttccgctgggtgcagcaggacggccaggagcaactgttgcccaccgatgaactggtggtcaccccgccgatgcaggaactggctgccgggcagcagcagctggtccgggtgatgcgtccggacaggacgccaccgccggcacagcagtactacaggctgattgtcgacgaggtgcccgacctggccacccgcgccgacggcatgcagttcgtgctgcgctattcgataccggtgttcgtgcagcccgccgccggcaagcttgcgccgcagctgcaggcccgcctggtgcagttgcccgatggccgcaacggcgtcgaggtggccaacgcaggcaacagctatgcgcagatcgccgatcttgcgctgggcagccccacgcgcccacgcatcgtgcatcccggactgctgggttacgtgctgcccgggcaggtgatgcgctggccgatcgagcgcacggcgatcgaccgcgacaacgaccagatcacggccaagctcaatggcgagtcggaacagacgccgctgtcgcccccatcggctcgctga

SEQ ID NO: 503820 - DNA, 531 bp, Stenotrophomonas maltophilia
atgcgatccgcgcttcgttccccgcttgcctgggccctggccggggtcctgctgtccggcccggccctggccgcagacaccaccaccttcaatgtcaccctggtggtgaccaaggcctgcacgatcacggctgctgccgccaccaacgttgacttcggcacggcggcctcgaccaccgcgacccccaccctgggtcagggcacagtgaccgcccagtgctcggcactgaccccgtacacgatttcactgaatgcgggtgccaatgccagcaccgccaatgacgtcaccactcgccggatgaagaacaccaacgccgcggtgaccgccaacaactacgtcggctaccagctctaccaggacgccgcgcacaccctggtctggggtgccacctccggcaccaacacccaggctggcatcggcaccggcctggccgtgccctacatcgtctacggccagatcctgaacctgagcaccaacaacccggcgaccggcaactacctggatacggttaccgccacgatcacctattga

SEQ ID NO: 503821 - DNA, 777 bp, Stenotrophomonas maltophilia
atgagcgtgaatctgaaaaccccgcaggaaatcgagatgatgcgaatcgccggccgcatggccagcgaagtgctcgacatcgtcaccccccacgtcaagcccggtgtcaccaccgaggaactggaccgcatctgccacgaccacatcgtgaacgtgcagggcgccgttccggccaacgtcggctaccgcggcttcccgaagaccgtgtgcacctcggtcaacaacgtcatctgccatggcattcccagcgaagggaaggtgctcaaggatggcgacatcatcaacatcgacgtcaccgtcatcaaggatggctggcacggcgacaccagccgcatgtacttcgtcggcaccccgtcggtgatggcccgccgcctggtggaaaccacctacgaagccatgtggcgcggcatccgcgcggtgcgtccgggcgcgaccctgggcgacatcggccatgccatccagagctatgccgaaggcgagcgtttcagcgtggtgcgcgagtactgcggccacggcatcggcaaggtctaccacgatgagccgcaggtggtgcattacggccgcccgggccagggcctggtgctgcagcctggcatgaccttcaccatcgagccgatgatcaacgagggcacccgctacaacaaggtgctgccggatggctggaccgtggtgaccaaggaccgcaagctgtcggcacagtgggagcacatgatcgcggtcaccgagaccggcgtggacgtgctgaccctgtcgccgggcgagtcgcaggtctcctga

SEQ ID NO: 503822 - DNA, 2628 bp, Stenotrophomonas maltophilia
atgctgccggcgagttcgctgctggacacgccggccgcgtcgctcaacgacccggactgggctgctgccgcgcgccaggcgctgcagcaggccgacgcgcgcctgtaccgccgcttcgaccagggcgacaacatcgagcgcctgctggcgctgcgggcgcgcgctgccgaccatctgatccgcctggcctggcagcgctgcctgccggccgacagcgggctgtcgctgttcgcggtcggcggctatggccgcggtgaactgtttccgcgttcggacatcgacctgctggtgttcggcgatccgccggcacagctggcccatgaggcggcgctggcgcgcctgttcgcgctgctatgggactgcgggctggccgtcagccatgcggtgcgttctgcatcgcagtgccgcgaggcggcagtggaccagaccgtgctgaccgcgctgatcgaggcgcgcccgatcctggccgatgatgtggcgcgccgcgcgctgcgcgaggccgtcgacgatcgtgaactgtggccggcgcgcaccttcttcctggccaagctggaagagctgcgcaaccgacaccagcgcttcggcgataccgccgacaacctggagccggacctgaaggatggccctggtggcctgcgcgatctcaacacgctgggttggatggcactgcgtgcgttcggcgtgcgtgacctggaggcgctggtcgggctcggccatctgggcgcagacgaagcggcagcactgaagcgcgaacgtgcggtgctggcgcggctgcgctttggcctgcatctggtcgcgcgtcgcccggaagagcgcctgcgttttgattaccagaagaccttggcggcacgcctgggctttgaagacgatgccgagaacctcggtgtcgagaagatgatgcagggcttctaccgcgccgcgctggtcgtgcgccggatcagcgaccgcctgctgcagcgcttcgaggaacagttcgatggcgaggcgcagccggagccgctgaccgtgggtttttccctgcgccgtggttacctggcggccaacgaagccgactggccgcgcggcgacatcggccaggtggtcgcgctgttcgccagctgggccaacaatccgcaggtgcgcggcctgcattcgctgaccgcgcgtgcgctggccgaagcgctgccactgctgccggcctacgaccaggctgatgccgatgcacgcgagcagttcctggcgctgctgcgcggccagcgcccggtcgatacgctctcgcgcatggcgcggctgggcgtgcttggccagtggattcccgcgttcgcccaggtcagcgggcgcatgcagttcgacctgttccatgtctacaccgtcgaccagcacacgctgatggtcctgcgcaacatcggcctgtttgccagcagccgtgccgacgagcgcttctcgatcgcgcacgaagtgtggccgcgcctgcgcaagccggaactactactgctggccggcctgttccatgacatcgccaagggccgtggcggcgaccactcggaactgggcgcggtggacgcgcgcgcgttctgccaggcgcatgcgctgagcacgtctgacaccgaactggtggcgtggctggtcgaacagcacctgcgcatgtcggtgaccgcgcagaagcaggacatcgccgacccggaggtgatccatcgctttgccaccctggtcggcagccgcgaccgcctggactacctgtacctgctgacctgcgccgacatcgccggcaccagccccaagctgtggaatgcatggaaggaccgcctgctggccgacctgtacttcgccacccggcgcgcgctgcgcgaggggctggaacacccggtgccggcggccgagcgcgtggccgaagcgcgtgacagcgtgcgcgcgctggtgcgcgagcggggttacgacgatgccaccatcgatcgccagttcgcggtgatgcccgacgaaggcttcatccgcctgcgcccggagcagctggcctggcaggctgccgcgctggtgccggtgaagcagggccaggcgctggtgaaggtacgccggatcagtgtcgacgatcccgcgctggaagtcttcgtgcattcgccggaccgcgacggcctgttcgccgcgatcgtgatgacgctggaccgcaagggctacggcatccaccgcgcacgcgtgctggacggtccggccgataccatcttcgataccttcgaagtgaacccggccgataccttcgccgatggcagcagtgccaacctggaagcggcgctgcgcgacgcactcagtggtgacctgtcgcgcctgcggccgtcacgccgcgtggtgccacggcagctgcggcacttccgcttcgccccgcgcatcgaattccgcgatgagccgggcgcaacccgtttcgccctggtcgcccccgaccgccccggcctgctggccgatgtggcgttcgtgctgcgcaatcagggcctgcgcgtgcatgatgcgcgcattgccacgttcggcgaacgcgccgaagacaccttcgtgatcagtgacgaacacgacctccccctgactgaacctgcccggcagcagctgcatgacgcgatgctggcctgcctggaccctgatcgaaacgccggagaccccgcctga

SEQ ID NO: 503823 - DNA, 1080 bp, Stenotrophomonas maltophilia
atggccaccaagcccgccaagaagaccgccgcgacccctaagagcgcagcggcccggaaacctgctgctgccgcaccggccgcgaagaagaccccagcgccgaagaaggccgctgcggtgacggccccggcgaagaaagcggctgcggtgaagcgtgctgtgaagaagccggcgccggccaagagtgccgaagcggttcgcgccgaaaccattgcccgcaagtcgctgcgcaagccgtcggccccgggcgtggaagagctgaagttcggcatcgagagtgccttcgagcgccgcgctaccttgaccctgcacgagctggaaggctcgaccaagccgctggtcaaccgcgtgattgacggcctggagagcggtgagttccgtgttgccgagccggacggtcagggtggctggaaggtcaacgagtggctgaagaaggccgtgctgttgtacttccgtgtcaatgatatggccgtggtcgacgcccgtccggcgccgttctgggacaaggtcgaatcgcgcttcgccggctatgacgaggcgaagttccgccgtggcggcgtgcgcgtggtgccgggcgcgatcgcccgccgcggcacctacttcggcaaggacgtggtgctgatgccgagcttcaccaacatcggcgcctacgtcggcgaaggcaccatggtcgatacctgggccaccgtcggctcctgtgcgcagatcggccagcactgccacctgtccggcggcgccggcatcggtggcgtgctggaaccgctgcaggccagcccgaccatcatcgaggaccactgcttcatcggtgcgcgctcggaagtggtggaaggcgtggtggtcggccaccacagcgtgatcggcatgggcgtgttcctcagccagagcacccgcatctacaaccgtgccaccggtgaaatcacctacggttacatcccgccgtacagcgtggtggtgtccggctcgctgccgagcaaggacggtacccactcgctgtactgcgcggtgatcgtcaagcaggttgatgccaagacccgcagcaagaccagcgtcaacgacctgctgcgcggcctggccgactga

SEQ ID NO: 503824 - DNA, 870 bp, Stenotrophomonas maltophilia
gtgactgcgccggaggatctggcgccgtcggcgatctaccggcatccgtccggcaacctgttcggacgggtgctgccgcgcctgttgcatgccccacggtggacccggctgcgccgcgcgctgtcgcggcgctggccgatgccgatgctggccagcgatgtgcgcgatgtggtctacgtgagctggtgggtggatgtgcggcacgcgccgccgccgccgcccggccatcattacgtcgtccatgaagggcgcacgccctacacgatcctcagttaccgccacggccacttcggcccgcatgcggccggaccgctgcgcgcgctgatgccgtcgccacggcagagcaactggcgctggtacctgcgccgcgacgatggtccgcagggaacgccggtggtgctgttcgaccgcaacgtgatggaccagctggccttcgtcgccggcgcgcgcgttttcagcgatgccatgcagccgcatctgtccacccgcttcgagcatgtggtgcgcaccgatggcgatgggcacaccctgatcgaaggtgggcagggcagtgcgccgaggttgcacctgcagtggcaggccgctgcaggctgggaggatgtggcggcgtggtcggcggccttcggcggccaccaggccctgctgcgtttcctcacctgccaggacgaggccatcgcccgtacctgcgacggccgctgggccagcacccgcatcgcgctgccggtggagatcgcgcagctgcacccgctgcagctggaaggcgaaccgcagtgcccgcgtctgcaggcaatgggcgtggcgctgcacgaggggctggccttccggctgccaagggtgccgttccgggtcgtgtccgagcgcctgttgtga

SEQ ID NO: 503825 - DNA, 1692 bp, Stenotrophomonas maltophilia
atgtgttcgatcttcggaatcttcggcctgcaggccggtgacgatcttcccgccctgcgccgccatgcgctggaactgtcgcagcgccagcgccaccgtggcccggactggagcggcgtgtacctcgacgaaggtgcgctgctggtccatgagcggctggccatcgtcgacccggccggtggttcgcagccgctgctgtcggccgatggccagctggcgctcgcggtgaacggcgagatctacaaccaccaggcgttgaaggcggtgctgaccaccgcctacgacttccagaccggctcggactgcgaggtgatcaacgcgctgtatcgccagggcagttcgccggcgcagtggctggaacagctcaacggcatcttcgccttcgcgctgtgggaccgcgacagcgggcgcgtgctggtggcgcgtgacccggtgggcgtggtgccgctgtactggggccacgatgcccaggggcgcctgcgggtggcctcggaaatgaaggcgctggtcgatacctgtgccgacgtcgcacagttcccgccgggtcactacttcgacagtgccagcggtgagctggtgcgctattaccagcagccgtggcgcgactacgccgacgtgcagggccgccaggccgacctggccgaactgcgccaggccttcgagcatgcggtggagcgccagctgatgagcgacgtgccgtatggggtgctgctgtccggtggcctggactcgtcgctggtggcggcggtggccgcgcgctatgcgcgccgccgcatcgaggatggcgggcagaccgaagcctggtggccgcgcctgcattcgttcgcgatcggcttgaagggttcgccggatcttgctgctgcggcgatcgctgccgaggcacttggtaccgtgcatcacggcttcgaatacaccttcgaggaaggcctcgacgcactgccggaagtgatccgccacatcgaaacctacgacgtcaccaccatccgcgcctcgacgccgatgttcctgctggcacggcggatcaaggcgatgggcgtgaaaatggtgctgtccggcgagggaagcgatgagatttttggtggctacctgtacttccacaaggcgccggatgcacgtgaattccacgacgagctggtgcgcaagctggacgcgctgcacaactacgactgcctgcgcgccaacaagtcgatgatggcctggggcgtggagccgcgcgtgccgttcctcgatcgtgagttccttgatgtggcgatgcgcttcgatgccgcgcacaagatggtcggtgccggctttggcgggcgtcgcatcgaaaaagcggtgctgcgcgaggcgttcgacggctacctgccggacagcatcctgtggcggcagaaggaacagttcagcgatggcgttggctacggctggatcgatgggctgaaggcgcatgccgaagcacaggtgagcgaccgtgtgttggcggcagcggacaagcgcttcgcgcacaacccgccgcagaccaaggaggcgtactactaccgccacctgttcgagcagttcttcccgagtcgtgctgcggcggagaccgtgccgggcggcaagtcgattgcctgttcgtcgccggccgccattgcctgggatgccagcttcgccgcggcggcggacccctcgggccgcgcgatcgccggggtgcacgaacaggcactggcctaa

SEQ ID NO: 503826 - DNA, 1380 bp, Stenotrophomonas maltophilia
atggacgtacaggcaggtggcgacgtgccgcccacgaaatggggatggcgttatctggcctgggccggggtgccgttgctggctggcgtactgctggcgcggtatgccgggccggcggcgcccgaggcggttgcccgcgccaccgccgccgaaggcagctgggcgcagcaccttgcctcaccgctgggcttgttcctgctgcagctgctggtgctgctgctggtggccaagggcgcgggtgcgctgctcaagcgctttggacaaccggcggtgatcggtgagatggccgctggcctgatgatggggccgctggtgctcggcagcctgctgccgcagctgcatggtgcgttgttcccggccagctcgctgggtccgctgagcatgcttagccagctgggcgtgctgatgttcctgctggtagccggtgccgagctggacctggcggcgctgcgtggccgccggcgcttcgccttcacggtcagccatgccggtattgcagtgccgttcgtgctcggcgtggcgctggcgatctggctgtatccgcagcacggtccgcagggtgtgggctttactgcattcgcattgttcgtcggcatctccatgagcatcaccgcgttccccgtgttgctgcgcatccttgccgatcgtgggatcacacagacgccattgggccagaccgcgatcgcctgcgcggcattgggcgatgccaccgcctggtgcctgctggccttgatcgtcgccgccgcccaggccagcggctggttgccggccagcctcaacctgctgtgcgtggtcgcgttcgtagcgctgatgctggggctggtgaagccgtggtttgcccgccagcagattacgccgggccgtgagggacgttggttgctgggtgtcctgctgctgtcactggcgagtgcgctggtcaccgagatgctgggcatccacgcgttgttcggtgcattcgctgcaggcgtcgcggtatcgtccaacgcgcagctgcgcgacttgttgatggcccgcgtcgaaccgttcgcggtgaccctgctgctgccgttgttcttcgccatgaccggcctgcgcatgcgcgccgatgcgctgcaggccagcgatatcgtgttgtgcgtggtggtgatcgcggtggccacggccggcaagctgctgggcaccttcagtgccgcgcgcagtgcgggcatgcccacgcgcgaagcgtggcggttgggggcgctgatgaacacccgtggtctgatggagctgatcgtgctcaacctgggctacgagctgggcctgctcggcgatcggctgttcgcggtgctggtgatcatggcgttggtgaccacggcgatgaccgggccgctactgaacctgatcgagcggcgccggggctga

SEQ ID NO: 503827 - DNA, 1554 bp, Stenotrophomonas maltophilia
ttgcatcgtctgttgctactggtcgctgtactggcgagccccgctgcccaagcagtggatggcgcacgactggatgccgccatcgcctttgtggaccagcacgagcacctgccggggctggcgatggcggtggtcgaggatggccaggtggtctatcgccacactgaaggcgcgcgtggtgacggtggccgcatcgacgaggacacgctgttcaagatcgcctccaacagcaaggcgatgaccgccgcgctgctggccacgctggtgcagcagggcaagctgggttgggctgacccggtgcagcgtcacctgccagcgttccgcatgcatgacccgtgggtgggcgagcatctgcaggtacgcgatctgctgatccacaacagcggcctcggcctgggtgccggcgacctgatgctgtggcctgagcccaatgccttcacccgcagcgacgtcatcgccgggctggcacacctgaaaccggtcaccagtttccgcagcggctatgcctacgacaacctgatgtacgtcgttgccggtgaggtggctgcggccgccggtggcaagccctatgaccagctgatgcgcgagcgggtgtttgagccgctggggatgacccgctgccaggtgggcgcatggtcggtgaagcagatcggcaatgtcgcccaaccgcatgtgcggcgcgatggccgcaacgtggtggtcgctggtgatggagcgctcagccccgatctgacgtcgatggcggccggtggcatccgctgttcgctgcgcgacatgacccgctggatgcaggtgctgctggacccggcgctggtaccggcgtggttgggcgccgagcagcgccgcatgctgtggacgctgcacatgccaatgccgctgggcgagcgccaacgcgactgggacaacacccgtttctacggctatgggttgggctggcgggtgtcggacatggacgggcactggaaagtcgcccataccggtaccctgacaggcatgtattcctcgctggcgctgctgccggaccgcaaggtcggtgtggtgatactgatcaacggcgaggccgaagacgcgcgtaccgcgctgatgcagtcgacgctgaaacagttcaccgcgccggaagacgcgcagcatgtggggtactacctggcggaactggcggctgatcgggccgtgcgcgccgccacggggagtcctgtgccctccaccaggggcgcacaaccggccgccgtcaccgatctgcagcgctggcagggccgctacgccgatccctggctgggcccggcctcgctgtgcccgggcaaggatggcctgcgcttcagcgtggacaagtcgccccggctgcaggccatggtgctgcagttgcaggggcgttggctgctgcgctgggatacgctgggcgaagacgcacaggcctggctgcagcccggtgacggtgcgccgcccacactggacctgcgtgccatcgacccggacatcgacttcagctatgacttccaggacctgcatttcactcgtactggcgactgccctggcagcgagcgccagcgccgctga

SEQ ID NO: 503828 - DNA, 516 bp, Stenotrophomonas maltophilia
atgttccgttgcctgcgcgttcccgccactgccctgctgctttcggcgctggtggtgcccaccgtccatgccggcgccgcgccgcagttgaacagcggccagaccagcgtgttggtcacgtcgctgatcgtgctgtcgattccgttggccacgtcgatgggactggccgaactgtccaaggccccgttcaaggccagcgagcgcaacggcaaggtcgccgcacgcacgccggcggtgccgctgccaccgatggaagtgaagcaggtcgccaccacgccagccggtgatcgccaggtgcacctgcaggtgcccggcaaggccgaccagaccgcaacgctgcaatggccggcggctgcaggcgatgatccgattgccggtttcgtcgtcggccagcaggtgcgcttcgacccgaccgacgcgggtgccggctggaccgtgaagagcgcgcagggccaggcgctggcctatgtgccgaccgcctacgccgccggcgatgtgatgagcgaaacgctgtaa

SEQ ID NO: 503829 - DNA, 1968 bp, Stenotrophomonas maltophilia
atgacaaatatccaaggaagcggggggcatgtgatctcaggagcttttgttaccgcagttgcaacgtcggcggctacgacggccgccaagggggcaacgtctagcatggtaaaagggtttgtcgaaaaggttgtcacgccttacttctccggaaggaaaactaaagcagtcctgataaagtgcgcaaaaacctattataggaatatggatctgcgtaccagatttattcctactatcgcagtccagggcgggagattcgctctggatgatatatatgagcccctggagctgctgtcagcggagcactcgatttcatatcgaataaatggctatccccgagagatgtttgaggcaacccgctgtgctctcatagtggactctgccggcatggggaagtcgactctgacaaaatattgtttcagacgcgctcttttggagttgaagagaatacccattcttgtcgagctgagaaggctcaggcctgggcagggtttgctggacttgatctgtgccgattttcttggtgaacgattctcggagtctgcgcgagatgagttcgtgtctgcgctatctgaaggaaattttacaatattcctggatggttacgacgaactctctgcggaggtccgccccggcgcgagtagagagatggcgtgcttatccgccgatctacagtactgccacttcatcttgacatctcggccggatccggcgctagcaagtttctcggaattttctcgatatgacattgtggatcttagtatcgaagaggccttctctctgcttcggcgatacgacaacaataaaggtgtcgcagattcgttgatcgcaaaagtgggtcgaattaccgcagttcatgagttcctaaaagttccactgctagttacgctgctgtataaggcttttgattataaggcggttatacctctaaagaaaaatatattctttaggcaagtgtttgatgccctttatcaagaccatgatctgagcaaagaaggggcttttgagcggcggaaaagatcgaaccttgatttggaagaattccataaatttgtaagatgccttggattccttactttcaagaagggagctgttcagtattcgcaagaggagttctgtcagctggtcgatcaagctatcagtcaatctggcttggacgccgacgctggcggactgcgaactgatctgatatctgccgtccccatattcatcaaggacggcctagaatacaggtggtcccacaaggcatttcaagattatttctctgctcagtatgtatttcttgatgcacagtcaagtagggatgagctgattaatcgaatgttctgcagtgcgaatgttcagcgttattcgggattgctgtctttgatttatgagttggataacggcctgctttacgatctttgcatccttcctttcatcgagcggatgctaggatcttcggagcttccagtagttgatgatgcttcggttcagctcaatttctattggggtctggcgagatcattccgaattcccttcgatctcgttgctgagcattccatcaaagataggtttgaggaggctgaaaggattggatctacaattcacgacttgaagtcatttggcgcaaagatgatttcgcactatagctctggtaagtcttcattcatattctctagtatgagcgaagacgcggatcgagccgagctaattggtgaattgagagggtatcgaccaaaaagtagggtgaaggagactgagttggcccatgcgaaaatggacgatctcccatcaatttgctgtttgtttgatacggcccgaagctctggtaatgaggctgttcggactgcagcaatttcccttattagaacttcgacgaatgagttgtggtctccgaccttttcaatgattggatccatgcgtgaatcatctgtggccaggggcaaggctcgaaatgaggttgatatttttgaaggaattaactga

SEQ ID NO: 503830 - DNA, 2076 bp, Stenotrophomonas maltophilia
atggcgaatgggccgctgatctgggaagtcgtgctcaccgatggcgccatacgcaacggctacatctcagttgaccccaattggtcaggcttcgatgcagccatgctgggccgtccagacgtagcgtcaggaagagaagctacctttacgtttccggatggctatcagatcacctccgatctgcgagccaatggaccaggctcagctcgcatccgcgcacgtgttgcgcccgcctttaggcgtcttggggtagcggctggcgattcgctgctcatcattcaagagacaatcgggcagtaccgagttgaggcgcgcaggggcagccgagacacgtttgagctcggctacgtacgtctgcgcgagcgcttcctcgcacaattccccggattcaccggcttctctaaagatcagcgcctgctgcgcgaaactatctacaagcgtcagctagtagagcactacaggtcattgctgctgcctgcgctggatgctggtggaccgaagggcgtgtggtctgcgctgatcaaattactgcgagttcgtgttggcgctgagaacccgcagccgcagaatgtggttggatggagaatcgtggcgcagttggccgaattgtcgggcatagatcagttaagactaggcaaggctgtcctttcaatgcttagggctgaatcagtgtctattgggctggaggcattcaatcgaggcacctccaaactgagctcgccgctacagcccgctggtcagcgatcgctctcaagcctgttgctcacgctcgaagactcgaagcactacttctttgtcaagaccgggcagatacgccgtgccctggagatgctcgatccgacctttgatttccgcaaaggtggcatgagcggtgaggagtgggagcgcattcgcgcgctatcagaccgactcgcagtccgtctctctgaagacgggtggcggccggcagacatgatcgatgtacagtcatttctctgggtagccatcgcctacgatcaggtggactgtgcagatgctgaggaagaagatgaagctgaagctgaagctgaagctgaagctgtggaagaggatgaagacatgccggtgatgcacgctccctccaacaccatcctctatggcccgcccggtactggcaagacctacggtgtggtggaaaaggctctggagatcctcgatccggagttgctggccgtcaccaagggccagggggctggcgcgcgtgccgcgctcaagcagcgcttcgatgcgctgcttgaagaagggcgcatccgcttcgtcaccttccaccagagcttcgcttatgaggacttcgtggaaggtctgaaggcgcgtgcaggtgcaagcggcgcgctcgagtacggcgttgagaacggggtcttcctcgaactctgcatcgatgcgcaacatagcgacctgccatgcgtgctcatcatcgacgagattaaccggggaaacatcgcccgcatctttggcgagctcattaccctcattgagcccagtaagcgacagggtatggatgaagcgttgtccgttcgcttgccgtactccaagcaagattttgcggtgccagccaacttgcacctcattggcacaatgaacactgcggatcgctcgctagctgcgatggacgtggcactgcggcgacgcttccggttcatcgaaatgccgccccggccggagctgcttgattgggacgtcgacggtattcgcatgggtgaactgttaagcaccctaaacagtcgcatcgaagttctgctcggccgggaccacctcatcggccatgcttacttgatgggcgccaaggatctgcctgggctggctgaggcgttccgcctgcgcattctaccgttgctgcaggagtacttcttcgaagactggcgccgaatcgcttgggtgctgaacgatgatgctaagccgcagggtgagcgcttcttgcgccagcgcgagctgcagttgaaccgcctgtttgccccggaggcacagctcgcaactgacaccgccaattggtatatccatgagtcagcgttcgagcaggcggccagttacaggggaattctcgtcggccaggcagactga

SEQ ID NO: 503831 - DNA, 1347 bp, Stenotrophomonas maltophilia
atggctgtgctgactgtgcgcgagtatgcgcggatcggcgtttcagaaggcggtccgcggcaggaggggctggatgccgccttcttgccgcaggcgtcttttgactggctctgtggtgagttcgagcgcttgcgcgcgggcggagcggcgctcatgcagcgcgatggcgcacgctggctgcgtctggaccagtatgtaggtgtagtggaatgtcccgacggcaccacattggaggtgctgccgaagcacgttgcacatgtagatgatgagcttggcgcgaggcggttgctgcgccgcatgctctgcaccgtgctagacatctcaccgagggaaggtagtcctgccgacgtgactctgttcgatacgccattaaatgaatgggtcatggggcgattcatcggcgcgctggatgaactactaaagcgcggacttcgcttcgactatacacgggtccgcgaggagcagttattcctgcgtggtcgcctggatatgtcgcgtcagctacgtcagtcgcccactcgtgcccacgtcttcaacatcgagcacgatgtgtttagcgaggacaggcctgagaaccggctactgcgcgtcgccctggatcgcgtgtgtgcacgtacgcgcaacgcgggaacctggagacttgcccaggagttgtctacgcgtatggccagcgtgccacgaagtactcaggtggctaacgatctgcgcgcttggggcagcgaccgactgatggcccactatcgtgaagtccgtccgctatgcgaggtgatcttgtcgggccagagccccttggcattggcgggcgattggcgcagcccaagcctgatgttccccatggagcggctgtttgagcgctacgtgggcgcttgcctagcgcgccagttcgcgccggagtggcgggttggcggtgcagcgtcggagtacctgtgcagccatggcggggcaagctggttcaatctgattccagattttatgctgcgacgaggcgatgagctccgcgtacttgacacgaagtggaaggtgctggatgcgacggccagcgatgcgcgtgagaagtacgggctcaaacaatccgacttctatcaaatgtttgcctacgggcagagctacctgggtggagcagggcagatggcgctggtctatccgcagcacgcgggattcgcgcagcccctttccgccttcgatttcagcgccgaactacagctttgggtgttgccctttgatttagagcgtggattgctggtgatgcctgaacactggaggccgaatggcaacgtctctcctcaagtgagcccacccgccgcgtatagcggcgagctcagtagctgggttcccttaactatctga

SEQ ID NO: 503832 - DNA, 510 bp, Stenotrophomonas maltophilia
atgcccatcgaattcaggcccgactccaactctgcattcgatgcactcagcgcggtgagaatttcttacccgcgggttcaacctgccacgctgtccgatgggcgcgaagtgactgagtatcaatacactttccgtcgtgacggtgagcgggtagcgtcgcttggcatctttggaacagaaacgcttgcgattgacgagaacggccgtgagcgaatttacaagctggaccttagtaccaatgaagtactgaaatcgatcatcgatttcaaaggggaaataggaaattccgatgaagcttctgcattcatccgcgccgtcgcgcagggactggttaatgtattttccaatcaacccagcatttttgagagcattcgctacatcgcagtcgctcggattgattcattgcttcaacttggcatcgcaatgccagcggacagaattcagctacagaacgaggaagtagttctaggcagcttgtttgttccgcagaagcaggctgaggcagggtga

SEQ ID NO: 503833 - DNA, 513 bp, Stenotrophomonas maltophilia
gtgccgatcatccgaccgttcccggtcaccgccatgcatgaaccgatggtggtcgattttgaactgacaccgcccggcccgaacgctgcccccacgttgctgatcggccttcgcgtgaaaggcgaggatgacgcacaggcagcgcaggctgccgaacgcctcgtgcgcgagggactgccggctgaagtgctgcttgaacgtgtcgagcaggttggtactgagccggtgccgctgacccgtcgccagttcaatggttttgaaccttctgaaatggtggctgtcggctcggatgggcatgtgcccggcgtagtacccgacagtgctgacgacgcgtccctggtggctgccggtctgattgggccggacgggcactatcgcaccgtgacctttgcctgggccgagcaggtgaaacccggtcactaccgcctgcgtcttcgcctgctgtcaccggccgcggggctggaggctgttccgtccgaactgcagttggcttacacacaccgcgccaagtag

SEQ ID NO: 503834 - DNA, 945 bp, Stenotrophomonas maltophilia
atggatgatcgctatattgtttccatctacgttgccgcacccggaacaccgttgcgggccggtggaacgtccatggccgggcatgtgtactacacggtctccgatggaaagacgagccacagcctgggattcgcgccggaagagcatggcgcccgaagtggcccgggcaaggtgtacaccaatgatgcagatcaataccagaagccgatctaccgacgtgatatggagatctccaaggagcagtacgacaagctgctggcgtttggaaacgcccctgcgaagcatggctttgagatgaactacaacggcgccagcaacagctgcatcgacttcacctggggcgcgttgaatcacgcaggcctgcatcgtcataacatcctgggcatggaacggaagggcttcgagggcaacctcaagccgctggacaacgtggatgcgatccgtagcatccgcgcgccatttccggacagcgagctgaacagggaagtgcgcaacccgatgccggagcgcacgcttatgcagcgcctgatcagcgagcagcatcttccgcagaaagacagggagctgctggagtccattcgcagcaaggtggcggaggtggaccagcagcatggccgagcctacgacgatgcaagcgagcgtatctctgcgagtctgctcgcgttggcgaaggaaaagggtatcgagcgggtggattacgtggcgctgagccaggccactgcagatgcaggggcaggccagcggatcttccttatcgagggcgatccagcgaacccggcgcatacgcgggcatccatggagaccgcaacggccgcgcaagcacccgtggagcaatcgttcgccaaggtggggcagctggagcaggaccagaaggcgcaggcgcttgcggtaggtcaggagcctcaactggccgtgcaggagcagagcatgatgcggatgagctga

SEQ ID NO: 503835 - DNA, 1074 bp, Stenotrophomonas maltophilia
atgcagaccctcaagatcgcgaccgcctgcgcactgctgctaaccccgttggtcctggcatgcgctgggcaggccgcaccactttcctatgcacaggaaaaggagaacacagccaagctggtggacatcattgacggtgccacccgcgatggtctggttgccgtgctggtgccggccccgtatgtcgtgcacaacggcgggccaggcgtcggctctccggtccccggctttcatctgggcaaccgctcgaccgacctgcccgggttctcgacgcgggtgtccttccagcacaaggacattccctcccagggctatgtgcagctgttcaacaccaacgaactggaaaccggcccgcagcggacggtgttgatggacgtgttcgaggtgcatctgattccgccgggcacctatctgctgaacggtgcggagaactaccgcctgaacacccgcgtggccaagctgaagccgctggggaccatggacgaagtatcgaaggacatcggcgccacccgccttgccgacgtcgactaccgtttctattcctggaagaaggtctgggtaccaccgggcgtcctgaccgatcagcactcccagcaggtctgcatctcggtgcacgtggcttccggcaactgcgtggcatggggcacccagaactacgaaacctcgcgcccgaccgaaggctactgggatgacaggatcgtccctgaagacatccctgccgtacgcatccaggcggtcatcgccaaggcccacgcgccactggccttcactgcccacgaagggcagatcctgctcagccccttcattgttgccgccgacggcgatatcgatttcaacgcgaacgactgcgcaccggtcgacaagctgacgggctgcgccctgcgccgcttcagggtgcactaccaacccgcgccgttggacgctgcacgcaagcacatcgcaatcacctcgcgcggcctcaacggcaagcagcgcaaggtactggagcggatggaggcgatgcagctgcaggtgctgggccccagtgcgccgtccgatgcagcgctgggcaagggcgtcagcgccacgccttga

SEQ ID NO: 503836 - DNA, 207 bp, Stenotrophomonas maltophilia
atggtctttactgtccaatgcactgcccggcactggtccgtgttgcatccgaaggcgggtgacgccacccgttacgcccgcggtgccgatgccttcgacgcggccgctgcgctggccctcgagcaccatcgtcgcaccggccagcgcagcacggtccgggtcgaggcgctcggcagcaccgtggatgcgctccatatcggggagtga

SEQ ID NO: 503837 - DNA, 168 bp, Stenotrophomonas maltophilia
gtgacccttgtcacggagttgacggagcttcacactaccgtcaccaacaggggccccttccacatgcgcaccttcttctcgcagcagcgctggacgctgctgaagatctatttcgtcgccagctatctggtgctgattgaagagctgatccgcgccgccatgcactga

SEQ ID NO: 503838 - DNA, 438 bp, Stenotrophomonas maltophilia
atgcccgctgcgactgcgccgcgcgtccgcgacgcgacgcccgccgatgcctctgcgctgatcgcactcgacagcgtggcggcaagcgaccctcgacgggcggaacagattggcgagtggttggcgcggggcaacgtgcatgttgccgagcaggagcgcgagatcgttggctacatgaccctccatgagcacttcttcggcgaaggcttcgtcgaaatgctgatggtcgcgcgcgagcggcgcagccagggcgtcggcgccgcactgctgcggcacgcgatcgcacagcgtggacagcgcaagctgttcacctcgaccaatgcctccaacatcgccatgcagcgcctgctcgttgcatcgggcttcatcgacagcggcatcgtgcatggactggatgacggcgacccggagctgatctaccgctttgccggcagctga

SEQ ID NO: 503839 - DNA, 282 bp, Stenotrophomonas maltophilia
atgctcggctcaaatcattccgatatcgaaatattcgattccgatgggaattcatccacgcatgacgtggatccaacagccgcggagatctgtcaggggtggggcggtgtcggagtgcggggtgtcagccgcatggatgcggctgccaagcctacatggacgtacttgcggcgtccccgcactccgacaccgccccaccaccccacggaatacccgctgttgctgttgctctggcctctgcaggtgcagggcgcagccctgccgacccaccctaatctttga

SEQ ID NO: 503840 - DNA, 258 bp, Stenotrophomonas maltophilia
gtgccgaccaaggtcggcacctaccagagcaaggtcatggcgccggtggaatctgtgccgaccaaggtcgagacccaccagagcaaggtcatggcgccggtggaatccgtgccgaccaaggtcggcacctaccagagcagggtcagggcgccggtggaatctgtgccgaccaaggtcgacacccaccagagcgggtcatgccgccgggcatggcccggcgctaccagtccgcgcgcaggccgatgttgccttcgatga

SEQ ID NO: 503841 - DNA, 1035 bp, Stenotrophomonas maltophilia
atgctggacctaaggaatgttcgtgccgccatgctcgccacgctgctgctttcatctgcggccgctgttgcagaggaaacagtggagctgccgtcgcccgaagcgcgtgagcagatgctgcaattgttggaaacccagtccttgtaccgtggccgcgtcgattggaacgacgtgcgcgcgcgcctgaacgccgcaggtgatgaccgcgcacaacagcgccgtgttctggatgaggccgccgcactcagcagcggaggccacggccgttggttttcaccaagcgagcagcgtcagcgctccgaacgtgctcagcgcttgaatgccgctcaggcgaccgacctcgctgcccccagacacgccaatccccgcatcggcgtgctgcgggtgagccccttcgtggaagacctgcaacgcagcgaagcggaacgttatgaagcacgcaaggtctacgcgctggcgttgcaggagcgtatcgctggcctggatgacggcatgcggtgcggctgggtagtggatgtaagcagcaatggcggcggcaacatgtggccgatgttgtttggtttgttgccattgctgcatggaacgccggatacgcagggagcgttgatcggcgctttccgtagtgccaatggattgctgtggtggcggcaggcggaaggtgaagtcgtgcaaggcaacgcatcgatgctgcgttcacgacagggcgcgtatcggctgcgtgcgggcacggcaccggtggcggtggtgatgggggcaggcactgccagctccggcgaagcagtggcactcgcgtttcgagggcaaccagggagtcgtagtttcggtcagccgagcgcgggcttttctaccggcaatcgaccgacgacgctggtggacggtaccaccttgctgttgacccacaacgtcatgaccgaccgtaacggccagggcgacggtggcaggatgcagccggatcaggctacccccagcggaccggccacccttgccgccgcccaagcctggctgctggtccagcctgcctgccagggcagctga

SEQ ID NO: 503842 - DNA, 216 bp, Stenotrophomonas maltophilia
atgatcctgatcggccagcaggagcgggtggtggtggtcgggccagccgaagcccaccactgcctgcgctgccagacggaaaccgagttcgcgccccagctgcgctacaagatggcgcgcatcgacctgctgtttggccttgcctaccatcgccgctacgagacccgctctggtaggtgtcgaccttggtcggcacagattccaccggcgccatga

SEQ ID NO: 503843 - DNA, 1038 bp, Stenotrophomonas maltophilia
atgcagatgtgcaagggagttcttgggaatggcgcgctcatactgacccttctggcagccaacgcaacggccgccatcgcgtccaccaccgaagtaccttcgccggaagcgcaggtacagatcctggatctgctcgagcatgaagccttgtaccgcgacaaagtggactggcctgccgctcgtaagcgactggcgtcgttgcaggcgtacccgggtgcgttgcataccgccctgcgtgaaatcatcgtggagagcaccggggggcatggtgtctggatgacgcttgcacgcaagcgtgaagccacggagcgctcgaagcaggtcggcgctgaggccgttgccaaggcgaaagtggctggtgccgtcgatgcacgcattggctgggtggtcatcgaaggctatgccgccacgccgggggctacgcggcaggacgagtttaatcaggacatccagcgcgcgctgcaatggcaggatgtcatccgtggcaaggacagcggcgatcgctgtggctggattgtcgatctgcgcagcaaccgtgggggcaacatgtggccgatgctgctgggtgttgcgccgttgctacgcacgtcgtcgacaggcgtggaagaggtcgggtcgtttgctactgcccacgggccgcggcgctggagtctggcgccgaccatggtgcaggtcgatggtcgtcccaggctgggattcggtcgaccggggtattccctcaagcagcccggcgcgcccgtcgccgttctggtcgggtcgaataccgccagctctggcgaagcgacgatgctgtcattcagggggcgcccacagacgcggagtttcgggcagtcgacagcgggcttctcgacaagcaacgatacgcggcccctggtggatggcagcgtgttggcggtgacgaccgcggtgatgaaagaccgcactggcgctggcgccggtgccaggattactccggatgaattgacgacaggcgatgcggccacccttgccgccgcccaagcctggctgctggcccaacccgcctgccagggccgctga

SEQ ID NO: 503844 - DNA, 381 bp, Stenotrophomonas maltophilia
atgatcgtgttcgacccgcaccaccgtatcgacttgaccggcccttgggccggtttctctttcctcggtaatcgcttgatcacccctgagggccgcgagctgctccccgaggatctggcctggctgtcacttacagcctgccaagcgcaggaatggcgtcggatgatggaatctgcccgcgcggcagcgtcgatcgacagttccagaaatgtgcgcaatcgcgacgccggcattcgccatcatcctgccactgtcgtcaatctgcgggatgtggtcagccgtcgcaaagagcgttcggcggtggcgatgcctggccctgacgccgagccacctgtggccgtcctgccagcaccggggccgaaacgccaccagcgcgtgtga

SEQ ID NO: 503845 - DNA, 429 bp, Stenotrophomonas maltophilia
atgctgctcggtgcgcttagctttcgtgtcggcgctgaggaacccgtcaacctcgtttacaagtgcgtcaacaaggccggaacgcagtatcaaagccagccttgcgccaagggcgagacggtccatatccgcttggccgatcccgctcctgtatcgccccaggcggcggcggccaatcagcgctacctggacgacctgcgccagcagaatgcggccgtccgggctgcatctcggccagcgccagccgcgccggtatatagaaacggcggcggcggtgcccagctgcactcgatctctcagtacaaagacccggacgcctgcgaggcagcacgcgcggagcgtgagcgcgttttccgggcctatggcagcaatcgcccattcgagattggccgacgcatggacgacatggtttggcgggcctgcaagtga

SEQ ID NO: 503846 - DNA, 627 bp, Stenotrophomonas maltophilia
atgaccagcagcgcacgcgaatttttgaagtggttggcggtgatcttgatgaccggggatcacgtcgccaaggtgatctacggcgggtacgtgccaggactcagcgaagcggggcgggtggccttcccgctgttcgcgctggtgatggcgtacaacctcgctcagcccggcgccgacgtggtcaagtccgttcgcaggctcgcgctgtggggcgccatcgcgcagcctgtgcatgccctgacgttcggctactggttgccgctgaacatcctgctgaccttcgcgctgtgcgctgctgcggtctacgcggccggccagcggaactggatcgtcctggcattcgccgcggcggttctgccggcattcgtggactaccagtgggccggggtagggttcgtccttctggcatggctgggattccgcacggggcggccgctgttgaccttggcggcgttcgcgcccctctgcgccttcaacgacaatctgtgggcgctggtggctattccggtggctgtggggctatcccacacggcgtggccggtcccgcgcgggcggtgggcgttctacggctactacgtgggccatctggcgtgcctcgggctgctggcgcttatactcgcgccatga

SEQ ID NO: 503847 - DNA, 330 bp, Stenotrophomonas maltophilia
atgttcggtatcgacatttgggaatggatcaagcgcggcgtgaacttgctgtggaccatcatgttcggcggaatcggtcgcatcgtcagcaaggggctaagcgctgctggtatcacgttggtctctgtcagccagcttctgccaatccttaagaactcgatcagcaactactttggcggtctgccggattgggctcataactttgtcggcgctgttggcttcgacgtgttcatgacgatgatcctctcggcggtgtcagtgcgctttatgttcaagatcattcctatgtccacaacgcaggctcagcaactaggagtgaccaaggaatga

SEQ ID NO: 503848 - DNA, 1305 bp, Stenotrophomonas maltophilia
atgtatgccgatcaggggcgtgcgtacgccgcgtgtcagcgcgacatcgctggcggcccttctggctggcaaccgatgaagtgcaaaggtgacctttatagcaacggatcaggcgtctattacgcgctagatgcgtcgggccgcgcggtgggctgggactatgcgtggggtgccaacactagttgcaagagtcgtgtagacggccaagccggaatgatcaacggcacgctctacagcggcggcgtctgcgacaacggctgcaaggtgcagccgaatcttgacccgggaacaaactactccatcagggagagcggcaatcccaacgccatcgctgttcgttccggaacgtggaaagccactggcgacgtgtgcagcatcaccgacacccagcccaagccggatgctaaagatgagtactgtcacaccacgtcttcgggccatcaggtgtgcaagggcaaggacaggacgtgcgttacgtcaccgagcggcttccgtacgtgtgcaagcgatactgcgaacgagaagggtcatacggctacgaacaacccgcgcactgaggcgaccagcatcagttcgcccaacacgcctcccaatgcccccacgaatcgcccgggcgaagactggaagccgagcggcccatctaccagcgtgacgaacaacaacagcggcactacctacaacacgcagaattacaacaaccaaggcacgcccaacggcaaccagccgacgcccggcgatggttctggccccggtgctggtggcagcaatggcaatggcgataagggcgagggcagtggcaacagcgccagcggcggcgggaactgccagaccccgccagctacaagcggtgatcccattctcggcatgatcgcaacgcagacctgggcaacacgctgtgcggccgagaagggcaattccgccaaggtgactggcgacattggcaactgcgatgcagcgtttagcgttgaaggggacagcgtgcaggcaaaccagctgcgtgcgcagcgtgtccagttgtgcgccggtcggcccggcgaggggcagggcagcagcggtaatccacatgatggggcaggggacgttgatgggcccggcaaatggacttggaaattcgatgaagatttgatcgataagagcggcttcggtggcggctcgtgccctcagcttggaacactcgattttggccgattcggcacggtgtcgatggatgcccagacgtggtggtgccctctaatctccgccatgcatgtagtgatgcttctgctcggcgcgttcatctcttatcgaatcatttttggagattga

SEQ ID NO: 503849 - DNA, 129 bp, Stenotrophomonas maltophilia
atgcccgttgtcgtagccatcatggggtatctcgcgacggccgctgaggtcatcgcgggaatcctctcggtccttgcagcggttaaggggctgtttctgctgtgggggaacatcaagcaggccaagtag

SEQ ID NO: 503850 - DNA, 291 bp, Stenotrophomonas maltophilia
atgaaagttcagatcatgaccgagcaggtcgaaacccgttcgttcccggctcgcgatggcaaggccgcaaccaacttccgcgagcagaaagcagcggtcgttcgtgacaacgatttcccgctcccgttcaagatcaccctggacgacgatcagcagccctacaaggcgggcacctacgagttgtgcccgacctcgttgcagtcgagcaagtacggcggccttgaattcggccggcgcgttcgcctcctgacgccgtcgcccgcaccgggcccggtcgctccgaaggcctga

SEQ ID NO: 503851 - DNA, 1050 bp, Stenotrophomonas maltophilia
atgagtgccgtccagcagctgcaatgcgctttctgcggcaacgtcgccacctatctattcaagggcggttgctgctttgaatgcaccgagtcagacggtcgcattgaaatcccgccaactcctgttgacccccgctccgcagagttgcgggcattcgacctgtccgtcgctatggacagggcagggcagcgaagcgtggaaatcgccaacgaggatatgcgtcgtgcgcagcgtgcttctggtacgtcgctgcaggagtatttccgcgtcggggaactgcttaagggcgacggccgcgcagcggccgacgcccttgggcttgtctattacaaaacaagtgacacgccggtccgtcttggccgggtcaccatcgaaattgatccccttctagcgaaggcgcagcggctgcgaaagtccgtcatcaccggagcacggcttcatgaccaagaggcgcaaaaaggttcgcgccgtggcgcgtggtacttcctcacgctcacctacagagacggaagcgatagcagccctcgtgacgttagcgagctacttaagcgcatgcgcggcttcttcaatcgaactcgagatcggcgagaacggtggaaaggtgaagtgttccgttacgtatgggtcggtgaactcactcagcgccttcgcccccattaccacgtgatggtgtgggtgcccaagggcatgtacttcggcaaggtcgatcagcgcggctggtggcctcatggttccagtcaaattgagaaggcccgcaactgcgtcggctatctcgcgaagtacgccagcaagttcaccagcgtcgtggcaggcgcatttcccaaaggattccgaaccagtggcgtcggtggactcaatgaagagtccagacgcgaactgcgttggtggaaagcaccgaaagaggcccgcgaggcgctcggcggtgatgcagacatccgcaaaaccaaaggcggatggttcgacaaagctaccggggttttctggccgtccccgtggaaagtcacattcgcattcggccggactatcgcttggaaggtaatcccactatga

SEQ ID NO: 503852 - DNA, 219 bp, Stenotrophomonas maltophilia
atggctgatcgcgtgcaatggcgagttgatccgatggttgcgcgcggcttcggcccgtatcaggtcatggtctacatcgcgtccgtgtatgtatccggtcgctgtatcgattcagtggcctgcgcaagtcggcgagaagcgcatcagctcgccaacgaaatggctcgcgactgccggacagtcttcgtgaccgacgaacaccaggtgcgtcatgtctga

SEQ ID NO: 503853 - DNA, 282 bp, Stenotrophomonas maltophilia
atgcagtggcgctcaggggcgcggcgaatcaccgatgaacatctgatggcagcaatcgaactggggcgcctagatcctgccctggcagtgcttgtgcgtcaggaaatggccgaaaccaaggctgaaaagaaggcttggagcacgctgtgggacagactaagcgcggcggccgcagtgctggtgctcgtagtggtcgcaatgccgggcgtcgcgcgcgcaaagtcctttgaaatcaaaggcatggaatcgggcagtgccgcagtctgtatattatgttcgtag

SEQ ID NO: 503854 - DNA, 207 bp, Stenotrophomonas maltophilia
atgaaagaacaagagcgtgccggggaggccctcgcgcgccagctgtatccagaaatccccatggccgaagtgcgcaaaaagcgcgaggccgcagaacacgcatcaagaccgaaggaacttgcgccgggtcaccgctgcatcaacggacagacattccggcgcgtggaaaatggatgggtgcaggtttcttcatcctgcaccccgtga

SEQ ID NO: 503855 - DNA, 303 bp, Stenotrophomonas maltophilia
atgagcatcaagatcaccgtcctcaagaacgaaattgacgaacgcgtcggcagcttcaagaacgaaaagggcgaagacgtcaagttcaccactcgcaagcagaaggccaagttggaaaccgcaggtttcgcctacccattcgacgtgcgtctggaggacggtcagagcggctaccccgtaggtgagtacgagctcgatgtcgattccatgttgcaggtcaacaagggcgttgcctcgctgagcaagttcaccgtcctgcgcatggtgcccaaggctgcaccgcgcgtcccggcgcaggcctaa

SEQ ID NO: 503856 - DNA, 123 bp, Stenotrophomonas maltophilia
atggtcgctgagttcatgcgagacccgcttgttgttgtcgtgctgggcggggtgctgcttaccggcctctattggtctcttgtgttcgtcctgcgttgcaagggtggtcgcgatggtcggtga

SEQ ID NO: 503857 - DNA, 234 bp, Stenotrophomonas maltophilia
atgatcgacccgttcatcgccttcgtcctgatcggcgccactgtcgccatcgcatacggcgttgccaccttcccgcgcaaggcccgcgaactgttcgcggcaaccgcgccgaagcctgacgcagaagcccaggtcgtcacgctcgccaagctggaaatcgctgctaccaagcgcggcgatctgctggccgctgccaattacgccgagcaacaggaggccacccatggtcgctga

SEQ ID NO: 503858 - DNA, 1419 bp, Stenotrophomonas maltophilia
atgcagaagaacatacctgacccgaaaagatgggccgctctagctcttctttgtactgcccaatttatcgttattcttgatacatccatcatcggcgtggccctacccgcaatgcaggctgaactgggcttcagcgccagtgggcttagctggatcttcaatgcctatgtcatcgcatttggcggtctgctgctcctgggcgggcgactgggtgacctcttcggtgcgcggaggatatttgcgagcggcttcttcatacttaccgccgcatccctggtagcggggctggcacaaagtcaggagatgctgcttgccggccgcgccttgcagggcgttggcgcctcactcatcgcgccgtccgcattgatgatcctcatgcgtctttttggacacaatggtgccgaacttggcaaggcattcggcttctggggtgccgctgctgctgccggcggatctgcgggtgtgtttctaggtggcgtcatcaccgaatggctgacttggccctggaccttcctgatcaatgtaccgctcggcctgttggtgctcgccttgataccggctgtgctccgcaagtctccgcgcaacgccggcgcagttgattggtttggggcgatcagtgtgacgactgcgcttgtcagtcttgtctttgccatcgttaccattgaaacggctggattctattctccgcaggttctggcaatgctgggtgtatcacttgttctgttcgccgtcttcttggtcgcgcagttcgtgaggcgcgagccgcttcttcccatgaacatcttcaaagcacgaaacctggcggcgggcaaccttgtaatggcgcttcttggcgccgcttggattccactttggttcttcctgaacctctacctccagcagatccttggtctctctgcgctagccagtggcttggcacttctgccgatgaccggcacgatcatgatcgtgatggttggcctttccggtaggcttattgggcggtttggcgtgaaagcaaaccttgtgatcggattggtgcttatgggtggagcgctcctgatgtttgcgaatctgccgccggatggttcattcgtgacgcacgttcttcctgcttctctcctcgccgcgttcgggatggccttggcgtatattccgacgacaatggcaggcatggctggcgccaaacccgaggaaaccggcctggcttcgggcctgatcaatacaacctaccagattggctctgccataggtctcgctactatggttgcgctttctacatggggctccagctctgttgcaggccaaagtgcggaaggtacgctgacgggtttccaggctgcgttcttgggtgcggcaattgctgccggcctggccgctctggctgcagtggtgctcgttggatccaacggttcgaagagggatgtgccagtgggctag

SEQ ID NO: 503859 - DNA, 855 bp, Stenotrophomonas maltophilia
atgttcatcaaaaatcttcttgcattcggcatggccgccatcggtacgaccgcgctgccatccgcggcgtccgagagagcgctgagagggcacttcgcacttccgggatcaaccgagaaggtgactgccgaaatttccattgaaaaaacgggccctctttcccgtgagttacttatcacattctccgaaaagaccacgggtaagcgcataacgaagttcgaagaggagttgacgcaggatctgcatgttctggcaaccgacagcaacttctccagcttcctgcacgagcatccgggcaaaccggagccggatggtcgcttccgggtggcgatgaacttcccgaagccgggcctttaccatgtttttgctgacgcggttcctgctgggcttggacagcaggtggttcgcttcgacgtttcagtggatgcagcaaccggcgcctctggaaccgagcctcccctgtcatccagtgaaggagccgacggcccctatacagtgcaactggatcagaaggggttgcaggcgggcaaggagagcatgctgaaactaacggttctcaaggacggagaacctgcccaggacctgggcctgtaccttggcgtcccggctcacgcggtgttcgtcggaactcatgaccttgcttacgtccacgcccacgcaatgtcgatcaatacacccgagggcgcgcacggttcccacagagcagggcatgttcaagctggccctatcccagcacagatgatgctccacgcgaatcctcctagaccgggccaatatgcgctttggatccagttcatgggtagcggtgagatccgaacggttccgttggtcgtcaatgttgctgagagttcctga

SEQ ID NO: 503860 - DNA, 462 bp, Stenotrophomonas maltophilia
atgttgaagtcgacgttggtggtgctgggcgcagggctggcgttgggaagcagtgcagtcaccgctgctccggccaggttcgactggttggccgggcattggtgcggtggtaccgaggagcgcaggcttgatgaggtgtggctgccagaggcaggcggcgccttgcttggtatgtcgcgcacgttgagccgcggcgatatggagtcattcgagtacatgcgtctggtgcctgcaggcaaagcggctggcctgcatgtgcagccaaatggcgtggcggcaaccgcgttcgtcattgccgagcacggcgcgaactgggtggtgttcgagaatctgcagaatgacttcccgaagcgcatcgagtaccggcgtgatggaacgtcattgcaagcgagcatttcgggaccgggagatgatgggaagatcctgcgtattccgtttgactatcgactctgcaactcatga

SEQ ID NO: 503861 - DNA, 849 bp, Stenotrophomonas maltophilia
atggactaccgcgagcaccctgcccccgacgacctgcgccgtcatgtccagtgcctctggtggctgcgggacgaagccccaggccatgaggtgcaggtcatctatcccgatggccggtgcgagttgctggcggaacttggcgtgccgctgcatctgcacggggcagatggccggatccgttccgatctgccgttctgtttcgccgcacagcaatgcggcccgatccgcctgcgggccgtcggcccggtgttctgcatcggcgtgcggctgcagccggccgcaagcgccttgatcgccggtgcccgcctgcccggccttcgcgaccaggcaccggacctgtacacgctggatgcctcctttgctgagaccttcagtgcggccgcacgcgccagcgcggcaagcagtacgcccgagccgttatggcaggtgctgcaggaatgttgtgccagtttcaccctggacgagcgcatcgaacaggccgttgcggagctggatgcagcggaaggcgacctgcgcatcgccgaactggcgcggcggcttggcatgtccctgcgtggcttgcagtcgcgttttctgacggccgtgggcatgacgccgaaagaatatgcccgagtatgcagactgcaggctctgttgcacacgttggatggagaagccaccagcatcgcctccgccgctgcgcgccacggctacagcgaccaggcccatgccacgcatgacctggtgcgatggaccggcgtcacgcccgctcggctggtccacgcgctgcgcggtgatcgcggcagcgacgatgcactgcggctggctgccgccttcgtgcgcagaagcagtagcgaccactcacgatag

SEQ ID NO: 503862 - DNA, 873 bp, Stenotrophomonas maltophilia
atgcttgccgtccacccttccgaatccaccgcgatctctccggtcgcctccgtgcgccgcatcgtgcatcgcacccgcggccgcagccacgggcccatcacccggctggtgagcccttccgatctgggcgaacgtctcaagccgttcgtcttcctcgatctcatcgacgcccgcgatctttcgcgcgccgaagcccctgcgcttggcctgcatccgcactcgggcatcgccacgctcacctggctgctggaaggggccgtcgactatgaagacgaccaggggcgccagggcagtatcgaggccggctggatggagtggatgcaggccggcagtggcgcttggcacggcggcggattcggtgattctgatcgcttgcgcggtttccagctgtggcttgcgctgccgcccgcactggagttgggcgcgcccttcagccgctacttctctcctggcgagatccgcagcgaaggcccggtgaccgtattgctgggagcgtacggcacggcccgcagccccatcgatgccccggcaccgatcaactacttttcggtgaaactgcgggcgggagaatcgtggcggttccaaccgccgccgggacatgacgtggcctggaccgcggtgagcgtgggctcgctgcgtgtacccgaagcgatcggtccaggtgaactggtggtcttcgaggaaggcggccaggaggtcgcgttcttcgcccgcgaggacaccgagttcgtgttcggtaccgcagcacggcatccgtatccgctggcaacaggctactactcggtccataccagcccgcaggcactggaggcaggtgaagcgcgtatccgggagctgggggagcagatcccgctggcgggaggcgctggctga

SEQ ID NO: 503863 - DNA, 894 bp, Stenotrophomonas maltophilia
gtgatcgatctcaatgatgtggccctgttcgtacaggtggccaaggccggcagcttcgccgaggccgcccgccggatcggcatgccctccaataccgccagccggcgcatccagcagctggaagagcagctgggtgtccggctgctgcatcgttccacccgcaagctgaccctgaccgatgccggtgagggcctgtacgcgcgcagcgtggagcagatcgaggcgctggcggacgctaccctggagctttccgagggtagtgaagtgccggtgggcaaggtgcgcgtcgccgcgccggtggacttcttcaactggttccagctggagtgggtgcagtcattcctgcaggcccatccgcgggtgcgcctggagttcgtgctcaatgatgcgcgcgccgacctggtcgctgacggcatcgatgttgcgattcgtgcaggtgcagtcaccgggccaacactgatcgcgcgccgggtgggcaacaaccgtgccgtgctggtggccagcccggcctacctggaggcacggggagcgcccagcgcactggaggacctgtccacgcacgactgcatcgccgtgccctcgggctcagggcgcacgcagtggcgcttgatggggccggatggccccgccgaggtcgaagtgcgcgggcgattcagcgccaactcggccttggccttgaccaaggcctgcgtggccggcatgggcatcgcgctgctgaccgaggcgatggtggcgcaaccgctgcgggaagggacgctggtccaggtgctgcccgactaccgtattgatggcctggagctgttcgtggtctaccagagccggcggcagttgccacgcgccgccagcgcgtttgtcgacttcgccacgacccatctgatgcatggcaactggtaa

SEQ ID NO: 503864 - DNA, 426 bp, Stenotrophomonas maltophilia
atgtcctcttattccacaaccacctttggtgcctcgtcctccacccgcctgcagggcgcagtcgaactgttcggccgcctcctgctggtcgcactgttcctgctgtcgggattcggcaagctgagcgcctacgaggccacggcggggtacatggcctcggttggtgttcccgcgctgatgctgccgctggtgatcctagcggagatcggtggcgcgctggcgatcattgccggctggcagacccggatcgtcgccgtgctgctggcgggcttcactctggctaccgccttcctgttccacaacaacgtcgctgaccagacgcagatgatcatgttcctcaagaatgtatccattgctggtgcattcctgatgctggccgccaacggcgcaggccgattcagcctggatgcgcgcaaggcccgatga

SEQ ID NO: 503865 - DNA, 609 bp, Stenotrophomonas maltophilia
atgaagctcctgcatattgattccagcatcctcggccagcagtcggtcagccgccagctcaccgcccagctcatcgaagctgcccgcaagcagcatggcgacgtgaacgtgacctaccgcgacctcgccctggcaccggtcgaccaccttgctccgccccaccttgccgctgcccagggcgcccccatcgaagccgatgccctgcagcaggacgtggcgctcggtgccaacgatctggagtccttcctgcaggcggatgtcgtcatcatcggggcaccgatgtacaacttcagcattcccagccagctcaaggcctggatcgaccgcattgcgattgtcgacaagaccttccgttacaccgcacaggggccggaaggcctggcgggcggcaagcgggtgcttatcgcctccacccgcggcggcatgtacgccggtgatgtgccgggtgcggccatggaccatcacgaaacctacctgaccagcctgttcggcttcctcggcgtcaccgacctgcagttcatccgggccgaaggtctggcaatgggcgacgatgcgcgtgcacaggcactgcggcacgcccagcaggacatcgagcgcctcttcgcctga

SEQ ID NO: 503866 - DNA, 480 bp, Stenotrophomonas maltophilia
atggaaatccgagctgccaccgacggtgacttcgacgccatgtgggtgattttcaaggcggccattgcgatggaggattcgcttccgttcgccggtaccttcgaggccggcacctttcggagccattggttcggagtgcaggcggcctttgtggccgttctggaagggcgcgtggtcggaatgtacaaaatgggcgccaactacccggacctgggggcgcatgtggccagcgccacctacgtggtggatcctcgggtacaaggtcgcggcatcggccgggcgctggtggagcacagtcttgatcgagccagatcggaaggcttcctggccatgcagttcaattacgtggtcagtaccaatgcgccagcggttgagctgtaccggaagctgggcttcgccgtggtcgggacgctaccggcggcgttccggcatcggtcgctggggttggttgatgtgtatgtgatgcaccggttcctgtag

SEQ ID NO: 503867 - DNA, 486 bp, Stenotrophomonas maltophilia
atgaagcggcgttcacaggctctgggtcttctgggatggggcgtggccacctttgcggcggccgcagtcggcgcatgggcatcggcctccgccgccagcttctacgccaccctcgccctgcctgcctgggcaccgcctgccagcgtgtttggcccggtgtggagcctgctctacgcaatgatggccattgcggcgtggctggtctggcgcgaacgcggctggcgcaacgcgcaaccggccctggtgctctatctggtgcagctggccgtcaatgccctctggagctggctgttcttcggctggaagctgggagcgctggccttcgtcgacatcctggtactgatcacgctggtctgcgcaacgatcgttgccttcgcacgcatccatcgcggtgcggcggtgatgctgctgccttacctggcctggatatcgtttgcctcggcgctgaacttcgcggtgtggcgcgccaatcccggggtgctgtga

SEQ ID NO: 503868 - DNA, 150 bp, Stenotrophomonas maltophilia
atgacgcggagccttctcctcgggcggatcttcctgaagcatcagtggttgatcaatctcaatgtctacatggagcccggctaccggcttcgagaccccgaagcgcgtgattggggactgacgatccacctcatcaatcggtggctatga

SEQ ID NO: 503869 - DNA, 627 bp, Stenotrophomonas maltophilia
atgaatggatatcctgcaccgcgccgactgcggctggcactcctcgacgatcacgaaatcgtccgccgcggcaccgccctgcacctgtcccgcgacgtccgcttcagcattgtcgccagccacacccgcagcgatgagctcatcggcagcctgcgccagttggcagtggatgtcgccatcatcgatctcaccctggcgcctggcgaccgcagcagtgatgagctgattcccctgctgcgcgagtgctttccacatattcccctgctcgccttcgccacgctgacgccatccgcccgcatcgaccacctgctggcgaccggcatctccggcgtagtcagcaagtccgagcccctggagatgctgtctgatgccatcgtgcgcatctcgcaggggctgtgccgcctccctgccgattgcctgttcccggcgtgccgcgaggaactaagccgcaatgaacgcgaagtgctggacctgctcctggccggcctgactgtctcggagatcgcgctgcgccgccaccgcagcgtcaagacggtcagcacccagaaggtcgccgccctgcgcaagctcgggttgcgcaatgacgtggagatctatgcactgcggcagcagctggagctccaatga

SEQ ID NO: 503870 - DNA, 2325 bp, Stenotrophomonas maltophilia
atgaggcggcgcgttcgcctccgtctgcgcacgtcgtgcacgttgttgctggccctgatcctgctgccggctgcatcggccgaggatgcacaactgcagagatggtccgccggccgcgaagtgagggtcgccaccgcgccttcactgcgcccgctcccccctacgctggtggattcaagcgcgctgccaaccctcgcccatggatatgccaagcttgtggctcggcattccggcctgcgcttccgcgatctctcctacgccagcacgagcgcagcggtcgctgccgtctgccatcacgaggccgacctggtgctggtcatgggcagcccttcgcatcacccgcttccctgtcccgacctgatggtctccggcgccttccatggcggcaagacggtattggccgtgcgtaaaggtgggcgcccgccccgtgacattaccggcgtgagggcgcagctgctggccgtggttgacggcggcccctatgccgactggctggcgatccaccacccccggatccgcctgctgcatctccccgaccgtcatgcggccctggccgctgttgaaagcggcaacgccgatgctgcgatcggcctggaagcaacgctgcactcgatgatccggcagcatttcacgggaaacctgcaattgcacccgttcgacagcgaattctccaccgatctgcacctgcttgtccgccgggaggaccagcagctgctggcgcgcatcgatcaggcgctgcgcgccatcaccctcgaagagcacgcaggcctgctggagttgtgggcgcagcagatgctgcccacatccatcgagagcgcactggtccgggtgcgccccccgctccagctctggctgctgtgcctggccgcggcactcatcggcctgcccgtgctctggcaggcgttacgctggcgaatcggccgcgcggaacaacgcctcgggcgcgcggcggggatgatcagccatgaagtgcgcaattccgcgcagacagtactggcttcgatcgacctgctgagccagtcacacctgcccaaggggcagcgcgaactgctcgcggcagcccttgccgccggccactcgctgcgcaggctgctcgatcgctcgctggcgttctcgcgccttgccagcggcagcttcaggccgcatcccacgccctgcgacgtcggccaactctgtgcccgtgcactggaagcaatccggccggaggcactgcagagagggctgtcactccagttggatcgcgcgcccgatccagcgccggtggttgtgctcgatgctgatggactgcgccagattgtcgacaacctgctgggcaatgcactgaaattcaccgatgtcggcggtatcgaggtgcgcctgcaactacaacccgccctgtctccccgggagctgttgctggatgtgatcgacagcggcatcggcatcgcacccgctcaactggcgcttctgttccgaccattccagcagaacgaggagggccagagacgtggcggcagcgggctgggcctgacgattgcgcatgaactggccgttgccatgggcggcaacctgaccgcacacagcgtgcatgggcgcggcagccgtttcaccctgcgattgccggtccgcgccgttcacggcgatcagccgcccatcgagccgctgcagcagacgccactgacgggcatcgacctgctcctggtcgaagatcacccactcagccggcatgtcgtcgcagagcaactgcgtcggctgggcgccgacgtacgcgcggttgccgatgccgacgccgcattggccgagcatgcgctacgaccgcgcggcacggtcgtactggatatcgggcttcgcggctcggatggctatgcactggcgcagcagctgcgcgcgcaggcacaggcacctctgcgagtgattgccctgtccgcccgcatggggcgccggcacgcggcacgctgccgaggggccggcttcgacgcaatcctgatcaaaccgctgcaggttgcgagcctgctgcaggcgctggacctgccggcctcggcgcacggcactgcgcccgatggcacccctggcgccgcgccggattacgctgcggacattgcccatgagctggccaggattgaacaggccgtgcaggacgccgatgcctcgacactgcgccatcatgcacaccggctgcagggaacgctgcagatgtgccgggcaacggatcaggccggcacagcggccgacctgtgggaactggggcatgaggccgcgcctgactggatcgaggcgcggcggctgctgcggggattgcagcagtggcacggctcccgcaaggcggaagccgcaccatcgacctga

SEQ ID NO: 503871 - DNA, 138 bp, Stenotrophomonas maltophilia
atggttacgagccggtacgcgctgcgtaaggaaaggcgaggggagcccgtgagcgggctccctttttttgtcgtcgggaacgcccatccacgcatggcgtggatctaccgggtgatcgggttgcaggccctgcagtag

SEQ ID NO: 503872 - DNA, 759 bp, Stenotrophomonas maltophilia
atgttgccctccgcttcaggtgtttcgcggacgttgctgatcgcatcggcctttttctctgcattttccgccaatgcggcgtcgacatctccagtttcgctgacccacgcggccgagaacgcctcgctgatcgagaccctgcattccagtagcgacggtgctgcagtgacatcgatgaagacgcagtacttcgccaacgaggaaatgtcggtgagctgggacgaccagcaggtgctggtgctgtgcagtgaagcggcgtacctgcagattcctgccgccaagctcaaggccggagcgttgacctccgagcagcggcagatgatcgtctatcaggcactgatgtcaggccttggggttgtcgcgggcgtcgtcgggccggcaggcgaggtggtggccgtggctgatgacggtagcgagactcgcagcgttggcgaaaacaggtgggcgtatggcgtcgagcgctacgacgtcatcacccagcggctcccggatggtgcgcttcgggtacgaacccgcaagacggaaaccgtgaataccacgccgccggccggtccggacgacatgctcagcaccgaagacgaccaggcggcacgcctgtccgagttggcgccggtgggcagctggaccgaggtggttgtccatgaggggccgaggctgccgcatgtggatccggcaatgtcgttgaagggctggatctcgatgggggacgaccaggctgcgaccgtggctgaggcgcgcaagctgcacgactgcaagtaa

SEQ ID NO: 503873 - DNA, 624 bp, Stenotrophomonas maltophilia
atgaacgggatttcgtgggtggtcgcggcagcgctcgcgacggtgctgggtgggtgcgcgacgctgaaggcacgaccggatgttccactggccgcggacgagggctacgtggtgatgtcggtgaactgcgccaccagcaacatcaggctgatcacgatctttgccagcggcacgcggtcgacgtcgccgttggctgacctgcgcggcgaattcgagttcggctgcagggccggtctggccgccatccgcgccaaggccgggcgccactatgtcggctacctgaccgaacatggttatggatacgtcggggcggtgcccgaagacgaagcgctgactttcgacgtgcgcgcaggcgaaacgacctacatcggtgaggttgtggtgtctggactgttcgaccgcctgcactcaaggccgacctggatctcggtacgcgatcgcgaagcggagtcgttacggctgttgcagcagacgcagccctggctgctggaacgccatcccttccacacccggctggcgacaccagcgccgggtgcgccgagcgccgaagtgctcgccgagcagttccgcagctgcacgccggcgtgcgacagcatcctggccctgccgctgttcatccgctga

SEQ ID NO: 503874 - DNA, 636 bp, Stenotrophomonas maltophilia
atggcagccctgcagtcggagatggaccaagcgcgggagatccgcgtgcttgagcggatccccaggcgcggacagatcaagggaatcggcatgaccgacgcccatatctacactaatgccctgcggcgcaagttcgattacatcaatacctacttccacaagcgccccatgctggacatccgtcacccagccgcacactacctgggaaaatatgactttgttgtcagctcagatgtgctggaacacgtggatgggccctgcgagcgcacgctcggaaacctgcgtgcattgctgaagctgggcgggcttctcgtactctccgttccctatggctttcacgacgtgacgatcgagcactttcccgaactcaacgactaccatatcgagggcaagggtgcggatcggaccctcgtgaacatcacccgggatggcagggaacagcgattctccgacctgtgcttccatggcggtgacggttcgaccctggaactgagggtcttttcgtacccccatctggtacgattgctaggggaagccggctttgttgacgtcaagctgcacgatagccaatacccgcaatggggcatcatccacgacagcctgctgggcttgcctataacggcacgcgctgcatag

SEQ ID NO: 503875 - DNA, 1269 bp, Stenotrophomonas maltophilia
atgagtgactcgatcagcgccatcctcgacctgcatgacgccccgcgcacgcgcaacgacagccaaggcatgctgctgtcgatggccactgaacagccgcgtcaactgggagagttgatgctgcaggcgctggcgcggccttcgccgagctcggccttcctcgacatggcactggacctgctgccggatgacgcggtgcccgcggtcgcggccgacgcgtggcgccgctatcgcgcgggcgagcgcggtgacgtgttgacgagcgtgatggagttcgccagctatcaggcgccgcaggtgctgcaggacgattgggaggcattgctggcggtcgccagtgaggatgaggtgcagttggccgcgcaggtctggcagggcctgcccagcgcgacggccgcgcattgggcgcagatcctggccgaagccgatgacgatcgcgaaatggcgcgggccagggcgctgctgctcgccgcccagtccgagacctacgccattgctcgcggctacctggtcgactgggggcggttggatgccgaggtctgggcgcactgggccggcgtcgccgaaggtccgcagccgcgtcgcctgcatggcgagcggccattgcacttccgctttggccgcgaacagcatcgcgcgcagcaggcggacgagccgagctggcgcaggcgcatctggcgcctgcacccgacctggaatggtgggcaggtgcatcacgccgggcacatgggaggaccactggaagcgctgtgtggcagctgccatgcgccgctgcagcgcctactgcggaccgatgctgccgcgctgcagccgggcgcatcgggcgagatcacgctggggctgtgcctggactgctgcggctgggaagacccgcccgtgcgcttctatcgccacgatgccgacggtctgcccacctgccatcccagccagtaccgcgaggtgccgaatacgcccaccgatagtggcgatttgatgcgggccgaggtgggcctggtggcgctcgaaagcgcgcgctggcagcaacaggactggggccagtccaaccatcggcagaacctgtcgcgcctgggcggggcgccgagctgggtgcagagtgcgtggtacccggcgtgcatcgattgcggcgaagagatgccgttcgtgatgcagctggattcgacactgccgaccacaggtgagggcacgctgctgtggggcagcggcggcatgctctacacgttctggtgttcgaagtgccaggtgagcgggcacttctggcagtgcacctga

SEQ ID NO: 503876 - DNA, 273 bp, Stenotrophomonas maltophilia
atgacctacctgatcgtcctggacccccagtccgtcaccagccgctgctacgccagcaagggcccggacggcacctggttcggccagccctgcctggtctgcaccagcatggacgcctcgcacccgctgtacctggccgtgcagcgcgagattccgcatatgggcagcaccctcaagcagcgcctgcacattccgcacgaggcggttgcctttgtcatcgaagacggcggcgaccaggggcgccagcagggattccgttcgatcgcggcctga

SEQ ID NO: 503877 - DNA, 378 bp, Stenotrophomonas maltophilia
atgaacctgtcttccctgctcatccccctggctttgtccgccgtcaccctgctggcgtcgtccgcccatgccgccgacaccgcgccggcacagtgcgtatcactgaccggcgaacaacagatcgttcgcgccggcgccgacaagaacatcctgcttcgctccggcgaagaccactatgtcgtgcatttccgcaacagctgcccttctgccgtactggccacccgcctcggcttcaagaccgacggcaaagaagctgacgagctgtgcagcgagggccgaagcgcactggacaccggtcgcggcagctgcgaggttgcacgcatcgagccgatcgatgccgagcgattcaagcgtgaggcgcgccgccgcagccgctga

SEQ ID NO: 503878 - DNA, 348 bp, Stenotrophomonas maltophilia
atgagcaccacgttcatgacctggctgggatttgctgtgatggtgctcatcgcggtcaccttcacctggcgccccgcctacgccactttgcggccaccccggcatagacctgtcgcattcctgttcggcagcctgctcttcatgctgatggcctttctatgtgcctggatggcggcaactgccatcaacaccgggcacgtccatctaagccatcaccgcgccggcaccattgatgcatggcgggacatcgagccgatgaccttctggctgatcatcgtggcggcgtacgtgttcggactgctgatcgccagctattccattgcaggcatcgcattgatgaaacggtag

SEQ ID NO: 503879 - DNA, 528 bp, Stenotrophomonas maltophilia
atggccatcgccctgatcgccgtgctgttgatcgaagtcctgctgctggtcctctgggcgccgttcttcttccgcaccggcatcgtcctgttcaatcagcgcatcgccgctacgcccgcagagctggcgcagctttcgctagccgggttggagcatgatctgccggccgatacctggctgcgcctggtattccgcgcgctgccggacggcagtgtcgcctttcgcgagagcttcacgccgagctttgccggtcgctactttccgctgatgcgcgggcgggtgatgatcgacgcacgacgcagggaggtgcgggtggtcgggcggtgcagctggttcgcgctgggcctgacactgatgctggtgcccatcatcctggtccgcccggctgcctcgccaatgctggtggccctgctgctgttctacatgggctatttcatccagcgccgacgctatgcacatgtggtggaagcagtgcgcgcacggcttcgctccgaatttccgcagcgaatggttgccgcatcgcagtag

SEQ ID NO: 503880 - DNA, 339 bp, Stenotrophomonas maltophilia
atgaccgcgccgatgagcgaacaactgcagcggctggcccaggcgcttgacgttgaacgtcaggcgctggtcgatcatgacgtacacgcgctgatccgggcgaccggtgccaagctggaggcgctgcgtgcactggaaggcacgccgccgcttggtgaggggaatcacctccaggaactggccgaacgcaaccgagccaatggcgtgctgctgtcgcgccggcgccgcgaggtcgattgggcgctgcgccagctcgggcgcaccgaggcctcatcctcctatgatgccaagggccagtcgcatacggtcactgcgcggcgcccactcgccatcgcctga

SEQ ID NO: 503881 - DNA, 1881 bp, Stenotrophomonas maltophilia
atgtccagcgtactttccaccggtactggtgccctgctcgccttccagcgtgcgttggcgaccaccagccacaacgtcgccaacatcaacacccctggctacagccggcagaaggtcgacttcgccacgtctgatccgcagaactacggctttggggacgttggcagcggcacccgcatcaccgatatccgccgtgctgccgaccagctggccatctcgcgcctgctcgacagcagcggcgagctggcacgcctgaagcagctttcgggcatggccgaccgggtgaatgccctgttctcggacccggccacgaatgtcgccggctcctggtccaacttcttcgacgccgtcagtggcctttcgtccaacgcggccggcacggccgaccggcagagcctgctcgatggcggcaaggccctggcgagccgcttcgtgcagctcaacacgcagatgaacaacctgagcagcgaggtcaacaacgggctcattgccggcgccacggaagtcaatcgcctggcgcaggagattgcgcagatcaacggtgccattggcagcaacgtggccaatgcggcgccggacctgctcgatcgtcgcgaccagctgatctcgcagctgatcggttacaccggtggcactgccgtcgtccaggatggcggcgtgatgaacgtctataccgcaggcggcaatgcgctggtggtgggcacgaccgcgtccaaggtcactacggtgaccgatccataccagcccgaacgcctgcaactggcgctggaaacccagggcaacacgatcacgctcgatcccaaggcagtgggcggaaagatcggcggcatgctcgagttccgcgataccgtgctgacaccggcccaggccgaactgggcaagctcgccgtcggcctggccgagagcttcaaccaggcgcaccaccagggcgtggacctgtacggcaagatgggcggcgacttcttcaccatcggcaacccgcgcgtcacgcccaacgcgagcaataccggtaccggcagcctcactgcgacctatggtgacctgtccaagctggaggcacagaacatcgtcctcaagttcgacggcacccagtggcaggccacccgcgccgacaccggcgccaccgttgcgttgaccggtaccggcacgaccgccgatccgctggtgatcaatggcgtcaagctggtggtcggcggcaccccggccaccaacgaccgtttcctcctgcagccgaccgcgggcgtcgccggaagcctggaaaccgccatcaccgatccctcccgcatcgccgcagcggcagcagtcaagggtacggctgcactggccaacaccggcaccgggaagctgaccggcgtcaccgtcaacgacgtatccaatccgaacctgcgcgatcctgccgcaatcgtgttcacgtcggcgaccacctacaccatcaacggtgggccgccacagacctacacaccgggccagaccatcagcgccaatggctggagcttcgtgctggacggtgcaccgaaggtcggcgacaccttcaatatcagccctactccggcaggctcgtcggacaacagcaacgcggcaaagctggccaaggtcgaggacgccaaggcgttcaacggcggcaccgtcaccctcaacggtgcgttgggggggttgaccacgcaggtcggcgcggcagcacgttcggccgagtactcgctggacgcgcagcaggtcatcacagacaaggcgcaggcagcccgcgacgagatctccggcgtcaacctggatgaggaagcagccgacatgctgcggttgcagcaggcctatcaggccgcctcacagctgatctccaccgccgacaacatgttccagaccatcctgggagccgtccgtcgatga

SEQ ID NO: 503882 - DNA, 1551 bp, Stenotrophomonas maltophilia
atggcacagatcatcaacaccaacaccatgtcgctgaacgctcagcgcaacctgtccaccagcagcagctcgctggccacctcgatccagcgcctgtcctcgggcatgcgcatcaacagtgccaaggacgacgccgccggtctggcgatctccgagcgtttcaccacccagatccgtggcatcaaccaggccgcacgcaacgccaacgacggcatctcgctggcgcagaccgctgaaggcgcactgggcgaagtcggcaacaatctgcagcgcatccgcgaactggccgttcaggcccgcagtgcaaccaactcggcctcggaccgccaggcgctgaacgccgaagtgcagctgctgaagcaggaaatccagcgcgttgccgagcagaccaacttcaatggcaccagcttgctggacggcagcttcaccaaccaggccttccagatcggcgccgaccagggccagaccatcaacatctcgcagatcaccaatgcgaatgtgcacaagctcggcgactggaccagtgcctcgaccccggcaagcgtggccggcaagactgcgaccggtggcgccgaggctgcgattccgaccacctcgggtccgtccggcaacttcaatgccattgcgacggttcctgctggtggctttgccttctctgtcggcggtatttcgatccacaccgccgctgctggcggggcggtcaatgccgctgacatcaccgcggcactggcaagcaagtccgatgcgctggccgccgccggcatcaccatgagtggcagcgtggctgccggcaccttggcattctcgcgcgccgacggcaatgacctgccgatcaccgtcaccggcgccggtgccggtgagggcttcgccactggcgcctttgtcgccaaccatcagaacggcacgccggcaattgcagctgatttccccgccatcactgccggtcagctgacgctgaccaaggccgatggcagtggcgtggtcgacatcaacgtgggtgccgcaaagaacgcctcggaacgcaatacgttgctggtgaacgcaatcaacgccaagacccacgaaaccggcgtcaccgcatcgctgatcgacgggaaggtgcagctggaaaacaaggaaggcaacttcaccattggtggctcgctgagcgccaccgcactggccaatgccaccggcctgaccgcaggcagcagtgccaccaatggcacggcgttcaccgcaggtacggcccagacaggctttgcagaactggatatctccaaccaggccaacgccgacaacgccatcctcgccatggatgcggcgctgcagtccgtcaattcggcccgcgccgacctcggcgcgatccagaaccgtttcacctcgaccatcgccaatctgaacaccaattcggagaacctgtccgccgcacgcagccgcatccgcgacgttgactacgcacaggaaaccgccgaactgacccgcgggcagatcctgcagcaggccggcacggccatgctggcccaggccaaccaggtgccgcagaacgtactgcgcctgctgcagtcgtaa

SEQ ID NO: 503883 - DNA, 1527 bp, Stenotrophomonas maltophilia
atggcacaagtcatcaacaccaacaccatgtcgctgaacgcccagcgcaacctgggcaccagcggcgccaacctggccaccaccattcagcgcctgtcctcgggcatgcgcatcaacagcgccaaggacgatgcggccggcctggcgatctccgagcgtttcaccacccagatccgcggcgtcaaccaggccgcccgcaacgccaacgacggcatctcgctggcccagaccgccgaaggcgcactgggtgagatcggcaacaacctgcagcgcgtccgcgagctggctgtgcagtcgcgcagcgccaccaactcggcttcggaccgtcaggccctgaacgccgaagtgcagctgctgaagcaggaaatccagcgcgtcgccgaacagaccaacttcaacggcaccaacctgctggatggcaccttcaccaaccaggcgttccagatcggcgccaaccagggtcagacgatcaacatctcccaggttaccaacgccaacatcagcaagctcggaagctggaccagcgcttcgaccgatggctcggtgaccggcgccgttccgaacggtggtgctgcaaaggccatcaagactgacactgcggtttcgggtgcctttggtgctgtcaccgtcggtggcacggcctacagcttgagcgtcaatggcatttcgatctatgaaaattccactgccgctgcaacggttgcaggcgccgatatcgacactgcactgaacagcgccgatgtcagcaagaagctggccgacgcaggcatcacccgcaccggtacggccgctgccggcactctggcgttcagcaaagccgacggcactgacatcactgtggctcaggccggtgccgccaccaatggtttcggcgctacgttcgtgaccactcacagcggtggcactcctgcagtagccgcttcctacggctcggccagcttcagcctggccggtagcaagggcacggcgcagatcgatctgactgctgtcggcaacgccggcgaccgcgccacccagatggtcaatgccgtcaacgccaagacccacgaaaccggcgtcagcgccgcactggttgaaggcaagctgcagctgactgacaaggaaggcaatttcactgtcgccgtcgcaggcaccaccactactgcttcgctgacccaggaaactggcctcaccgcaggtgcgtcgaccagctatgccgcaggtggcgccaagaccggctttgccgatctcgacatctcctcgaagggcggtgccgacaacgccatcctggcgatggacgcagctctgaactcgatcaactccgcccgcgccgacctgggtgcgatccagaaccgcttcacctcggtggttgcgaacctgaacacctcgtcggaaaacatgtcggctgcccgcagccgcatccgcgacgtggactacgcttcggaaaccgccgagctgacccgcaaccagatcctgcagcaggccggtaccgccatgctggcccaggccaaccagtccagccagaacgtgctgagcctgctgcgctga

SEQ ID NO: 503884 - DNA, 1341 bp, Stenotrophomonas maltophilia
atggccatcggcacgattggttccggcctcgacattcccagcctggttgcacagctgaccgccaaggaacgcgagccccgggaaaagcagatcaactcggcgggtgttgccgccagcgccaagctttcggcgcttggcaccatcaaaagcggaatgacaggtctgcagagcgcgctgaagaccctggtcaagggcgtggccacccccggcctgaaagtcagcacgccgaccgagtcgaacttcactgcaaccctggacaccagcacgaccgccggcaaggccgctgcgggcagccaccaggtggaagtcaaatccctggcacagaaccagaagctcagctccaaggcgtatacaaaggacgccgtggttggcgacggaacgctgacgatcgcatacggcgacaagtccatcagcgtgaacatcgaacccggcgcgacgatggagaagatcgcagccgagatcaattccgccgccgagagcaagggcgtcaccgcggccgtggtgaccgccgacgatggcatgcacctggtattgaccgccgttgattccggcagcaagggcgcgttgaaggtcagcgccagtggcggcaatggcggactctccgagctggcctatgacggcacatccgcatcgaagatgaccgagatggtgcccgccaaggatgcagtggtggtggtggatggtttcacccgcaccagcagctccaacacgatcaccgacctggtacctggcatcagcctcaccctgaccaaggcgaaggaaggcgagacgcagacgctgaccgtcactccggacaacagcacgctgaagaccaatctcacggccttcatcaccgcctacaacggcatccagaccacgttgaagaattccagcgcttacaacgctgagacgcgcacggcctcgaccatgaccggcgacgccatggtccgtggcctgcagcagcagctgcgcgcccagctgagtgccaacgtcaacgacctcaaggatctgggcatcaccattgccgccgacggcagcatgagccttgatggcgccaagctcgacaccgcgctggcgaagaacccggaggcggccaccaagctgttcggtgcagagggcgcgctgggcaagccgatgaccgaactgctgaagagcagcctggacgcgaccaccggcacgatcacccagcgtacggcgaccttgaacaagcagatcaaggcactggaaaagcagctggacgagctggacaagaacatggaaaaggtggccgaccgctacaccaagcagttcaccgcgatggaaaagatggtcacgcagatgcaatcggccggcggctcgctcatccagcagctcggcaactga

SEQ ID NO: 503885 - DNA, 420 bp, Stenotrophomonas maltophilia
atgtacggttccaatcggcagttcgccgagcagtaccgaaaagtcggcgtgaccacctcggtcgtcgatgccgatccacacaagttggtagcgctgctgctggccggtgcctgcgagcgcatccgcaccgctgaagcctctttgcagcagaatgaccaggcgcgcaagggcaaggccatcggcgaagcctgcgccatcgtcggccacctcaacggctcgctcgatcacgaagccggcggcgagattgccggcaatctgtcggcactgtacgacttcgtcatcatgcgcctgaccgagggcaacctgcacaacgatccgaccgcactgaaggaagccctgggcttgatggtggagatcgactcggcctggaacgcgattccggcagaccagcgccaggtcaccaaagcggtggcgccatga

SEQ ID NO: 503886 - DNA, 291 bp, Stenotrophomonas maltophilia
atgaaccttcaaactatgcacgatgcccttgatacgctggaaaccagcctccagggcgaggaccacgacaccagcgaacggctgatggccgaacacctggaagccgtggctgccctgtcgttgattgtcgagcgccccagtgatgccgccatcctcgcgttgcgcgaccaccagcaacgcgtactggcgcgcatgatctccctccgcgatgaagccgcagctcatctgaagcacaccggccgctcccttcgcgcggcgcatgcctatctacaggcagaatcactcgcatga

SEQ ID NO: 503887 - DNA, 195 bp, Stenotrophomonas maltophilia
atggaattccacgtggaaggcatgacctgcggcggctgcgcacgcagcgtgaccaaggcgatcgagctggtcgatccgcaggccagcgtgcaggcagatcccgccagccgtcgcgtgcaggtacagacctcggccagcgaagcgcagatcgtagcggcactgaccgatgctggcttcccgccgcgtacggcctga

SEQ ID NO: 503888 - DNA, 474 bp, Stenotrophomonas maltophilia
atgcgggtcatgaaaccaagcctttgcgccgtccagccttcccactacgccaccattgccgattggcttgattccgccgaggccacccagcgctgggcgggccccggcgtgccgtttcccttgccgcaggaacggttcgcgcaggtgctcgaactcgggccgaggccgggctgggcgctgctggacgagcagggccagtgcttgggctttggccagtactggatgaccgacgccggcaccgcgcacctgggtcgcatcattgtttcccccctggcacgcgggcgcggccttggccggctgctcatgcacgccttgagtgcacaggccatgcgcgaagacggtgtgcagcgcctcacgttgcgcgtctatcgtgacaacaccgccgccgtgaccctgtatcgcgacctcggtttccagcaggttgatgcgttctcgacgccggaacttctgttcatgcagcgcacgtcggcctga

SEQ ID NO: 503889 - DNA, 891 bp, Stenotrophomonas maltophilia
atgttcaaaggcctcagcgcgtttccactgaccccgctctctgaagccggcatcaactttcgtgcgtttgccggactgatcgagcgcctggccgattccgatgttgattcgatgggcgtgcttggctccactggcagctacgcctatctggagaagcacgagcgcaagcgcgtgctgcgcgaagcgctcgcgcacgccgggggtgttccggtgatcgccggcatcggtgcattgcgtactcgcgatgtgctggaactggccctggacgccgaggatgcaggtgctgcaggcctgctgctcgcccccgtgtcctaccagcccctgaaggatcacgaggtgcaagcgctgttcgaaacagtatgcgcagcggtgcgtacaccgatctgcgtctacgacaatccgggcaccacgcacttccgcttcaccgatgcactgcatggccggatcgccgcgctgcccaacatcgcttcgatcaagattccgcgccttgctgatgatccggccgatgcggccgcgcgtgttgcggcattccgtgcgtgcgttcccacacatgtgacgctgggcgtcagtggtgacgcatctgcggtgcgtggactgctggcggggtgcgatggctggtattcggtaaccgccgggctattccccgaggtagcgctgcagatcatgcgggccgtgggtagtggcgatgaagagggtgctattgccctgtctgcgcggctggcgccgctgtggtcgctgtacgaccggttcggcgggattcgcgtcatggcctgcgcggcggccctgctgggactgtgcggcgagaactgcctgccgttgccgttgcaggggctgcgggacggtgagcgcgaggaggtggaggcggtgctgggtgggctggggttgttgtag

SEQ ID NO: 503890 - DNA, 594 bp, Stenotrophomonas maltophilia
atgcctgcggacaccctcgccgcgttgcccaggtacgacttcgaagacggtgcagggcaggtgcatgtgaagatcggcgggatctggtcgttgatcggagcgcttgagcgggcgtcgggtcagccagtggaatacctgaacttgggacgcggtggttcggcctccgctaacacgcagcacaatgccctgtggccggcacgcctgcaccatgcactcgattccggcgctgatgtactgctgctgcatttcggtatgaacgagctggggcaatccacaacgctggtcaaccacaagagcatcgtcagccaggcccgggccgttggcatggacgtcatcgtcatgtcggtgccgcggcgcaacgtggtggatggcccgtggttgacaggatggaactacaccaaccgcgtgctgtggcgctctgctgttgaagcaggggcggcgttcgcacctcagcattggattgttaccgatgagcagctgggcggcatgggtgcgagccctgagtcgcccggtgctgcggcgctgttcaaccgcgccgggccggcggaattctcgcgctacggccaggtgctggtgcgctcggtcctaggctga

SEQ ID NO: 503891 - DNA, 426 bp, Stenotrophomonas maltophilia
atggaatggacgaactggctgacgctagggattgcggtgctgggcgccacgctcggcgtgttcaacgccttgtggctgatccgcaaggacacggtccgactgaaggtcagattcgtgtcgatctaccttccgcgcgacgatctctggacgggtgcggttgaggtgatcaacaccggttacctgccggtgaccattactgaggtggcatttcacttcgcccgccgctccaagacgcgatccgcagtgattgcagatctcttggagcgcaccaagctcccccaccgcctcgagccgaggaccgcgatcagcattgctacaacccctgagatcctgggaagaattgaagccggccaccacacctggtgcagcgctgcgactgcctgccagactcgcgtcttcgccaggatcaagtggaagaagggctga

SEQ ID NO: 503892 - DNA, 417 bp, Stenotrophomonas maltophilia
atgccgtcctgcggcagggcaagagcgctgcaggtgctatcgtcgccgctcgccgtgcagcgcgcgcacaagcaggtgctgcatgagtgccccaacttcgccatcatcgaagtgcgtggctgcggtatgcgcctgcgcgccatgaaggacgagggcggctggcgcatctccggctggcgacgaacccaaggcgcaaaggccatggtcatgttcgcggctgcggataccacaccgaccttcagggagaccgccggccagcaccaccacacattctgcgctcacatggtgatggctggtgtgccattgcgtcgcgttcagctacttgcgggtcatgcagactatgcaaccactgagaagcgttacgcccatctaactccagacggagatgacggcgccgtctcaaagctcatgtactga

SEQ ID NO: 503893 - DNA, 888 bp, Stenotrophomonas maltophilia
atggaagagcctgagaagttggacctctactgctgcttgtcgtctctccaggtgggagaccaagcgttcgacttgggccatgggttgtcgattgccccgggttacacacgcgtcatgtctagttcaatggttgccgttgagcgacctgcagcaccaggccggcatcatcctggtccttgggccgcaaccgggaatggcttcgctttcgactccgaggcagttctttttatccccgcaggctacaggcgtgcgaagtctgactccggagccgtcgcaaggtacatagcaggattgctccgcctctgggtcgatcctcggattcgctggactctggcgtcccacatccctcctcacagaattcaatgtgcgcctgagaaggagagggtccacgttgcttctgcggtcgaggtgcagccttggtatttcgagctccatccggcgactgaaagggataccctgaaagatctggagtggattcgagatcactgggaagccgcaatcgatctcgctgaatcgagtgcatcattcagcctggcgttggacgcgattttcaacgttcagttggtccacagctctgccctcgggcttgtctctgtctggggcgcacttgaagctctttttacgggggcaaatagcgagctcaggtttcgcgtatcagtgatgatcgctgcatacctgaaaccgccggggcccgaacgaatcgcccagcataagcgagtaatgaagctctacgacgcgaggtctgcagcagcccacgggtcgccaaagcattcctcggaggacttgctggcatcgctggagttgctgcgaaaggtcatcataaggatgatcgagtccaggcgtgtaccgacaaaggaagagctcgagagccttctgtttggtgagtag

SEQ ID NO: 503894 - DNA, 3090 bp, Stenotrophomonas maltophilia
atgtaccgaccgttgttcgcccgcagtcgcttgtctgtcgcgctgggttcggcattggtgctggtggccgccgcaccggccatggcgcagcaggccgccacacaggaacagaaggccgagcccgccagcagcaagacccccgtgcagctggaccggatgaccgtcaccggctcgcgcatctaccgcgccggtttcgacacgctcgagcccgccgcggtggtcagccgtgaatcgatcgagaactatggcgacaccaacctcatcgatgccctgacccggattcccggggtcagtgccggcgtcagttcgcgcggcgaccaggccggcttcggtgcaggcgtcaacttcgccagcaagttcgggctgggcagcaatcgcctgctgaccctggtcaatggacgccgcttcgtcacctctacaccgcccaccatcttcggagccggcggcggctcgggcatccaggtcgacatgaacgccattcccagcgtcatggtgcaacgcattgaaagcctgagcgttggcggtgcacccacctatggctcggatgcgatttccggcgtcaacaacatcatcctgcgcgaccggttcgagggtgccgaagtcgagctgggctacggcaggaccagcaagaacgacaacgagcgctactcctggtcggccatcttcggtaccgacttcgctgatggccgtggccacatcgtggttgccgccgagctggacaacgccgatggggtgaacgcgctgcaacgcgatttctaccgccagggctacagcctgcaggccaatcccacggcggccaatgccactgcccagcccctgcgccggccgaccaatgatggccgcatcgacggcagcattccgttcaacaccgggccccgcgatggtatccccgaccaggtctggatccgcaaccggcgcattgccagcatgaccttcggtggcctggtgatgccggcgaccggcagctacacgcgcaacggcctgggcgacatccttggcttcggcccgaacaaagacaaactgtggcagttcaacaacgagggcaagctggtcgagttcaatcccggcaccagctacgcgggcggcaacgcctccggcggtgacggcctgaacctgttcgagacggtgccgctgatcgccgacctcgaacgacgctcggtattctccaccggcagcttcgacttcaccgacaacgtgcgcggcttcttcgaactttcgcgatacgaagcgaccgcccgcgaaaccctcgaccagaacgtctacaacgcggtgtccttcggcaatgcgcgcctggacggcggcggtaccgccagcggtgcactgaccttcagcgccagcaatccgttcctcagtgcggaaacccgcaagatcctcgccgacaacggcatcacctcgttccgcctgtcgcgatcttcgcgcgacctgtcgatgaacaacgccagcaccgaaacccgcctgacccgtgcggtgctcggcctgaacggcttcttcgaggtcggaaagcgcagcttcaactgggaagccagcgtcacccacggccgcggtgacttcgactacctcggcaccggcctgatccagcagaacttcatcaatgcgatcaacgtcaccaccgacgccagcgggcgcatcatctgtgatgccacccgcccgggcaccacggccgatgcgaactgccgcccgctgaatctgttcggcgagaaccaggcgtcgcgcgaagccctggactatgtctccacccggaccgtggccaaggcgcagacccgccagaccgtcatcaatgcgtcggtatccggcggcctgttcgatcttcccggcggcgagctgtccgcggcggccggcttcgaacaccgccgcgaagaaggctccttcacccccagcgagtaccagcgcctgggccagggccgttcagtgccgacccaggcggcggaaggcgagtaccacaccaatgaagtgttcgccgaagtgctggcaccgctgttcaatcccgactgggatatcccgggcctgcatcgcctggacctgaccgccaagttccgccgcgtcgacaattccgtcgccggcgcgttcaatgcgttcacctacggcatccagtacgaaccgatcgccggcctgcagctgcgcggcaacaagacccagtcactgcgcgcgccctccatcgccgagctctacaccacccagcagccggcctactacaacatcccggaagtgtgctcgctggacaacatcagcggcggctcaaatccggcggtgcgtcgccgcaactgccaggcgttcttcgccgcctacccgggtgccgatccgaacactttccgccagcagccgaccaatacgctgggttcgaccaacggcagcacccgcctgcagaacgaaacggcgaagtcgtggacggccggcatcgtgttcgccccagaatggatcccgggcctgcgcgtcgccgccgactggtatgacatcaagatcaacaacgtgatcacgtcgctgagcgccaacgacatcatcaccggttgcttcgacactgccgacttcaacgccgccaacgtgcccaacgccaaccgcttctgcagcctggtgacgcgtgatccgaacaccggcgtggctaccagcatcaagaccgagtatggcaacggcccggtgctgatgttccgtggctggaccgccgaagtcggctaccgttgggacctgtcgcgcttcggcgtactggacctggacttctacggctacatgccgaagaaccgtggccaggccgcgaaccgggacgtgccgttcgtcgaacaggcgggcagcttcaacgagcccaagcgccagttccgttggaccgcccagcatcgcatcggcaactggaactacggcgtggcctccaactacaccagccgcgcccagtacacgatgaccgataccccggaaagccgtcagtacttctaccgcgacagctggaccacctgggacgccaacgtcacctaccgcatcaccgacgccgcgcgcgtgacgttgtcggtgatcaacgtgggcgatgacatcgggccgttcccgtatgtgctggatgcactgggccgtcgctacatggccagcctgcgctacaacttcaagtag

SEQ ID NO: 503895 - DNA, 291 bp, Stenotrophomonas maltophilia
atgaggcagctatatgccggcagactgcagcaatcagatgctgccgacgcactggccgaactgcatatggttcgacgtgagctggccgatctgccgccagcccgtgtcatctggtcgctcgaggatcgaacccagcatccaccgtggggagacgatatcgctcccgacatcgacagcctggcgacctacttcgtgaccgcacatggacgcgatctgattgctcttctggctgaggtatttgaagcactccaggaaggcgaagacacgtccgcccggatcgtcgactactga

SEQ ID NO: 503896 - DNA, 906 bp, Stenotrophomonas maltophilia
atgctgccgctggaatccttgaatggcctggtgacgttcgtcacgaccgcacgcttgggcagcttcaccgaggcggcagacgcgctgggcatctcgcgctcggcggtgggcaaggccatcgcccgtctggaagcgcggctgggggtgcgcctgttccatcgcactacgcggcgcatcgcactgaccactgatggcgaggcgtactacgcctcctgtgcgacggcgctggaagaaatctccgcggccgaggcctgtctgggttcggcgggcctgcccagcgggcggctgcgcattgacatgccgtcctcgttcgggcggctggtggtgctgccggtgctgctgcggttgtgccggcagtacccggacctgcagttgacgatgaccttcaccgatcacttcgtcgatcccgtcgaagagggcatcgatctgctgatccgttttggtgggctgcaccatgccgagcatctggtcgcacgccggctggggcgccagcggctggttacctgcgcagcgccggcgtacctgcaggcacatggcgtgccgcgcacggtggaggaactgacacagcatcgcagcatcgtcggcttccgccacgggcaaccggtgtggtggcggatcggtagcgaggatgacgaagggacattcatcccgaatgcgccgtatcaactcaatgacggcgatgcggtgattgaagcggccatcgccggccttggcatctgccagatgcccatttcactggtgcgccgccacctggaatccggcgtactgcaatcggtgctggacgagcacatgcagcggcacatcgacatccatgcgctgtggccaccgacgcgccacctgcggccgaaggtgcgctacgtggtggatgagctgacccggttggcgggtgagggcgtgtttgactga

SEQ ID NO: 503897 - DNA, 663 bp, Stenotrophomonas maltophilia
atgctcgccgatctcgaacaggcttccggccagaccttcccgccgttgttccgccagctggtggaagacaaccgtttcagctggggcgagcagggcccgaactggtaccgcacggtgttcccgcaggtgcagccgcagccgccggtactgctgtatgccaacgactatgaaccgatcgagccgagcgaactgcgcgcagcgtgggaagatctgactgccgaagatcattacaacccgctgcgcgatgacctgaaactgctgccgttcgcgcgcaccggcgcgggtgatcattactgtttctggaccaatgcaccgggttccagcgagtcgccggtgctgctggtctggcatgacgatgatcgcgccgatctgctggctgcgaacttccaggacttcctgttccgcaagatggccgaagcggtggtggagctggaggaagaggattcgctgctttcggagggcgatatcggaaccaatctgcaggcttggctcggtacccatcgtggctggctgcgaggggaccaggtagcggcgctggaggcgttgtatgcacgcgtggatgacatcactgcgggtgagatcagtgacgaggacgtgcagccgctgttgcagctgatcgcgttcgacggtatcgacagcgaaatgccctacgtgcaggcgtga

SEQ ID NO: 503898 - DNA, 1257 bp, Stenotrophomonas maltophilia
atgacgaagatcaaggacccggccaccagccgggcgcagactcgctgcatggcccgcctgccctcccctgcgatgctgatgcgcgcgccgcaccggctgctgttcttcatcggcgccagcaacctgctgctggcaatgctgtggtgggcgttgtggctgggcgcattgcgcgggttgtggacgccgcagccaccgccgctgcctccggcctggctgcacgcgctgctgatgcagtacctggtactgcccagtttcatcttcggcttcctgctcaccgtgttcccgcgctggatggcacagccggagctgccacgcagccgttatgcgccggtcggcatcggcctgtttggtgggcaggcgttgctgattgccgccgcctgcgggtggacacccggactgtggcccggcctgctgctggcactggccggctggagcgccggactgatcgtgctgggacgcgtgctcaaggccgccggtcccaaccgcaactggcatgcgcgcgcctgctatgccgcactgctgctgggctggctggggctgctgctgttcatggcggtggggcgcggccacgccacgctgatgccagtcacggtggcactcggcaccttcggcctgctgctaccggtctacctcaccgtcgcgcaccggatgatcccgttcttcgccaacaacgtggtggatggctatgtggcgtggcgcccgctgcgctggttggctgcgatgtgggcgctgctgatgctgcgcctgctgttgagcgcgttgcaggtcgaccacctgctgtggctggccgatgcgccgctgctgatgttgtcgctgcaggcgctatggcactggtggccacgcgggccgatgccgggcctgctcgcggccctgttccttgcactggcgtggctgccgatcagcttcgcgttgtatctgctgcaggacatcggccagatgctgggccatccgcaactgctcggccgcgcgccgctgcatgccctcgccgtgggcctgttcggcagcctgctggtggcgatggtgacccgggtcacccagggccattccggccgaccgctggtgatgccggcagtggcctggtttgcgttcgtcgcgctgcaggcggtggcgatcatgcgcatcgctgccgaactgatgcccgacgcccatgcgtggcatttcgccgcagccatcggctggttgctggccttggcaccgtgggtggcgcggctcggctggatctacctgtgcccacggcgcgacggcaagccgggctga

SEQ ID NO: 503899 - DNA, 606 bp, Stenotrophomonas maltophilia
atgatgggcatgtccgatatcccgctcgatcccaccgcaatcaccaccttcgccgatggcgaccctgaggagaatccctgggttctcggcgcgccgcagccggaagcgctgcaggtggtgccctggtccacgctgtgggccgaccagttcgagcagcagcgcacgcagctgcaggcgacactcggcaacaccgcgctgggcattgaacatgtcggctccaccgcggtgccgggcctgccggccaaaccggtactggacatcgacctgctggttgccgatcccgccgacgaagcggcctggctgccagcgctgcaggcactgggctacgtgcttaccatccgcgaaccctcgtggtaccagcaccgcatgctgcgactggacgtgccgcgcgtgaacctgcacgtgttcgcacctggttgcgccgagcacctccgccactgcttgttccgcgattggctgcgcagccatgaagatgaccgcaggcgctatgcacaggccaagcaggcagcactgcagggcaatgccaacgtgcaggcctacaaccgcagcaagcaggatgtggttcgcggcatctacgcgcgcctgttcgcagcgcgcgggtggtga

SEQ ID NO: 503900 - DNA, 168 bp, Stenotrophomonas maltophilia
atggctaagttgaggaagggttccaacccaccactggaccagttggtcgtatccatggagaacgcgaaccccaagctccccgagggcaggaagcgtccgccgccaccgcccagcccgccccggccgccagccgaagccgggcccaaccggcgctcgccgcgcggctga

SEQ ID NO: 503901 - DNA, 651 bp, Stenotrophomonas maltophilia
atggattcgctcttcaacaacgccaccacgctgctgacctttctgctgccgggcttcctgtctgcatgggtgttctatgggctgacatcccatcccaagccgccgcagttcgaaaggaccgtggaagcgctggtgttcaccttcgccgtccaggtgctggtgaagttcaccgaactgttactcctgctggcgggtcgctgctttgtgctggggacctggacccagaccagcagcctgctatggggttttgtcctcgccgcactgctgggggcaggattggccctcgctgcgaacaaggattccctccacagggttctccgtcgtgcaggcttcaccacgaggacatcccacccgagcgagtggtactgcgtgctgggtacgcgtcctgccttcgtggtgctgcaattgaaggatggccgtcgattgaccggctaccccaaggagtggccgatcagccccgctgcgggacagttctacatgcagatgccggcctggctggtggatgcggatccacccgatgaaggtgccgatccagtagcggatcacgtggccagccccgccgtggtcgagcttccgcagctcgatggcatactgattcacgcagtggatgtgcagtgggtcgagattctccaggagacagacgatggctaa

SEQ ID NO: 503902 - DNA, 534 bp, Stenotrophomonas maltophilia
gtgccgactaagcgccttgcgctgatcggttgtctgtccctgcttgcggcatgttcgccgcaggcagcggacaatgctgccgacgccacgccagccgaaccggccgtgaccgccgcaccagcggtggaggcaccggccgccgtggaggccatcgccgaagcggagcccgctaccgagcagccctcgggcgaagaggacctggacaaggtacgtgcagccgcaggctgtccggtcccggaggatgtgtatgacgtcgacgacgtgcgcatctactgcgcgatgccggccgacgtgcaggccttcctcgcgcgcgagaacacctgccagcatttcgccggcgaagagccgtacgacgacgagcgtcgccgtgaactggaagaggccagcgccaaatactgcgaaggccgcgagaagaacttcaccgatctggtcgcgcgtcatcgcggtgactgcgctgtccgcgcagcgctgatcgggatcaacggtcgctatgacctggacttcgatctcgacctgaagccctgcgggggctga

SEQ ID NO: 503903 - DNA, 1050 bp, Stenotrophomonas maltophilia
atgcgattgcccctgctggccactctgttggcactggcctgccccctgacggcccttgctgcggctccggccaagagtctgtatttccagcaccacgactgggtcgtggcctgtgacaacaccttgacctgccgcgccgccggctacgccaccgacgatgacagcaccctgagtgtgctgctcgcccgcaagggcggcccggatcaggccatccagggccgcctgacgctgcagccggaagaaggccagacccagcccaagggcgcactgcatctgcgcatccagcagcaggatctgggcgttctggcaaccgcaaagggcgaacgcacgcacagcttgaatgccgctcagaccagcgcactgttgtccgcactggtacgcgatggaggaatcagcgtgaccgatgacgctggccatcgctggccgctgtcggacaagggtgccgcagcggtactgctgaagatcgatgagtaccagggccgcctcggcacgcccggcgctgtgatgcgcaagggcagcacgcctgagtccggcgttcccgccgcactgccggtgccggttgtgcgcaaggccgcaaccctggactcaactccggatgatcccgcgtttgctcggctggccgcctcacccgccctgcgcgcagcactgcgtgccacgctggaggacgacagctgcgaaggcctgcaggaaactgatgccgacgttccgctcagcaactccccactgcaggtccagcgcctggacgcgcagcatgtgctggtcacggtcccgtgttggcgcggggcctacaacatcggcgatggctattgggtcgcgcgcccgcaggcgccgttccaggcgcaatgggtgaccagcgatgcgatcgactacgccgacggccagatcattgccgcgcagaagggccgcggcctcgctgactgcatgtcgcacgcagcctggacgtgggacgggacgaacttcatcgcgacgtccgaggtggcacctgggctatgccggggcgtgcccggtggcacctgggaactgccgacgctggtgaccgaggtccgctga

SEQ ID NO: 503904 - DNA, 1218 bp, Stenotrophomonas maltophilia
atggacagcgacaaccgccgtggccggcacgcgctgctgggaatggatcacttcgcgttggtggcgttgaccctgttgctggggggcagcgtgatcgccctggtcggccagtacaccgccgcccaggccggcccggccatcgtactgagtctgctgctggccgcactgggcacagcgccgatgctgtattgcctgcacgagctgaaccagcagcacccggaagccgatggcctgtacggcccgctgcgggccgcctggggcacggcagtcgcgcgcctgctgggtgctgtgctgctgctggagctggtggtgaccagcgccggcgtggcgcagtccatggcgggccacgcgcgcgcggtgtttgccagtcgcggtattgaaaccggtagcgcattgccggatccggtgatggccgtcaccagcctgctggtgctgggtgcgttcgtgttgctgcctccgcgtcgcatcgcgctgatggtctgcgtgctgttgacggtgaagatcggtgttgggctgttgctgctggcgctggcggtccgccacgtgcactacgcgaactggatcccgtggctgccggacgccaccgcgccctatcggttcggacccggcggggtgctggcggcaagcgtgcccttgctggcggtgtttgccagtgtgggtctggcattggggtttcctgggcgtggcccgcaggtgcgtgcgcggtcaccagggctgctggcggccgcgctgctgctggcaatgctgctgctgatcgtgctggcggcgttgcaggccggcctggtcgagttcccggcattggccggtacgcggccgttgtcggtggcattgcagggccatccgcagttgcagtggctgctgccgttgctgccgctggcgggcatggctgggctggcagcactgctgctggtgctgttgtcgttggccacacagctggcagcgcagctctggcctgtggccgtggatgaagcgcccgggttccggacacggctgataccggtcaccgtggtgctggcggcgctgctggcgttgggaacgcccgtcgatgcattgccggtgctgccaggtccggcaaccctgctggtgatggcggctttgtgcctggcagtactgcgtgtgcgcgcgccgatgccgggtgctgcgatggtgcttgcgcccctggccgcggcgctgtgcgtgctggccgcagtggagcgggcaggcgcgtggccaggctga

SEQ ID NO: 503905 - DNA, 450 bp, Stenotrophomonas maltophilia
atggccagcccaagactccgctacggtcgttactcctgcaccggtaacgtctattcattgactacggtaaccctcgatcgtgaacccttctttgccgatgcttccaacgtagcgattctggttgaagcactgcgcttcgtagagcgcaagggcgtgagccacagcttcacctgggtggtgatgcccgaccatctgcactggttgatggaattgcgcgggggaaccctggccgagtgcatggccctgctcaaatcacgcagcagccggctgctgaatcggcgattggagcggcgagggtcgctgtggcagctcggttaccacgatcacgccgtacgcagcgatgaatcccttcacgagaaggcgatgtacatcctggccaatccggtccgtgcgggcttggcgtgcgtgatgggggagtacccgtacgcctggtgccgctggccgttgtga

SEQ ID NO: 503906 - DNA, 633 bp, Stenotrophomonas maltophilia
atgcccggcggaatgcagagcgccgcgctgcgcgctcgccgggcatggcccggcgctacccgatttcacaacccccgtggtcgctacatcgtggccggccaacgcctcagcgcgactgcacgaagccggcgtacagcgcgaacagctgccggaaataacgacgcgtcactcgattgcgcatggcaccctcgccaatggaaagttggtcgggcccagggcaggaaggccggtccggtcccttcccgcggccgggccacgtgggcgtattgggccgtagtggcgttgcagggtaatgaccgcagggctgcaactcgaccggtagcgccaggccatgcctggcggaatgccggatacctcccgcgctgcgcgctcgccgggcatggcccggcgctacccgatccggtttccgcgtggcggaaacagaaacgcgccccggggggcgcgcttctgcagccggaatcggaaagaaggcttacgccttcttttccgcttccagctgcttgcggatctgcgcatcgaccgcagcaatcgcggtcatgttcaggatcctgcgcgaggtcgcgctggtggtcaggatatgcaccggcttgttcacgcccatcaggatcgggccgatcgccacgccgtcggtga

SEQ ID NO: 503907 - DNA, 2970 bp, Stenotrophomonas maltophilia
atgacttcacgtaccacccccctggggcaggccatccgctacgccctggcaaccactgcgacgctggccgccctgcctgcgttcgcccagagtggcagcaccgccgcgccgaccaccctggatcgcatcgagatcactggctcgcgcatccgccaggtggacgtggagaccgctcagccggtcctggcactgagccggttggacatcgagcgccagggcttcagctcggtggccgacatcctgcagaacgtgaccgccatgggcagcccggcgatcagccgtgcaaacgcactgagctcgggcgaaaacaccggcggcacctacatcgacatgcgcaacctgggcgcgcagcgcaccctggtgctggtgaacggcaagcgcctgggcatcagcacctcgggcctgcaggacgtgtcctcgctgccggtgtcggcggtggagcgcatcgaagtgctgaaggatggcgcgtcggccatctacggttccgatgcgatggccggcgtggtcaacatcatcacccgttccaacgtcaacggtgtgaccgccaacgtctaccacggccagtacagcgaaggtgacggcgcacgcgatcgcttcgacgtggtgggtggctggagcaatgaccgcgtgtcgctgaccctggcactggagcactccgaagaaaagagcgtctgggccaaggaccgctggttcagcaagtacggcgtgagcgaccgccacccgaacgatgcctccaactggaccacgctgagccagtggggccaagtcaccggcctgaagggcggcccgggctgcaccaacaccaaggacggctgcggctattcgctcaaccgtggtgctgacccgaccaacccggccaactaccacctgaccgatgccaccccgttcaccggcgacgtcagcaacgccaacgaacagatgcacgtcatgtatccgctcaagcgtgattcggtgtacttcgacggtcgcttcaagatcaccgaccaggtcaacctgcgcaccgaattcggctacaacaagcgttcagccgagcgccagattgcaggctaccccctgcagtccagctcggtgtccatctcgggcgacccgaccgccaccggcctgatgtccaaggacagctacttcaatccgttcggcaaccagcacggctatgccaagccaaccgacgtggcctggaaccgccgcacctgggaaatcccgcgtgtgagcaccagcgaactgaagacctaccgtgcggtagtgtcgctggatggcagcttcgagatcggccagcgctacttcgactgggacgtgggctaccagtacaaccgcaacgagctgaccgctaccgccaccggcaacctgcacaagcagcgcgtgcgcgatgctgtgggtccgtcgttcctggatccggccaccggcaaggtgatgtgtggccgtccgggcgcggtgatcagcggctgcacgccgtggaacccgctggtgccctacggcaagaacgatccgaacgggctgaccggcaatgaagaactgatggcctggctgttcccggcggaacgcaccaccggccgcaccaccaccaagaacgcgttcgccaacctgtccggcagcatcatgaccctgccggccggcgacctgggcttcgctttcggcgtggaaagccgcaaggaagatggccgctacacccccgatgccctggcccagaccggcgccaccaccaacctggccgcaggcccgaccggtggcagctacaacgtgaaggaagcctacctggagctcagcgtgccggtgctggccgacctgcccggtgcgcgtgagctgagcttcagtgccgccacccgttactccaagtacaacaccttcggcaacacgctcaacagcaagttcggcttcaagtggaagccgatcgaccagctgctggtccgtggtacctgggcagaaggcttccgcgccccgaccatcaacgacctgtacggtggtggttcggaaaccttcgcgcagttcagcgatccgtgcgacaccgtgttcggctcggccaaggggagtgccgaagtccgcgcgcgatgcgcacgtgacatcgccgatgccgccaacttccgccagctgaagcagggcaacgccccggtgaccacggcgcaggatgcgaccccgacgccgttcgtgtccggttcgaacccgctgctggttccggaaacctcgaccagcaagacgctgggcctggtgtggagcccgaccttcctcagcaacctcaacgtggcgctggactggtggaagatccgcatcgacaacaccatcgtcggtgacagtccgaaccagatcctgagggactgctacgagcagggcatcgaatcgcgctgcagccgcttcagccgtgacccgtccaacggcattgtcaccggcctgaagttcggcaaccgcaatgccggctttgccgagaccgaaggttacgacctggatgtcagctaccgcgtcgacaccagctacggcaagctgagcgcaggctggaccagcacctacgtcagcaagaacgtctaccgctccaccaacgatgtccgcgaagcgatcacgccgatcaacggcgttgccaacaccatcggcaccgccaccagccttgcgttccgcgtgcgctcgaacctggtgctgggctgggatgtgggtgacttcggcgtcagctggacggcacgctactactccggtgtgaaggagcgctgcctcaacgcctcgcgttatgcggacgaatgctccgatccgaccttcctggctccgtggctgaagtcgccgaccgcgtacaacgagcgcggtgcggtgaccttccacgacgtgcagctccgctacaacctgccgtgggatgccaccgtttcggtgggcgcgaacaatgtgttcggcaaggaagcgccggtgatgtacagcaagccgaactcgtcgttctcctactacggtggctacgacatcggtcgtttcatgtacatgaagtaccagcagcgcttctga

SEQ ID NO: 503908 - DNA, 1350 bp, Stenotrophomonas maltophilia
atgcaaaccgcttccaccattgcccgtctgaccctgctggccgtcggcgttgccggtgcgctggccgccgccgacgccaacgctgctgccttccagctgaaggaaaacagcgccaagggcctcggccgcgcgttcgccggttccggcagcgccgaaggcgacgcctccatcatcgccgtcaacccggccggcatgcgccagctggaaggcacgatggtccagggcgacctgagcgccatcagcttcaaggccgagttcaagggccagggccgcaatgcggcaggccgcccgcagaccggtggtgacggcggcgacgccggcatgatcgctccggtcccggctgcgtacttccacatgccgatcggcgagaaggcccacttcggtgtgtcgctgaccgcaccgttcggcttcaagaccgaatacgacaacggttgggtgggtcgttacagcggcctgaagaccgatctgaaggccatcgaccttggcttcgccgcgtcgtatgacgtcaacccgtacgtgtcgttcggcgcgtcggtgttcgtcgagcacctgaccatcgagctgagcaacgccgtcgactacggcagcatcctggccggcgccggcgctccgggcttcgccccgggcagcgcggatggcaccctgaagatcgagggtgacaacaatgccgtgggctggaccgtcggtggcctgttctcgatcgacgagaacacccacatcggcctgagctaccgttcgaaggtcgagcacaagatcaccggtggtgatgcgaccttcagcggcgccgaccgcgcacgttcgctgctgaccaactcgccgcgtacccgcggttggttcatggacaccagcggcaaggccacggtgaccatgccggcctcggccaccctgagcgtgacccacaaggtcaacgaccgctggaccgtgatgggcgacgtgacccgtaccgcctggtcgaccgcctttgacagcgtcaccgtcgactacgcgtcgccgcaggcggactcgatcctggagttcggctaccgtgacaccaccttcgtgtcgctgggcgccgactacaagctgagcgacaccgtcaccctgcgcggtggtgttgcgctggaccagaccccgaccaccgacgcccaccgcgacgtgcgcgtgccggataccagccgcaagtggctgtcgctgggcgtgggctggaccccgtcggcaaacaccgagtacaactttggctacacccacctgttcaccagcgatccgaacgtgaacgtgcgtgcgaccactgccaaccagggcaactcgctgtcgggcaagtacaaggtccgtggcgacgtgttggcggcttcgttccagtacaagttctga

SEQ ID NO: 503909 - DNA, 945 bp, Stenotrophomonas maltophilia
atggtcgagcaatcgcactcccccgccgacacgcgtccccacggcattcccgcacggcttcgccactacgctgaccgcctgcaggacagcttcccgatggccgtcgccaagcgcttcgtcgaaatcgacgtgctgacccaggccgcctcggtctccttctacgccctgctgtcgatggcaccgctgctggtgctgctgctgtggctgaccgcctcgctgtacccaccggcacaacagacgttgatcagccagatcggttcggtggccggcagcagcgtggccagcgtcgccgacaccgtgctgcacaacgccaacagccagcccagcgtcggttcattggccgggctgtggagcacgctgctgctgttcatcggcgccaccgccgtgttcgcccagctgcagaacgcgctgaaccggatcttccacaccagcggccagcgtctggaaggcatcaaggcctggctgcgcaaacgcgtgttctcattcggcgtggtgctggcactgggcttcctgctgatcctgtcgatgaccgccaccaccgcactgcaggtggtgttcgcgcaactgccctcggtactgccggcaatcggctacctgacctcgctgctgctgtacacgctggccttcgccttcctctaccactacctgccggaccgccgcgtggcctggcgccaggccttcatcggcggtgccatcacctcggtgctgttcaccctcggccgctatggcatcggcgtctacatcgccacggtggccccgggcagcgcctacggttcgatgggcgcgctggtgatctcgctggtctggatctactacgccaccgctgtgttcttcgtcggtgcgttgatgaccgcggtgatcgacgaacggcagcatgcacgggcgcaactggccagggccggggccgatgcggaacaggccagccccggcaccgccagcgagtaa

SEQ ID NO: 503910 - DNA, 411 bp, Stenotrophomonas maltophilia
atgaatagaagtgaccgcgaggtactagaagcaattcttgggggaaaaatcgagcaacgagccgatcgaatcgccccgggtataaatcctgtggccggagtggagttcatctattacgaggatttccataccagcagcgcttcaagtcagttccgcaaattgctggcctctgctggcgagttcaccgcgagcagcggtggcatcgtatcggacagctgccggataaccctacccaacggccagcgcttcctcgccctttccttccacggcgatctggatggatggcggaaggctgtggaagccggggcacgcaacctcggccttagcctggcccgcattgaagatgaccacctgatcatctccgacggccagtccgttccgctcagcgaatgcaaggtggatgtgggctga

SEQ ID NO: 503911 - DNA, 432 bp, Stenotrophomonas maltophilia
atgacgctagacgttgcagtaacagatgaacccagcgacgaagcgctggaggtgattggcactggcttggatcagttcaatcttgacgctgccggttacgccgatcggcgcacactggcggtgctggtcaccaatccggccagtggcgaggtggtggggggccttaccgggcgaacctcactgggcctgtggttcgtggatctgttccatctgccagcggcccatcgcggcaacgggctggggtcgcgtgtgctgaaggccgcagaggatgaagcgcggcgtcgcggttgccgttccggcgtgctgtacaccctcagcttccaggcgcccgacttctatgtgaagcatggatgggtcgtgttcggccgtgtgccatgcgatccggtcggcacatgcagggtgttcctcagcaaggatctgtcggcggggtga

SEQ ID NO: 503912 - DNA, 1206 bp, Stenotrophomonas maltophilia
atgcccctgaccgacgtcgcgatccgccgcgcgaagccagccgacaagccacagaagctgtccgatgctggtggcctctacctctacatcaccgtggccggcgccaagagctggcgctggaagtaccgcttcggggggaaggaaaaggtgctggcgctgggcctgtacccggacgtgaccctggccaacgccagagacgcgcgagacgacgcccggcgcctcctgcgcagtggcgtggatcccggcgagcagaagaaggcggcggcaacggccgccgtcgtggatgctgcctccagcttcgaggcgattgcccgggagtggctgacggcccgcccttgggtgccaacgtatagcaagaaggtcgaggcgtggttcgagaatgacgtcttcccccagatcgggaagctgcgcgctgcggacctgaaggcctccgactttctgaagatcgccaggaagatggaggagcgccaggcgttcgagtccgcgcaccgcgtcatgcagaactgtggccaggtcatgcgctatgccgtggcgaccgaccgggccgagcggaaccccgtcgcagacctgcgcggcgccctggtcccgcccccagaacggaaccatgccgcagtggtcgacccggtccagctgggtggccttctgcgcgccctgcatgcctaccgtggcgccggcatcgtcagcacagcgctcaagctggcgcccatgctgttcgtgcgcccaggggagctacggcaggccgaatgggctgagatggatctggatgccggcttgtggtcgattccggcagcacgcatgaagatgcggcagcctcacatcgtgccgctggcgcgccaggcggttgagatcctgcgcgaactgaagccctacaccgagtcgggaaagtacgtgttccccgctcggggcaagaaggatcggccgatgtcggaggtggcggtgctggctgccctgcgcgccatggggttcgacaaggacactgtgacgggtcacggcttccgcgcaaccgcgcgcacgctgctggatgaggtgctcgggttccgcccagacatcatcgagcaccagctggcgcacgccgtgcgcgacccgaacggacgcgcctacaaccgcacgacccacctcgatgagcgggttcggatgatgcaggagtgggcggactacttggataggctgcgcgacggcaacgtggtgcagctgcgggttgcttga

SEQ ID NO: 503913 - DNA, 348 bp, Stenotrophomonas maltophilia
atgtggcacaccaaggaagcgcgcgccgccaacgtccggcaggcgaagcgctacgcggagcgctggtgcgcggccaggctgtatcccgacctgcctctgcgtcaggctgtcgcccggctgaccgatagcacgccgatccagccgccgccgccactgccaggtctgccgccaacccgcgagcagcagcaacaggctcggcgcctggcagaggctggggcgaaggagatcgagcggatcaaggaagcgcttgaaccgcgccgacctccgaaggagaccaagccccgcccgaaggacgcgcgcaaggcgtggatgagggcagggctgcagcagatgcgccgcgacgtgtag

SEQ ID NO: 503914 - DNA, 489 bp, Stenotrophomonas maltophilia
atgctccgtcttgcttccactctcgcgttgctcatcgtcgcgccgctggcctccgcagccagcgatccgcgcgacgtggtcacccgtctttacgcggccgtccaggcgccggcttcggacgaagcgaccattccgccgttgctgggcgatgcgctgcgctcagccatcgatgcgcagcgcgcttacgagcggacctgtgcggcgttggccgcgcatgacgaaaagccgcacatgctggaccagagcccgtatctcatggcgccggatcggccggaaacggtaaaggtggggctgcccgcgacgagcggcgatggcagttgggtgtccgtcgaaatggcgataggcgactatcgctggaccgaccgtgtcctgctgcaaaggcagggccaggactggaaggtcatggacatccgctggggccagggcggcaacctgatcgggcggctgaagcagttctcggccttccgctgcaccgcttctggcggctag

SEQ ID NO: 503915 - DNA, 939 bp, Stenotrophomonas maltophilia
atgcacagcctcaccctcgccgacctggaccgcctgggccgcagcagcggcttccgctatcggctgcctgcacttgcgtccgccgcggattcgggcgcgctgtgcgtggtcgagggcagggtggaacagcgctgcttgcgccctggcatcagcctggcgctgtcggacgtggtcgcgcatcagccgttcgaggcgacttcggaggcacccccgccgttcgctgcgatcgtgatgctgggaggtcgtgccggagcacgcctggaagggcaggctgtgatcggcatgaaccgcggcgccggcgcgatggtgttggccgatgccacgccgatgactgcgattcatccggccggtcaacggatgcgcagtctgaatgtctcgctggatgcaccggccgagatggatgatccggtgatcagcgaactgctgttgcaggctcatcgccatggtcgccggcggctgcacagctggcaggtacccgcgcatcttgaacatgccgccgaacagttgctgtcggggacctggcagggcgcagtgcatgcgctgctgtgcgagggtgtgggccttcagatgctggcgatggcgttgggtgcgcctgcccaggaggcatcgccggaccagcgtgtttcagcacgtgatcgccgcatgctgcaacgggtgatcgactgcctgcaggcatcacctgcggctgaccacagcctggaggatctggcgcgcctggcctgcatgagcccgagcagcctgcggctgaagttccagcaggtgcaccggtgttcggtgttcgcctggctgcgcgagcggcgcctgcagttggcctgcgagcagctgcggcagggctgcagcgtgcagcaggccgcacacttcgtcggctaccggcacgccaccaatttcgcgaccgcattccgcgcgcgctacggcatcgcgcccagcgagcttcgctga

SEQ ID NO: 503916 - DNA, 2172 bp, Stenotrophomonas maltophilia
atgcctgcctgtttccgcccgtgtgccctggctagcgccatcggcacgaccctggcgctgttcaacgctgcccacgccgccgaacgcactccgtccgtaacgccttcccagcttccaaccgtgcaggtcacggccgacctcgatggcagcaccgaaacgtcgcgttcgtacaccaccgactcgatgggcacggcgaccggactgtcgctgacctcgcggcagaccccgcaatccgtcagcgtggtcacccgccagcagatcgaggaccgtggcctgctcagcaccgccgatgccttggcgaccgcacctggcatctcggtcacgcgcagcgacgccaaccgctactcgttctccgcacgcggcttcgacatcgacaactaccagttcgatggcgtggtgatgccggtgctgtcgccgtggaatttcggcgagaacaacctggacatggtggtgtatgaccgcatcgagatcgtgcgcggcgccaacggcctgatgaccggcgccggcaatccctcggcggcggtgaactatgtgcgcaagcgcccgctgcgcgagttcgctgccagtggtggcatcagcctcggcagctgggacgcacggcgcgcctgggtggatgtgtccagcccgctgagccgggaaaggcgtgtgcgtggtcgcgtggtcgctgcgcaggcagagggcgacagctacaccgctggcctggacagtacggcgaagacgctctacggcgtggtcagcgtggacttgggcgaggacaccgggttgatcgccggcatctcctaccagagcaacgacaaccgcggcttcggcagctgcttcgcgctgttcaacgccgatggcacgcgtacccgcttcgaccgctcggtatcagccaccgcgccgtgggcacggatgagcaccgatacccgcaacggcttcttcgatttcaaccatcgtttcagcaacgactggcaggcgcgcgtctcctacagccgatcgcataccgacatggagatgaagcatctctatcgcggtggctatcccgacccggtcactggtgccatgcccaatggcaacagcttcacccgctacgacggtccggtgcgccgcgaagcgatcagcgccagcctgaccggtccgttccagctgttcggccgccagcacactgcgtccatcggctggtcgcgttcgcgtgacgagatcgcgctcggccagtatcgcgcgctggcgccgctgccgccgctggccagctatctggactggcacgggccgggcacgccggagccgacgtgggccagcagcaagacccaggccgatgacctggacaaccatcagagcggtgcctacgcggtggcgcggctgtcgctggccgatccgctgcacgtgatcgtcggtggccgcatgagcaactgggagaccgaccaggtctactttggcaccaagcggaagtaccgctaccgcaacgagttcgtaccgtatgccggcgtggtctgggacctcaacggctacagcagcgtgtacgccagctacaccggcatcttcaagccgcagaacaaccgtgatgaatccgggaagatcctcgatccggtcagcggccgcagctacgagctgggcctcaagggcagctggctgcaggagcgcttgaatgcgtcggcggcgttgttccgcacccagcaggacaacctggccgaggccactggtggtctggtcgaaggcagcacgcaggcggcctaccgtgcggtgaagggcgtaaccgtggacggcctggaactggaactggccggcgagccgctgcctggctggagcctgggcaccagcttcaccaccttcatcgcgcaggacgcgcagggccgtgcgatcaacactgccaagccgcgcagcctgttcaagctgttcaccacctggcgcctgccaggtgcctgggaccggctgacgatcggcggtggcgtggactggcagaaccgcatgtaccagaccgccaccgcgccaaggaatcgccgtgtgccggtggagcagcccggctacgcgctggtcaacctgatggcgcgctaccagttcagttccaacgtgtcggcggcggtcaacatcaacaatctgttcgaccgccactattactcgcagatcggcttctacaaccagggctggtacggcgcgccgcgaaacgtgatgttcactgtgaagattggctattaa

SEQ ID NO: 503917 - DNA, 300 bp, Stenotrophomonas maltophilia
atgaacgcccgcaccgccatcaacaccctcagcagcctgctgttcctgctgctggtcgcccacaccaccgcctaccagcagcagatgtggccgcccagccgtgtcgtccacgtgcatccggtggtcgtcgccctcgcctacgcgctgggcctgctcaccctgctgctgtggatcggaggacgccgcttgccggaacgctgccagcagctctcaggctggctgccgatcgtggcctggtgcctgctgggggttggtgtggcggtcatcccgatgttcttcccgggcctgtccccggcctga

SEQ ID NO: 503918 - DNA, 1023 bp, Stenotrophomonas maltophilia
atgaaacggaatccatcgggtgcggccgacaacgtgatcgccagcgaggccatggactggttccagcgcaatcgcgagggcgtgctgggcgaagccgagcgggttgcgttgctggactggatgaagcgctcgccggagcatgtgcgcgcctatatgcacgccctcgcactgcaccggcaggttggtgaggcgctgcaatcggcattggctgaagaggcctcggtgccgccacagcaggccgctgccaaggtcgtgccgctgttcggacacgcacaggccccgctgcgcagtgcgccgcacagccgtcgcacgcgttggtgggtggcggctgccgcagcctgtatcgccctgctcggcgtgggcctggttccgcagctgatgcctaccgagcagctttacagcgccggacatggagaaattcgcgacctggtgctgcccgaccagacccaggtgcggctcaacgcggacagccgcctgcgggtgcgcatgggcgggttcagccgcagggtggagctgctgcagggcgaggccacgttcgacatcgcccaggaccgacggcggttcgaggtgcaggtgaacggattgcagatccgcgatatcggcacggtgttcgacgtgtcgcgacggctgcagggcacccgcatcggtgtggtttccggcgaggtggaagtgtggagccacggtgcggatgcgcggcgtcttgcacaactgggtaaaggccaggtggtgcaggtcgacgcgcgcagccatgcggtcgagtcgttggatgtgccgttgtcgatgctgctggactggcagcaacgcaaggtctctttcctggacgagcggctggatgaggtggccgccgccttcaaccgccacaaccaggtgcaggtgcgggtgctggatgaaggtgcggcgtcggcacggttgtccggcagcctggacgcgcatcgcatcggtgcgctgcaggccttcctcgagcgcgatccgcgcttcgtggtgcggcgcgaaggcgacaccgtgcgggttggcagtcgctga

SEQ ID NO: 503919 - DNA, 2934 bp, Stenotrophomonas maltophilia
atgcgcaacacgctttacctgtcgatcatcctcgccctgtctccctgcagcgtgccgctggtggctgcggccactgccgatggcctcgaggcccgcgtttcggcgccgatcgcagcgcagccgctggcgcgcgcgctggagcagttgtcgcgcagttccggcgtgcagttcctgtattcgggcagtggtgaagtgcacatggccggggcggtgccgcgcggtgccaccgtcaagcaggcgctggacgcgctgctggcagggaccggcctgggctacaccgtggtggatggcaacgtcatcgccattgatcctgcgccggcacacaacgaaccgaagccggccgcgccgaagccgcgcgaggccgaagcggtggtggcgccgaccctgggcacggtgaaggtgattgctgcgcatgaggtgatcgaccagaagaagacctcgccggtgatcaaggattcggtggtctacgacgagatggacagctacggcgacgagaccctggccgagagcctgatggccgcgccgggcctgagtgccgtggaggatgccggtgagccccgttacgtgacggtgcgtggcgtgcaggccaacctcaactacaccaccatcgatggcatcgcgattgccagcgtgggtggcagtggctcgggtgagcgcatgaacaacctgcagctgattcccagcgacatcggcacccgcaccgacatctacaagagcttcagcgcggagcaggcgccggatgcgatcggcggcgtgatcgacatcatcagccgcagtgccttcgaccggtccggcaagtacgtgttcgccgatgtggccggcatctattccacggcggagaccaatgtcgagcgcagtgccggtggcaaccacgagaccctggggcatttcggcaagagcgccaagatggtgttctccgaccagttcggtgccgaccaggaattcggccttgttgcggtagcgcgctatgagcagcgttcgcgcaacagcgtcaagcgctgggtggagtcgaactactactacaacgacgccggcaagtacctcaccgacggtaccaccgggccggacgaggccaagggctggaacgggctgcgtgcgccgggcaacttcagcaccggcacctataccaacttcatcaccaacttcggtggctccgccaagcttgaatgggagccatcggacgatcctttctacgcatcgttgctgctgtactcgtaccggttctacgagaactcgacgatgaacaagaccgatctgtacggcaacgccaagtttccgatccgcaaccagaccgaagacagtggcaccacccagatcaacagcatctacatcaagaaccgccacgaccgctgggaccgcagcaaccgtggcgccatcgccagcttcaactgggatatcggtgatcgctcgcggctgaccctgcgtggcggccataccgaagagaccttccacaacaaccaggtctactggggtgtgcgcgcctacccaagcaatctgttcgtcgactacgagaacgacagccacggcttcccgaacgcagtggcggtttccgactccagcctgttgaccagctcggcgttcaagctcaacccggcacaggcctatgtctcgccgcgcgacgccaaggagagcatcgacaacctgcgtgccgacttcagctacaacatcgacgccgatgcgcgtggcttcggcctggccgccggcgccgaataccgccatctgaagatctggcaggacatcgacttcgactacttcaagagcagtgccacgctcaacgattacctgtatccgggttcgacgctgctgggcagcgtgccgggcttcccgctgatcgacaaccgcaagtggaacgaggaactgctgccgaaactgggcaacaacaattcggcgtatccaaatgccaacttcaccagcgactacaagtacgtggaggacatcaccaatgcctacgtgtccgcacactacgcctgggaccgactgctgctgatcggcggcctgcgctacgaccacacccgcttcgatgcctacagcccattcagcgatgatggcggcactacgtatacctctgccttccgcaatacgagcggtggctacaacaacctgctgccttcattgaatgcgacgttcaagttgagcgaggaccagcgcctgcgcttctccgccagccgaacgctgggccggccgacacccagcaacatcgcccaggccaccagcaccagctgtggtgatgacgaggagggcaggggcttctgcaccatcaagcagggcaacgccaacctgcagccgcgccgttccaccaacatcgacctggcgtgggacctgtacttcaacggcaacaacggcctggtctcggtggcactgttcgacaaggtgatcaaggacgacatctacaccctgaccaccttcgagaatgtgggtgatacccgctaccgggtcacccagccgatgaacaccgacgagtccaggctgcgcggtgtcgagttcgcggtcgccaaccgcaacctgcagtggggccgccaacgcttcgacatgtacttcaacgcaacgcggctggaaggccagaccaactaccgcatcagtgatggcaccgaacgccggctggaccgcctgctgtaccagccggactggtcgctcaatggctcggtgatctggcgcatgccgtggaagagcgcacagctgcgcctgtccggtacctaccgcagccggatgctggtcgacttcggcgatacccagtggctggattcgtactacgacccgtacatgaccttcaacatgggcttcagccacaaggtcagcaggcacgtgacgctgaagtacgaggccaagaacctgttcaacacccagccgacctacagcaccggcccgaacgggcgcttccgtaccgagatcgacgactacggccgcttcttctatttccacatcatctacaactga

SEQ ID NO: 503920 - DNA, 1530 bp, Stenotrophomonas maltophilia
atgcagaagcgatcgaagatctggctgggaggtgcagccctggtgctgctggcagggtgcaaccggacgccctcggatggagaggtggcgccgcctgcgccagccacggcggacgaggccgcagcaccggccgccgccccagcgggttcaacggccgccgccgacggcaccgcactcaccgaccgcgatggcaagccggtgccgctggtgcctttcgacaccggcagcgtgccgctgagcgacaccacgctgggtgagctgccgttcttcagcctgccgcagggctacgcgccgcagaacgccccgcacccgcgcgcctgggcgcgcttcccgttccggatgggcgagggtgtgcattgggcggaaggtccgagctggtcggcacgcatcgtgaccgacagtgaggcggcccccgacaaggcgttctcagcgctggaagtgcagcgcaacttcgacggcgtgatcaccgccgccggcggccgcaaggtctttgaaggcaagctgctgcgcgacatctactacggcccgcaactggaaggcgagatcgggggtggcttcatcgatgcggtgaacggtgaacaggacgcacccaccaccgtctacgtgctgcgccaggccaaccgcaccgtgtgggtgcagctggcggtggacagcaacggcgccggtctggtggtcgtggatgacgtgccgttcaaggccaccgcgcagtggtcgaaccgtttcccgtacctgtccctgccggccggctatcgtgagcgcaacacgcccgagcagcgtgatttcgatgccttcccgttctggaccggagatcacttcgaaccggtcgagggccgcaccttcgctaccgatttcgacaagggcgagcgcgaatactcgatgcatgaagtacgccgcaaccttgaggcgatgatggcccaggtcaacggcaccaaggtgttcgaggggcgcatcccgcacgaggcggccgagggcgtgtcgaagcaggtgcagtcgtcctacggcaacgcggccagctacagctgggacaactacgacaccgtggtctatcgcgtcgatctggctgatggccgccaggtgtgggtgcatgctcgcctggaatacctcagcgcaggctgggtcgtggtcgagcgcaaaggcttcacccagaccgcggcgctgctgccggccgatgcgttgaagaagaagctggacagcgacggccgcgtggcgatccaggtcaacttcgccaccgacaaggcgcagatcctgccgacgtccgaaccgcaactggcgcaggtgctggacctgctgcgtgccgacccgtcgctgaaactgtcgattgaaggccacaccgacaacagtggcgcggccgcgcacaaccacagcttgtccgaggatcgggcgcggtcggtggtggcggcgttgaccgccaagggcatcgccgccgaccgcctgcaggcggccggcttcggcgccgacaggccggtggccgacaatggcagcgaggaaggcaaggcgcgcaatcgacgggtcgagctggtcaagcgctga

SEQ ID NO: 503921 - DNA, 1170 bp, Stenotrophomonas maltophilia
atgaacaccccctggagcttcgcaccgcgcatgacgccttcatccccacgtgcccagcagcacgccacccgcgctgccttcttcattcccggattcgccaccgccgcctgggcaccgatggtgccctacgccaaggccaaggccgggctgtccgacgccagcctcggcgcagtgctgctctgcctcgggctcggctcactgctggcgatgccactggcaggtgcgctgaccgggcggctgggatgccgccgggtgatggtgatcacctgcgcgatgatgctgtgcgccctgcccttgctggtgctggcgccctctccggtagcgctgggcgcggccctgttcgtgttcggcgccggcgtcggtgcactggattgtgcgatgaacatgcaggcggtcgcggtcgagcgcgacgccgggcgcgcgatgatgtccggattccatgccttctacagcatcggcggcttcgtcggtgccggctgcatgaccggcatgctgatcctgggtacgccgctgtggctggccgcgttggtttcggtggccgctctgctgctggtggcagtgctgtcggcaccgcactggcgcccacaacggatcctgcatgaaggccccctgctggcactgccgcatggcgtggtgctgttcatcggcgtgctggccttcgtggtgttcctcgccgagggctcgatgctggactggagcgcggtgttcctcgccgaagtgcggcaggtgccacgtgaccaggccggtgccggctttgcactgttcaccctggcgatgaccgcgatgcgcctgttcggcgacggcatcgtcgagcgcctcggccggacccgcaccctggtcttcggcggcatcaccgctgctgcgggtttcaccctggcgacgctggtgccatcgttcccggtggcgctggccggttacatactggttgggctgggctgcgccaacatcgtgccggcgctgttctcgatggccggccaacagcgggtgatgccggagagcatcgccatcactgcggtcaccacgctgggctacgccggcatcctcgccggaccggcagcgatcggcgcactcgcacacgctaccagcctcggcttcgccttcctgtgcgtggccgcgctgctgctgggcgtcgcggcgtctgcgcgctcgctggcaagacgggtggcctga

SEQ ID NO: 503922 - DNA, 2226 bp, Stenotrophomonas maltophilia
atggcaatgccgttgaaccaccctcgtcccactctgctggccctggccgtgaccgcactgatgatcgccccgctggcccacgccgacggcactgccgatccttccgcgcgcacgctggatacggtccaggtcaccgctgacggcgatatcgtcgacagctatacggtcaagcgtgccagcacggccaccaagctcggcctgtcgctgcgccagacgccgcagtcgatgaccgtggtcacccgccagcgcctggatgacatgggcctgttctcgctgtccgatgtgatgggccaggtcaccggcgtggcggtatcggttaccgacagtgagcgcatcaactacgtctcgcgcggctacaacatcaccaatttccaggtcgatgggatgctcaacaccttcggtgggtacatcaagaccaacaccgacagcgtgatctatgaccgcatcgaagtggtgcgcggcgcaaccggcctgaccaccggtgccggcgatccctcgggcaccatcaacttcgtgcgcaagcgtcctaccgacagcttccagatgagcgccaacctgaccctcgggcgttggggcaaccagcgcctggaggccgacctcggtggcccggttgcgctcgacggccgcatccgcgcgcgcgtggtggcggccaaacaacagagtgactcgttccgcgatgtctacaaactggacaaggacgtgttctacggcatcgtccaggccgacatcaccgacacgaccctgctcgaggccggctacgaataccagtcgccgcgcaccacgggcgtgacctggggcgtggtgccgtactgggggtccgatggccagcccgccaacctgccgcgctcgaccaacctgtccgcccgctggagcagttggccgatcatcgaaaagagcgcattcgcacgccttgagcagcagttgggcaacggctggaccgccaaggccgcctatacccgctccaagcgcgaaaccgacggtgcggtgtggtacggggcctccggctacccgaatgccgatggcagcggcatcagcgccttcgtcggcagcttcggcgagaacggcgatatgcaggtgttcgacttcaacgttggcggtccgttccggctgttcggccgggaacacgagctggtgctcggtttcggccaatcggtgcgcaagggtgaagtgcctgccaccgacactgctgcctacccggacagctacacccgtgtaccggattggcatcgctggaacggcgacgtcgcgccgctgcaggtcacccgcctgggctatctggcttctgaagacgaactgcgccagcgcgcggcctatctggcgacgcgcctgcagctggccgatccgttgaccgcggtgctcggcgcgcgctacggcagctgggaaacgcgcacctggaactacacccatgacgccgccggtcgcctgaccgatacgcgtcgcggcggctacaagccggacgactcgctcactccgtatgccggcttcatctacgacttcaaccgctacttcagcggctacgtcagctacaccgacatcttccagccgcagaactaccgtgaccgggacaacaactacctcgaaccggtggtcggtgacatgtgggaggccggcgtcaaggccgagttcttcgacggtctgctgaatgcttccgcggccgtgttcaagggccagaaggacaacgttgccgagctcgatgactcggtgccggaaaactcgctgccgggtggggtcagtgcctaccgctccaccggcaagggcaacaaggtcaagggctgggagatcgaagcacaaggcagccttggtgagaactggaacctggcggccggcttcacccacaccgtcagccgcaatgcgcagggcgtgcgccagaacaccgtcatcccggtcgatctgttccgcctcaacgccagctggcgaccgggcggtgctgaaggccgcttctggctgggcggtggcgccacctggcagagcggaatctggagcctgagcaacaagccgcgtgcggatttcctgaccagcggcaagcgcgaccgcgtggcaatcgaacagggcgacatctacctgctcaacctgtcggcgggctatcgcttcaacgagaacttcaccgcgcaggtaaacgtgaacaacctgctggacaagaagtattacaaccgcgtcggtttctatgacggcgtgttctggggcgaaccgcgcaatgtgacgatgacactgcgctggaagctctga

SEQ ID NO: 503923 - DNA, 447 bp, Stenotrophomonas maltophilia
gtgcgatccatatttgttggtgttgtaaccggggcaacattgttcgccgcagctccggtattcgcgagtgatagagggggcggtgactaccacggcagtcccttggcaagtgccgcagtttcgaaggcaggccttggtgagaccaaccctgccgccgcagacatcagcgccgatcccgcttggcaggtgtatgccttccaacgcgatggcatggtctacctgcaggtcaacgatctgaccgggcaggtaaagctgatcatcggcaatgccgctggtgcgtactttgcattgcctgccggcaagtccgcagcacttgtttcgcttcccggtcagcgactcactgttccatccactgcaaagcgttccgaggtgtatcgtgcgcaggacgtggtactggtgcggtatgccaccgcggatggcgacatctggtctgtcgaaacaccgtag

SEQ ID NO: 503924 - DNA, 1545 bp, Stenotrophomonas maltophilia
ttggctgtgctgtatgccattgcctgttgggccacccgccagctgtcccttgatcagttctatctgcccgctggtgtacgcgtggccgcggtactgctctgccctcctcggctttggccctatctcctgctgggcgagtacgcctatttcgcacagatgcgagtgccgatgatcgatcggtacgggctgacatgggtcattctcggctcggtgttccagatgccggttgtaatgacgatcgtctatctccatcgcaatgtaatctcggcagtaaagaacgcttggctcatctcgattgctgccttcgctgcagtttccgtcacactgatcaacctgcttctggcgaacttcctctggccaacacctcccgcttttccgctgttgaccggaatcgtccgcctggtagtaggtgacttcataggcatactcacgtttgcgccgcttgtgctgctgtggtcgcgaggcaaggctgaagtgcaggtccggaaacgggatatcgcacagatggcaggagcgcttgcgctgatggtcgtgttcggcctttgggctgcggacgtacctgccgatgctgtgacgacaaaagtatccctgcaactcctcatggcgcttcccgccgttcttctcacatgcgtatatgggtggcggggcgccgccatcggcgtgccgaccctgaacatgattatcggtctgacaacaccttcgtctcaccctgagtcattcgatcctgcatcgttcgcgacccagcagatcatggccgtcacgggcgcagcactgctcatactgggctcccggatcactcactactatcaccgttatcgactgcgggaggtcggcgagaaaaatgccatcagacttgctcggagctcccatgtcgccagtgagctggatcttcgcgaacgcgcgttgcatctgcggaagcttggggatggcattgatcatgcgcttgatgaggtgatcaactggcttactgcacaaggccatcatgcgattgcggagagccttgtacatgtggcgtcgattcattcgcgccagttccgcgagcagacaagcatgatttatccgaccgccctggagcagctcggcctttatgttgccctccgagcaggtggcgttcgcgaagcatgggaaagaacggctcgcgtcgccaatccgtcgttgcttggcgacccctgtcaactcagtgtcggactgcagcttgctgcctaccgcactgtgatagatgcggtgtcactgctgatccagggtgaaacgggacagatctacgtgcgggcgcgttgcggacggacgggttcgcatcgtggaatcctgatagcggtatcactactggatcaacatcaacgcctttcggacacaaccgccgccgccgcgatggaacgactggccggcaggacgcttgcctacggcggcacactgaaatgcaaccgaaatcgcatcgtgctggcaatgaaggaaacgggtacagccgctcctctggatgctttttcatcagatgcccggaacagcctttcgggactcgaagcgggtccctcacgcgctcaggcttga

SEQ ID NO: 503925 - DNA, 1566 bp, Stenotrophomonas maltophilia
atgagcctgcccaagcccctgtggcgacgcctgctgcgcgtcgctgcgatcatcctcgccgcgctgttgctgctggtcctgtccgggctgctgctggccgaccacctcaccccgcaggcacagggcgcaccctcgcatgtgctgccactgcagccggcgcagacccgcatcgaccagcagatcgtgccgctgcaggacgcacaccccgggcagtccggcgtggcgttcctcagtgatggcatggatgccttcgccgcgcgcgcgatgatcaccgcgcacgcaggccgcagcctagacctgcagtactacatctggcacgacgacctgatcggccatctgatggccaaggcgctgtacgacgccgccgagcgcggcgtgcgcgtgcgcatcctgcttgacgacatgaacgccaaggacaaggacgcgttgatgatggcactcgatgcgcatccgaacatcgagatccgcctgtacaacccgttccgcaaccgcagcggcatcgcgcgcacgctggagctggtgcaacgcgctttcagcgtgaaccaccgcatgcacaacaagagctggatcgccgacggccgcatcgcgatcgtcggtggccgcaacatcggcgaggaatacttcagcgcgcgcgacgatgtgaacttccaggacctggacctgttggtggccggccccgccgtgcagcaagccaaccagatcttcgacgactactggaacagcagcacggcgatcccgatttccgcactggcctcgtataccgatgcacagttgcagcagctggtacggcagtcggacctggatgccatgcatgccaaggcccagccctacctgcaacgcgtggccgagtcgcgcgcgctgcagcggcccagcccggaaccgctgcactggagcgcgaacgtgcgcatcgcttccgatccgccgatgaaacaccgcgatgacgatcgccgcggctggctggtcagccgtctcagcgacgaattgcgcagcgcgcggcgcagtgcgctgttgatctcgccctacttcgtgcccggcaacgagggggtcgaggcgctgtcggcgctggccgcacgcggcgcgcaggtgggcgtggtgaccaactcactggccgccaacgatgtggcagcggtacacggcggctacatgggctaccgggtgccgctgctgagggccggcgtgcagctgtacgaactgaaggcacatggccagctggatgccagcctgttcggcagcagcggcgccagcctgcacaccaaggcattcgtggtcgatgaccgccgcggtttcgtcggttcgttcaacctcgacccgcgttcggcctacctcaataccgaaatgggcgtgctgttcgatgacccggcgctcggtgcacagctgcgcgacgagtacctgcgcctggccggtccgcagcacagctggtggctggcgctggggcgcgatgatgacctgcgctggctggagcggcagccaccgccgcactgggtggaggccgaacccggggccagcctgggcaagcgctggaccgcgcgggtgatcagctggctgccggtggaatcgcagctgtag

SEQ ID NO: 503926 - DNA, 342 bp, Stenotrophomonas maltophilia
atgagcatcaacaagctgctggtcgcgatgtccctggctctggccctggccgcctgctcgaagcaggaagctgcccaggacgccgctgcttcggccaacgaagccgccaccgaagcccaggctgctgccgaccaggccgccgctgctggcgcccagaccgccgacgctgcccagcaggccgctgacaccgccgccaccgctgctgacgcttcggttgacgctgctgcccaggctggcgctgctgccaccgacgccgctgccggcgccgctgctgacgctgccaaggctgctgaaggcaccgctgagaaggccaaggacgctgctgaagaagccaagaagtaa

SEQ ID NO: 503927 - DNA, 1335 bp, Stenotrophomonas maltophilia
atggccgtgctctcccacatgctgctgaacggaacaggcgcgccagactcctcccagcgcatcgtgttcggcgcggtgattctcagcgccatcgtctgcttctctgtagcgccggtgtaccgcaactggcggatccggggccttctggcggacctctggctgttgctgctggcctggtccggcaccttcgcgctgttttccctctatgtcgtgctggttggccttgctgacgcggtgccctctgcctggcttgttggctggtatgtcctcgggttgtgcgccatgtcggccctgcgcgtgctgttgagggtgcagttgcatcgcctgcgctcgcggggcatggatcatgagcgcatcctgctggtcgggctgcgggcgcctgccctgaggctgcatcgcctgctgcgcgggaagccggaactgggcaaggacgtggttggctatttcgccagtgccggtgatattgccactcgtcgtggtggggactccccgcagcggctgggtgtcctggaagatgtcccgaagtacatggatcagcaccggggtgagttcgaccaggtctgggtgtccatgccgatggggcatgcggctgcaatcaaggacatgctcaagcagatcgagcgattcccggtgccgatacgcctgattccggacaccacggggctgggcgcgttgaatcccggcgtgcaccaggtgggtgacgtgccgatgattggcgtgcgccagggcctggtggatcatcgcttccgtctgttcaagcgggttgaggacattgttgtggcaggcattgcggtgatccttctggcgccgctgtttgctctgctggcgatcggtgtgaagctgagttcgccgggccctgtgctgttccgccagaagcgtcatgggctgggcggcaaggagttctggatgctcaagttccgttccatgcgcgtacatgcagagggtgccgggcagatcacccaggcgacgcgcggtgatccgcgagtgacccggttcggcgcgttcctgcgtcgcagcagcctggatgagctgccgcagttcttcaatgtactgggcggtaacatgtcggtggtggggccgcggccgcacgcgatccagcacaacgatcactatgaacgggtgatcgagcgctacatgcaccggcactacgtcaagcctggcatcacgggctgggcgcaggtgcatgggttgcgtggcgagacgccggagctgcgctcgatgaagaagcgcgtccagtacgacatcgactacatccggcgctggagcccgacgctggatgtgcggatcatcgtgctgacggcactgaaagtgctggggcagaagtcggcctattaa

SEQ ID NO: 503928 - DNA, 372 bp, Stenotrophomonas maltophilia
atgctgagagaggctgtctctgggaaaggcatccaagtgtcttcggctggcctcggtgcgctggttgggcacggtattgatgccaccgcgcaggagctgctggtagagcaggggctggatggcctggcccatcgtgcccgccagatcgatgacgtcatccttggcgcagccgatctggtgctgaccatggagcgaaagcacgttcgccgcattgccgagatcgccccccaggcgtccggcaagaccttcctgctgggcaagtggcagcaggatcgggagattcctgatccttatcgccagcagcgcccggcgttcgagcatgtttacaagttgatggccgagggcgtggagagttgggcgcggcacttctag

SEQ ID NO: 503929 - DNA, 2211 bp, Stenotrophomonas maltophilia
atgaccaccgacacccgtagtccagtacaggacgatagcgatgagatcgacctgcggcagctgcttggaacgctgattgaccataagtggtggatcgcggggatcaccggtgccttcctggttgccgtagcagcatatgcgctgttggcaacgccggtctatcgggccgatgcgatcgtacaggtggaatccaaagtgcccagtcttccgggtctgtcggatctcagccaatcgctggggatcggaaccgggtcggccgaggcgaccaccgagatcgcgctgatcacgtcccgagctgttgtgggaagtgcggtcaacgcgatgaggctcgatatcgaggttgagccgaaccgcttcccggttctcggtggctacttcgcgcgcaaggccgagcgttctgcgccggatgcgctggcggacgtgcgcttcggcatgagccggtttggttggggtggcgagaagctggatgtgttccagctggatgtgccgcggagcctgattgcgcagccgctgaccctgattgtcggtgacaacagcagttacgaactgtttgatgaagacgagaacctgctggtgaaagggagtgtgggcaaggttgcctccggaaagggggccaccatgcaggtcgccgagattcgcgcccacccgggaatgcgcttccagatcgtgcgtcagcgccacctttccgttgtcaacgaactgcagaagaagatctcggtcaacgagtccggcaaggactctggcatcctgacgctggcctacgagaactcgaatccggatgtcgctcagaattttctgcagcaggtcgcgcaggcctacgtccggcagaatgttgagcggaactctgccgaagcctctgcccagttgaccttcgtcaaagagcagctcccgaatgtgcgcaatcaggttgacgctgcgcagaaggcactgagcgcctatcagacccgcgccaactcggtggatctgaccctgcagaccaaggggctgctggaccaggaggttgcggttgaaaccagcatccagcagctgcggttgcagcaggccgagatggatcgcaagttcactcgcgatcacccggcataccaggcgctgatgcgccagatcggggatcttgaggcgcgcaagaatgggttccaagggcaggtgaagcaactgccggaagctcaacaggaacttctgcgcctgagccgcgacctgcaggtcagcaacgagatgtacaccgcaatgctgaatcaggcgcagcagctggatgtcgcgcgtgccggcacggttggcaatgtgcggatcgtggacgctgccgaagtggatgcaaccaatccggtgaagccgcgcaagggcttgatcgtgctgatgggcacattgcttggtgcgttcctgtcgattggcctggtgctgctgcgacagttgttgaatcgcggtgtagaggatccgtcgcagatcgaagaagtcggcctgccggtttacgcatcgattccggtcagcccgggtcagcagtccgattcggtgcgcggcaagttccgcgccgacggcaagctgcatctgctggcggtgaaggatccggcggaccttgcgatcgaggcagtacgcagcctgcggaccagcctgcacttcgcacgtctggaggcgaagaacaatatcgttctgatttccggttccagtcctaacgcgggcaagacattcgtctcgtccaatctggcagctgtgatcgcgcaggcgggtcagcgcgtgctgattatcgacgccgacatgcgcaagggtacgctgcacaaggcgctgggcgcgacccagacgccgggcctgtccgacgtgctggtcggcaaagcgacactggaaaccgccatccgtaccgtgccgggcctcgacagcctcagcttcatctcgcgcggcgatgtgccgccgaatccttcggagctgctgatgcaccgcaacttcacggagttgctggaaacggtggagaagcaattcgatctcgtcatcatcgatacgcccccgattctcgcggtcaccgatgcggcgatcatcgcccatcacgcaggcacctgtctgttggttgcgcgcttcggcctgaatcagcccaaggagctggcacttgcgcgcaagcgcttcgagcagaacaacgtgcagctgaagggggcgatcttcaatgccgtcgagcgtcgtgcgaccggctattacagctacgggtattacgaatacaagtcgacccgataa

SEQ ID NO: 503930 - DNA, 1134 bp, Stenotrophomonas maltophilia
atgaaagtactgattacgggtggtgcggggttcattggcagtgcgctggcacgcgcgctggtcgctcgtggcgaccaggtgacggttctggacaacctttcgccccagatccacggtgacagcccggaaggttcggcgctgctggcttcgctgccgcccgaggccgtggtagtcaagggcgacgtgcgcctgcgcgaggattggctgaaagtgcttcccggccaggacgttgtcgtccacctggcagctgaaacgggaaccggccagtccatgtacgaaattgaccgctatgttgatgtcaacgtgcgcggtacttcgctgttcctcgacctgatcggcaacaaggtgcagggctgcgagtcggtcaagcgggtcgttgtcgcgtcttcgcgctcgatctacggcgaaggcaagtacaagggtgccagcggcccggtttatccgggggcgcgcgtcgacgcggacctgcagaagggcatcttcgaatgccgcgatccggcgacgggcgatctggtggagccgctgcccaccgacgaagaatcccgcattcatccgagctcgatctacggcatcaccaagcaggtgcaggaacagctggtgctggtgggggccgccgccattggcattcagggtatcgccctgcgctatcagaacgtctacggcccgggtcaatcactgaagaacccctataccggcatcctgtcgatcttctccaccctgctgttgcagggcaagggcgtcaacatcttcgaggatggcaaggagacccgcgatttcgtcttcattgacgacgtggtagcggcaacggtttcggccatcgatgcggatgtcagtggccaagccttcaatgtgggcaccggcgaagcgaccgatgtcatcaccgtcgcaagcgcgttgaaggacgcgtatggcaagggtggagagatcagcatctccggcaactaccgcattggtgacatccggcataacttcgccgatctcagccgcgctgaggctgctcttggctatcgcccgcgcgtcacctttgctgaaggcgtgaagcgctttgccgcatgggtactgacccagcagattgaagactccggttaccagcggtcggtggatgagatgcgcgcgaagggcctgctcaagtga

SEQ ID NO: 503931 - DNA, 1002 bp, Stenotrophomonas maltophilia
gtgagcgaatccctgaaggggaagcgtgtgctcttcatcgccccgatgttcttcggctatgagaagctgatcaaaggcgagcttgaggagttgggggccgttgtcgattacttcagcgacaggccgggcgcggatttcctgaccaaggcccttatccgtgtggaccggcgctttctcgcaagaaagatcgagcggtactacggcgacatcatcgagcagacccgcggccgcgattatgatcttgttctgatcatccgcgcagaggccgtgtccggcagcatcctcgaccggcttcgcagcatccattcgcgtgcaaagtttgtgttgtacctgtgggattcgatgcactacaacccgaacgcacgcaaggtgctgggcaagttcgatgcggtgctgtcctttgaccgcgcagacgtcgatgccaatccgcagatgcagttcctcccgttgttctatggcagagagttcgagcgtgcagccaactggaccggtggcttcacgtacgacgcatgcttcatcggcaccatccatacagaccgttacaaggtgcttgagcagatcatcgaacagctcgagaaggatggaatgagggtgttcgtctactgctattacccctcccgcatgctcttcaggttgcgttccctgttcgatacgggcttccgccggttcgccaggaagtacgttgatttcaagggcatgccgcttcccgaagtggttgatcgcatcgccgagagccgtgctgtgattgacgtgaacaggcccggtcagctgggcctgacgatgcggacgattgaggcaatcggcgcccagcgcctgctggtgacgacgaatgaggatatcgtcaactacgaggtctactcccagaagggtatgtatctgatcgaccggcgtgagccgaaagtggccagggagttccttcagcgcgaaggcgtcccccacgacgaatcggttcgcgtcggactatctgccaggaactgggtgctgcgcgttcttggaaactaa

SEQ ID NO: 503932 - DNA, 1347 bp, Stenotrophomonas maltophilia
atgaagtacctcaccgtcgtctactacgatacgttcgcccgcttcttctccgccattgaagatgaagtcagattgcgggacggtgaggctgagttcctccaccttgcgttgtttccaagcgcctacctctatctggcgcttgagcggaagtcggtccgtctgcttccctgggaggcgacaaaagcctcgtcggcagtcgcttcggtcgaagccgccgaattggatcgcatcggtgcgtatcactcgtacatcctttcgggggcgggcaaaggggctgacctgcgcgtgcgcgaacgcgcggcgaagtatgtcaacgcggtatcggagatccttcgtgaattccgtccggaccgcgtcatcatgtcaggtgacacccggattgcctgcgaggcgctatcgttctgcctggcccgtgactggcccgatgttccgaagttccacttcgagcaggggccgggagggacgacgatcctcgacccggtgggggtcaacgccaactgctctttccgccaggaagtggcggcgctgacgggggaaaactactccgccgaggctccgcagaagcgcacccgcttcaagcgcaatcgggtattcaggggcattgaccacatgctatcccgtggcatgagcgcggtatcgcgtttgcccgtggagtgggaaacactgccgatgccgcgatatccagagcagcgctacgccgcctgtgtgcagcccgtggcaaacgcgggagcttccagcgctacagaagtcctggtggcactgcaggttccggatgatgcgaacaatattcaccacaacccgctttgtcttggtgatgcgcagttcgtcgagttggtggttcgcgctgttcgccagcttggcgggcgtgttcttgtccgggagcatccactgtatcggcgcaagtacagtgcggaactgtatgacttcatctcatcgactccggaggtggcgctttcgagcgccgagctgaaggacgatctgtcgcgggcggcggtggtggtgacggtcaactcgatgaccggttttgacgcctacatggccaatgttccctctattctgttggggcgcgcgttctacgatcatcttccgggtatcgtgcggttggatggagagggggggcttgtagaagccattgattccatacaaggaaagactgtttcggagcttattggcggacgcaatccccaagcgatctttgcagaagcaaaggcgcgctatctgatcgaggggcattggcttgatgccgaccttcgcgcacccgcggtaatcgcggaaatggttgtgaagcccgagacggcgtcgtctgacgctgcgccaagtcctgccgttctggtgacgaaggaatga

SEQ ID NO: 503933 - DNA, 1320 bp, Stenotrophomonas maltophilia
atgacggccaaaggaatctactggggagtggcatcgaatctgctcggcaatgcgctgatgctgggtgcgacgctgtggctgacccgattgatcagcccagcggagtttggtgagttccgggtgggcgccaacttctcgacactgatgatcccgttcctggcattggggggcgaacgattgatcagccgcctgatacagaagggagactcggcaggtgtggccaggactgtacgaatggtcatgacgattgccatggccggcgccgctgtccttctcctcgcctacccgctgctcgcccactacgccttcgcgggaacagtagggttccctgtcttcgccctgggtgtgctgcttgttccgttgaccatctgctataacctggccaacacgatatggaggcacgtgggctcccccgcacgggcccagatccacctgaatttccatcagcggcttctacgtgcaccgcttcttattgcattcgcctggttgcatcccactgccgtttcggcctctgcggcgatgttcgtcgcgcaggggacttcgctgttgcaactttggaagtaccttcgggtagctttgaaggggggggctgaaccagcgataccggttgcccaaggcagatcagtgattagcgatatgctggtgatagggttgccagtcgcgctcctggcggcagttgatcgcgtcgatgtgctgatcatcaatgcggtaatgggcgtggagaccgctggagagtatgaccttgtgtacatgcttgcgttgactgccatgttcccggcaatggccatgtccaagacgtccgagccgttgctgctcgcgctgagcgacgattccgaacggcagcggagagttcggtggttgcagatcaggaccttgctgctttcctgcgcggcgctggctggaatcgcggtaatttctccgttcattccaatgatgctgggggtggcgggcccagacttccccgccgcagttctgattctttctgccggattggccctctccagcgtatgtgggccggtgcttgagtacatgcagatcaatgggcgcgccaggatcacccttgtcctggcgatgtcattgatggggctgtttgtttggatgaagtggttcgctgctacggctgataacctggtgctgttcgcgttcctcggtgggctcttctatctggttctgcgcctagtgcttgccgcctacgtgttctttgcggaccgcgtcctgcttaccaacccttatgcacttgccgtggcggtgagcttctacggcctacttgcggtctggttgctgggaggcaagcgcgtgtgcctaggctcgttgtgttga

SEQ ID NO: 503934 - DNA, 921 bp, Stenotrophomonas maltophilia
atgcgcctttttctgaggtgctgcgtcgtcctgttgctggttggtttgtacgtgttcaagtacgatggaaatgactattccatgtacgagaattactatcagctgggcagtggatttgagattggctatgagcttcttgctgctctggcccgtgctgcagggtacgatttcaagtacttctacggcatgtacagtgccctcaatctatttctcttctgcgtgctttgtcgctggcggactgagcgaatgcttttggcgctcattccgttgatgctctttccgggtcttccgttgaacacgatcaggcagttgactgcaggcctgatctgcgcgctggcctatgatcgactctatccgcaaaataacaagaagtttgcgcttcttgttatcttggcaagccagtttcatatttctgcggttctttttcttgtgcctcttgcgtggaagaggattggtgtttttgtttcaatttctattgtcgcagttgcggctcttgcatatttcagtgcgtacacaaattatctgacgggaaagattgtttattacactggtggggcggcgcagtccggctggtatgaacaaggaagtggtaagtccttcgcattcgtgatctttggtttgtcgttgcttgcagctggtttcgtttggaaattgggtgattacaggaagtacatgccagtactgttgctggcggccattgccatgttcgcgtctgcgtacatgagcattttcatgcgattcatctatctatttctcccggcggtgtccgtgtggatgtatggctgctcccggagagtaaagcttgccgtattcctgcccctgtttattgttggagctgtcaatctgtacttcgtcgttgctgtatggggggagggtgcatatcagcacagaaaccaccttatcgaatatctgttcatctga

SEQ ID NO: 503935 - DNA, 585 bp, Stenotrophomonas maltophilia
atgcataatctgtacagaattttatgggcggcgagggctgtcatctacaagctcgtcttcgggcggtttggatggctaagctacattgggcctccaacatttctgttgcgtcctgggcggatacatatcggtaagcgggtgcgcattttccccgggttgcgtgctgaatgtcatggcaagggtgcgctgtttatcgctgataatgtatcgattggacagaattttcatgtcatagcaggctcaaagctgcttatcggcagcggttgcctgatctcgggcgatgtgtttgtcactgatacagaccacaccttcgatctgatcgacgtccctgtcttcgatcagcctgacaggatttcctcgaccaaaattggcgacaattgctttattggtatcggcgcccgtattcaggcaggaacgaatctcggctgcggttgtgtggtcggggccaattctgtcgtgaggggggacttcccggactacagcatgatcgtgggcgcgcccgctcgggtagtgaagcgatattcccctgaagacggtacttggcagcggcttgtttcaaatcattcaaacgagatcaattcatga

SEQ ID NO: 503936 - DNA, 846 bp, Stenotrophomonas maltophilia
atgaacgtttccatcaatgacgctgttgccgtcggcaacgacctccccttcgtcctgttcggcggcctgaacgtccttgaggacctcgactccacgctatttgcggcggagaagtacgtcgaggtcaccggcaagctcggtattccctacgtcttcaaggcttcgttcgacaaggccaatcgctcgtcgatcaagtccttccgtggcgttggcctggaagaaggtattcgcatcttccaggaagtgaagcgccgcttcggcgtgccggtgattaccgacgtccatgaagtggagcaggcggctcccgtggccgaagtggtcgacgtgctgcagattcctgcgttcctggcacgccagaccgatctggtcactgccattgcgcgtacgggccgggcgatcaacatcaagaagccgcagttcctcagcccgtcgcagatgaagaacatcgccagcaagatccgtgaggccggcaatgagcggatcatcctgtgcgagcgtggcgcgcagttcggctacgacaatctggtcgtggacatgctgggcttccgcgagatgatcgaggccaccggtggcctcccggccatcttcgatgtgacccacagtctgcagcgccgcgactcgggcagtgaggcctccggtggccgccgccgccaggtagtggaacttgcgcgcgcaggtatggcggttggcctggcagggctgttcctggaggcgcatccggatccggacaacgcgcgttgcgatggcccgagcgcgttgccgttgagcgcacttgagccgttcctggcacagatcaaggcggtcgatgatctggtcaagtcgttcccgaagctcgacatcgcctga

SEQ ID NO: 503937 - DNA, 552 bp, Stenotrophomonas maltophilia
atggaatcggcgaagtaccaggggtcgatcaagctggtcctgttcgacgtggacggcgtactgactgatggtggcctgcacatcgatggcaagggcgagcagttcaagacgttcaacgtccgcgatggcctggccgtcgcattgctgcgtgtgcatggcatccggtgtggcgtgctgtcgggcaaggcgagcccctccttggacttccggatccaacaactgggcatggatgtggcggtgaccggtcgcctcgaaaagctcgatgcgttggccgccatctgcagggatcttggaatcaatgaggccgagatcgcctatgtgggggacgacgtcgtagacctgccattggcgggacgggtagggcgcttttatgcgccttccgacgcgcatccgctggtgttgacagccgctgacgtggttgcagacgcacagggcggacgtggcgtcggacgcgaggtggccgagcgtgttcttgccgagggcggggtggacctgccggcagcatacgcgcccctcattgcaggatggagcgccgctggagcggtgcagtag

SEQ ID NO: 503938 - DNA, 948 bp, Stenotrophomonas maltophilia
atgtcctccgtcgtatcagtcgtcgatcacattgcatcggccaagcgcgtcctgcagatcgaggcatcggctgtcgccgcgctcgccggcaggctcgatgggcagttcacccaggccgtggaacaggtgctgggttcgcagggccgggtcatcatctgcggcatgggcaagtcgggaatcatcgggcgcaagatcgccgcgacgttggccagcacgggtactcccagctttttcatgcacccgggtgaagcgttccatggtgatctgggcatggtcaccgccaccgatgtattcgtggcgatctcctactccggcgaaaccgaagaggtggtgaagttgctgcccttcctgaaggacaacggcaatttcctcgtggcgatcaccggtcgtgcgacgtccacgttggcccaggccgcggattgccacttggatgcgggtgtttcgcaggaagcctgcccgcttgcattggcacccactgcatcgaccacggcaacgctggcgatgggcgatgcgcttgccgttgcactgatggaggctcgaggcttccagccggaaaatttcgcgcgcttccacccgggtggctcgctgggccggcgcctgctgtcgcgcgtggagcacgagatggttgctggcgatctgccggtggtggacgcagcagcaacaatgatggacgtattgcaggccattacccgctccagcctcggtctggcgatcgtacgggctggcaccagctacgcgatcatcaccgatggcgacgttcgccgcgcgctcgagcgtcatggccgcgaggtgtttgataagtccgcggccgagctgatgaccgcctcacctgcccaggtgagcgtagggacgcgggttgaggatgcgctggtgctgatggagcggcggcggatctcgtcgttgctggtgttcgacggcgacgtgctggccggtgtgttcaagaagtag

SEQ ID NO: 503939 - DNA, 2142 bp, Stenotrophomonas maltophilia
atgtgccgtaatcgattgccgctggctcgcgctggcgccgccctgttgagcctcagcatcagcgcagccctgtatgcccaggaagctcccgcccccaccgccagcgactggggcggtatcggcctgctgcagaccccctccgcgcgcatgagcgaagaaggggagctcagccttaccgcaagccacacctcgccgtacagccggtacacggtggtcatgcagcccctgccgtgggtggaaggctccttccgttacatttcggttgccaatcgccgttatggctcgcagtggctcagcggcgaccagaattacaaggacaagtcgatcgacctgaagctgcgcctgtggcaggaaggacgctggctcccggaagtgtccgtcggcgcgcgcgatcttggcggcaccgggttgttttcaagcgagtacgtcgttgccagcaagcgcttcggcgcgttcgacgcaagcctcggtgtggcaaccggctatatcggcaaccgtggcgacctggacaatccactgggcgcgatcgacgaccgcttcaaggaacgccccggcgtcaatacaccgggcgacttcaataccagcgcgatgttccgcggccggctgggcgtatttggcggcgtcagctaccagaccccctgggaccgcctgcaactgaagctcgagtacgatggcaacgactatcgcaacgagccgcagcgcaacaaccagaagcagtcctcgcccatcaatctgggtgccgtttttgcggtgaacgacaacgtgttgctgcacctgggctgggagcgcgggaacaccgccatggtcggcatcacgctgcgatccaaccttgcccaggccaagcccatgaccaagctcatggacccgcccccgattgcccgcaaccctgcagcgcagggcgagccgcagacggtcgccacaacctcggcgacaacacccaccgactggtcatccattgcccaggagctggaggagaacgccggcctgcgggtgaagcgcattgatcgaagcggccaggagctgatcgtcagtgccgagcagcgtcgcttcatctacccggcacagggcattggtcgtgcggcacgcattcttgatccgcagacgcctcccgatgtcagctggtggacattgcgcaacgttcgcctgggcctcccggttgtcgagaccagcctcgaacgcaagacgttcaaccagtacctggacgaccgcacggacctggcgaccgtcagccgccatgtcgaaatgaacgccccgtatgcaaggcgctcggaaacgctgtacgaagccccgctgaagcgcttcgacggtgcgttcaacgtcggctaccggcagagtgtgggcggccccgacggcttcatcctgttccaggtagctgggatgtacggcgcgaccttccgcttcaacgaaaacctctggctgagcggcacggccagctacaacgcctataacaactacgacaaattcaagtacgacgcccccagccggcttccgcgcgtgcgtacctatgtgcgccagtatctcaccacttcggacttcaccctgcccaacctgcagctgaccggcacgaagcagctcggccgtgacctgtacggcatggcctatgccggcatgctggagtacatgtatggcggcgtcggcggcgaagtcctctatcgcccgatggacgaacgctgggcgctgggcgccgagctgaactgggtcaagcagcgcgatttcgaccagcgcttcagcttccgcgactacagcgtgaccacgggccatgccacgctctattacctgtggggtgaccagcggcgcctgatcagcgcggtcagcgcaggtcgatatctcgccaaggactggggtgcaaccgtgtccgttgcacgcatgttcgacaatggcgtgaccatgggcgcctacgccaccaagaccgacgtttcatccaaggacttcggcgaaggaagcttcgacaagggcatctacttctcggtgcctttcgacttcatgctgccgcgctcgacccgtgcccgcgccgatttcatgtggaacccgttgtaccgggacggtggtgcccgcctctcgcactcccacagcctttaccagctgacatccgagcgcgactcggagtttttctaccgaaacttcgacgccattgcgaagtga

SEQ ID NO: 503940 - DNA, 774 bp, Stenotrophomonas maltophilia
atgaagccgcaactgatcgtgatggcccttggcgctgtactcgccagcacgggccaagcggcctctcccatccaggtggaagccttcggaaacgttcgctcaccgggcccccacaccctggcaagcgatgcccggctcagcgccgcagcccttgccgccgcaccagacgagcatgcctacatggcgggcgccgcgctgcttcgcacgaacagcctcgaagcgcaggcacgcctgaaagcggggctgctgttcgacctggaaacactggcagctcttgaggacgcgccagagatcgccgacgcagcgtcccggatggcccgcgagttcggcgcacttcccattaccgggcgcgaaccgcaactgctcgagccgcgctccctggaagccgatcgcccgcaggatcggccggcccgcgcaggcgatcgactgatctacccgtcgcggccagcgacagtgaccatcatgggcgccgtcccccattcgtgctctttgccgcacgctgcaatgcaggatgcgcgcagctaccgcaaccaatgcgagctgctgcccgcagccagtccggacaacctgtatgtgatccagcccgatggccgggtcacgaagatcggcattgcgctgtggaaccgtagcgcacggacaacgctggcgcccggagccgtgatctacgttcccatcgtgggatctgccgtccggtccgccacccccgatatcaacgatgaagccgcgcgcttcctcgctacccaggtgctggacgcgccgggagttccagattga

SEQ ID NO: 503941 - DNA, 690 bp, Stenotrophomonas maltophilia
atgagcaggaacgctctctcccgcctcgtgctccggagattccgcctgggcctgctggctaccgtcatcgcggtctctgcagccggctgcggtgttgtcggtcgcagcagcgtcaaggcagtgcaactggccgtgcagggtaagccggatgtgcagcccagcgccgaggacgttgcacggaaccgctatccgcagatcaaggtcaacggacctgctggcggcgcagtgctggtgcttggcgcagtggatggtggccgccaggcctggtacagcagcgaacgcagcatcgtgttcctgcgcaatggcctgatcgaagcgacccatggcggtactcccgagctgcaacagatgcggatcatcgggccgaacccgctgctcgacctgcgcaaggtgaaggatggcgatgtcgtgcaacgacgttacgacctcatgccggactatcgcttcgacatgaaggtggctggcaccctgcacccgctgggcacggagagcgttgagatcctgggccggacgcgcgaactgctgcacgtgcgcgaggagctgcggggtgacggctggaagcagcagaaccactactgggcggacccgtccagcggcttcatatggaaaagccgccaggccatcgcgccggatgcccatctggaaatcatccagctcaaaccctattcgccggacctgcaaccccgatga

SEQ ID NO: 503942 - DNA, 1107 bp, Stenotrophomonas maltophilia
atggactgcaagcgtctcgtcgccgccatggcgttcaccctcaccatgtcaggctgcatgtgggcccccggccagcacatgcgctcgaactccctgatgggtagcagccagcagattggcaacgatcagatcgagttgattccgatcacgcccaagctcatcgccatggagcgcggcgcaaagagcgcccccgggcttccggcctcgttgatgcagtaccagcccgggccctatcagattggtgcaggcgacatcctgtacatcacagtctgggaccaccccgaactgactgtccctgccggcccgcagcagcaactcagtgcagccggtcgcttggtgcagtccgacggcacgctgttctacccctatatcggcaaggtcaccgccgccggcaagacaccggccgagctgcgtgaagagatcaccacccgactggcccgctacatcgaagcgccgcaggtggatgtttcgatgctgacctatgccagtcagcgcgtgtgggtcaccggcgcctcgcgccaaccggccacggtggcactgacggtcactccgctcactctcggtgatgccatcagccaggcaggcctcgacccggcacaggccgacctgtccggcgtccgcctcacccgcgacggcaccaccttcaccattgatcttgacgagctgggccgcaatggcggcggcgatacgaacgtcttcctcaaggcgggcgatcacctgtatgtgccgtatctcgaccgcaaggaagtctttgtcgtcggtgaagtgaaccagcccggcgccatgagcttcaagaccggcgggatctcactgagccaggcgctgggtcgtgcgcgcggtctgctgcagaccacctccaacggcaacgcagtctacgtgattcgtggctcgaacgacctccaggacacgccgtcgcaggtgttccacctggaagccaaatcgccctccgctttcgccgttgccagccagttcaacctgcagccgggtgacgtcgtgttcgtgggcgcagctggcgtgacacgctggagccgcttcgtgaaccagctgctgccgttcaccgccatcatcagcaacgcagccagcgcgcgcaacgatctggacaactga

SEQ ID NO: 503943 - DNA, 297 bp, Stenotrophomonas maltophilia
atgaagaagatgattgccgccctggccctgctgggtctgtcctcgccggtgttcgctcaggaagctcctgtcgctaccgaaaccagcgccgaagtcgcgagcgccgaaaccgccggcgccgccgcctctggcaccctgaccaccgctgcatccatcggcctcggcgttgcagccgcagccgtggtctacagcgtcgccgcggacagcagcagcgacgatgccggcaacaacaacggcggcaccaccaatccgccgggcggcaccaccggctcaaccggtacgaccggcacccgctga

SEQ ID NO: 503944 - DNA, 591 bp, Stenotrophomonas maltophilia
atgcagattgtctggtcgtccctttccgccctcggtgacagccgctggcttctgccaatggcgctggtgcttctgctcaccctgccccgcagcgaaacgaacctgaaagcgcgatggctctgcgccatcgcagcggccgcctgtgtgacgcttgcatccaagctggccttcatgggctggggtatcggcatcaagagcctgcacttcaccggtttctccgggcacgcggcgatgtccagcgccgtgtatccaatggtcggggtgctgctggcgggacccgaaagacgcgcccgggtagtcggcctgatgagcggggtgttgttggcggtggccatcgcctggtcccgcgtccccctgcacgcgcacagcctctctgaagtcatcgccgggttgggccttggcctgggctgcagcgtatgggcgttgcgcggcacagcaccttccagacgcccgagtgctgtgaccgccacggccgccgtgcttgccggaatgttcctgcccctcacgctacctgatatccagacccatcaactggtcatcgcactggcaaaattcatctccggcaggactgagatttcccagcatccctga

SEQ ID NO: 503945 - DNA, 672 bp, Stenotrophomonas maltophilia
atgatcgaactgctggacctgcaacagaccctgcatgccttcgccgcctgcaacgatgaggatgcggtgtatgcctccttcggttgggtgcacgccaccgatggcgatctgctgcaggcgggtttctggttgccggccgatgaagaagcagcgttcgacgacgacagcgatgttcctgcccgggcgcgcgcgctgggcctgtccagctatcttgaaccggcgaccttcgccgacgtgctcgacgtgcagaagcggcaacgcccactgtccacactggccgactatgcgcaggcgctggcgtactacgccgagtacgacgcgttccagcaggtcgagggcatcgacgaggccctgggcgaagcgggtgctgaggaacaagcagaggcgcgcgaggcaggggtgggcgcaggcatcttcgcttcgttcgacctgtgcctggtggcgtgcccggcagaccagctgaaggctgctgcgcagcgcgtggcgcgcctgctggagattccggtgggcgaggcgttggcgcgctgccgtgcgttgccgctggtgctgggtgaagcgctggatcgtcgccgcgcgcaggcgatcaaggatcagttcgaagcgatcggtgcgaccgtgcaggtgcacgggttcaagtcgttcccgtggatggatgcgcccgtactgcgttga

SEQ ID NO: 503946 - DNA, 6699 bp, Stenotrophomonas maltophilia
atgagcagtctgcgcgatgcgatgagccacgcagcgctgggctgggtcaagcccgagctggacgagaccctgcgccaggtgcgcaacgaggtcgagtactacgcggaagacccggccgatgccagccgcatgcgcatctgcgccggctacctgcaccaggtgcagggcaccctgcgcatggtcgagctgtacgccccggcgatggtggccgaggagcttgaacagctggccaatgccatcggcgccggtagcgtggctgatcgggatgaagcctgcgcgaccctgatgcgtggcagcgtgctgctgcccgactacctggagcggctgcagaacggccaccgcgatattccgatcgtgctgatgccgctgctcaacgaaatccgtgccgcgcgtggcgaagagggcgtgcatgacagcgtgctgctggcgttcgcgccggacagcgtcagcgccaccgaggccgagctggaccatgcccgtggcagcctgagcgggcgcaaccgcgagctgctggataccgtgggcagcgcggtgaaggaagaactgctgcgcatcaaggatgcgctggacctgcacctgcgtactggcggtgcgcccgaacagctgcagacccaggccaacgaacttggcgccgtggccgatacgctgggcatgatgggcctgggcgttgcccgcggcgtggtcgtgcagcagcgcgatgcgctgcgtggcgtggtcgaagggcgccagcagatcgacgagaacctgctgctggatatcgccggcgcattgctctacgtggacgcgtcgctggacgaccaggtcgcccatctgggcgccggcggcagtggcgaagatgaccccagcgcggtggagaaccggcgcacggtggaggtgctggcacatgaggccatcgccaacttcgccgccgcccgcgagcatttcgtcgctttcattgaaaccagctggaaccatgccgagctgcaggacgtgccgcgcctgctgggcgatgtgtccggtgcgctgcgcatgctcgacctgaacaccgccgccgattacctgcgcggtgtgcagcagtacatcgaagccgagctgatcggtcgccagcgcgtgcccagtggccgccagctggacaccctggccgatgccatggccagcctggagtactacctcgaggctctgcgcgaccgccgcccgggtcgcgaggacatcctcgacatcacccgcagcagccttgaagcgctgcgctattggccgttgccggaccgcaatgcggtggcgcctgttgccgccgcgccgattccgttcgcatcgctgctggtggaccgcgagccgatcgcgctgcagaccgagccggtacagccggagcccatcgagattccggtgcagccggccgcgcccgccgccggcacggtgccggtgccgctgccggacttcaccttcgatccgccaccggccgcgcctgcaccggaggtggtggacaaccgcctgatgttcggggcgctggggagtgtcgcctccacaccgctgtcgctgcatgacgacgcggatgcaccgctggtcttcgccgcgtccagcgcgcctgcgcccgaggtaccgcaatgggatctcgcaccgttccatccggactccgagccgaccgcgagtgccgaagacgagcgcagtccgaccttcgccagcttcgacccggtcagtttcgaacgggccgaaaccagcgtggaaccggcgccgcagtggacactgtcggaggcaacaccgccggcattggccgatgtggctgtgatggatgtcgaggacgacgtcgacgcgtcggtgccttttgacaccgctgacgttgctgcgcccgtgttcgacccggtggctgccgagcacgatgtggtcgccgccggtgacgacgtggtgttccgtttcgacgccgatgcgctggacaatgccgacgacgtgctgtcgctgcacgcgatggagacgctgtcgctggacgacgacgccggattgcacccggcgctggagatcgtcgatcccgctgcatccgtgcgggtggacgaaagccctgtggttgccgaagcggacgcggttccggcggatgtgcaggaggacgtgcccgcgccgatggccgaggtgctgacgccggtctccgatgcaccggcaccggcaccggcggtgtcggtgattgatatcgacaccatcgcgcccatcgacttcagcgaagccgacgcgcagttcttcgccgagctgagcgccgcggcggccgacttcaatccgcaggccatggcggctccgcccgctgcggacatcccggtcgtggccggcaccgagaccggcttcgaggccggcttcgacgacgatgccgagaacatcgacgaggacatccgcgaggtgttcctggaagagttcgacgacgagctggccaacctgggcacgctgctacccgcatggcgcatgcagctggacaacatggaccggctgcggccgatccgccgcatcttccacaccctcaagggcagtggccgcctggtgggtgcacgcaccctgggcgagttcgcctggaagatcgaaggcatgctcaatcgcgtgctcgatggcagtcgcccggcgactccggcggtgctggcgatggtcgacaacgcccatgccgcgctgccgcagctgaacgccgcgctgcgccatggccagcgcatcagcgtggacctgcaggcgatgcaggccattgccgatcgggtcggtgctggcgaggagaccttctacgtgccgttgccggctgcggccgcaccggcagcgacactggccgagtccgaaggcgaagacgaaatcagccgcctgctggaagccgaggccgctgcgtcggcgcaggccgatgccacggcggtggcggaagacgccggtaccccggccaacatcgacagcgtactgcgcgagatcctcgaggccgaggtcgaagtccaccaggcgaccctgcaggaatggctgcgttcggcgcagcaggcaccgcagccggtcagcgacgcactgctgcgtgcggtgcacaccatgaacggcgccttcgcgatgaccgaagtgccggaaatcacggcggtcaccggcggtgccgagtcctacatcaagcgcgcactggccgccgacgtggtgcctggcgacgagggcgtagccgcactggatgcgaccgcgcaggcgatcaccgcgaccatggaggcgctgcaggccgaacagccgcggattgttccgcagggcgcgttggtacagcggctgcaggcattggccggcgaactgccggaagcgcgctggccgctgttcgcgctggaagacgaggatgaagagggcgtcgagctggcgcctgatgccgtgcaggcatccgcggccgaagcgccgctggccgggctggacacgctggacgaaaccagcatgccgtccgctttcgatgcggcgaccgatctcattgccgagccgcagtcgcatgccgaagatgcgctggaaccggttccagctgcaaccgggctggaggcgctggacgtcgcagccgacagcggcctggacgtgggcgagctgaccgccagcgacgatctttcgcgttacttcgacgccggctggccgtcggtgccgggcgaaggtgaacctgccgcggcggacaccggcgcgattgaatcgatccagccgattgaaagtgcgcctgatgttgcccaggacgaatcagatgccgtgccggcgatcgcgacggtcgacgacgctgacctgaccatggcggacgatctgtcgccgtacctcgacgccagtgcgctgccggtggatgaccgcgacgcggaagagttgccggtgtctgcggaagttgacgcgatcgacctgaatacgccgttgccgtttgattcggacagtgacgatgacaacgtcattgacgacgctgctgcactgccactcgacagcgagctgtcgagcctgcaggatgaaatggctgtgccgggttttgcagaaccggtcacgctggcagccgcgctcgaggccggcctgcacgtgatcgaggaggagcagaccctggacgacgacgggcaatggcccgtgatcggcctccaggccagcgaactcgcgccgggtgaggcagatgcctttgccgaggatgcggacgtcggcggggaggcggcggtcggtgaaggagagagcgccgatcagccgtccccggcgacggtgattgaggagatcaccgcggaggcgccgcagggcggcactgctgcggtgcgcttcttcgaaatggaagacgcaccgggccagggcacggtcgataccgatgcacaggttgcagcgaccgacatcgtgccgcgtgcgccgcaccacgagcaggcacctgttgcggcggatgccgaggacggcgccgatgcactcgacttcagcgtgtacgaccgcgagctggtcgatatctttgtcgaggaaggcaaggacctgctcgaccactgcgatggcctgatcagcgagctgcgtgatgcgccgcaggaccgcgaggtgctggccggcctgcagcgtgatctgcacaccctgaagggtggcgcacgcatggctggcatcaatgccatcggcgatcttggccacagcatcgaatcgctgctggaggcggtggccgctggccgtaccgagatcgaacgtcgcgacgtgcagctgctggagcgtggctttgaccgcctgcaccagctgctcaccggcaccggcgcgcaccgcgtggtggagccggcgcaggatctggtcgaagccttcgaggtccgcacgaccatcgatatcgccgcagccgctgcggccgcgcgtgcggccagcgagatcgagaccgtgcccgcacaggccgcgggcccgctggcgaccctgatcgaagcgccgctgtcggctccgcttccggccgagggcgtggtcgatgaagatccgctggcgcgtccgcagcaggagcaggtgcgagtgcgtgccgacctgctcgaccgcctggtcaaccatgccggtgaagtggcgatctaccgctcgcggcttgaacagcagctgggtgccttccgtggtgccatgggcgaactggagcgcaccaatgcgcgactgcgcgaccagctgcggcgactcgacctggaaaccgaggcgcagatcgtcgcccgctaccagcgcgagcaggaccaggccgaccagaagttcgatccgctggagctggaccgcttctccaccctgcagcagctcagccgtgcgctgaacgagtcggcggccgacctggggggcctgcagggcgtgctggacgatctgtcgcgccagtacgattcgctgctgcagcaacagtcgcgcgtcagctccgagctgcaggatggcctgatgcgcgcgcgcatggtgccgttcgatggcctggtgccgcgcctgcgccgcgtggtccgccagtccggcatggataccggcaagcaggtccacctgaccctggaaggaacccacggcgaactggaccgcaacgtcctcgaccgcatggtcgcgccgctggaacacatgctgcgcaactccgtggcccatggcctggaagcgccggaacagcgccgcgccgccggcaagccggaggagggcgagatcgccatccgcctgcaccgcgaaggttcggaaatcgtgctggaggtggccgatgacggtgctggcctggaccgcgaggcgatccgccgccgcgccatcgaccgtggcctgctggccgccgatgcgcagccgaacgagcaggagctggacaacctgatcttcgcgtccggcttcaccaccgccgaccaggtcagccagctggccggtcgtggcgtgggcatggacgtggtgcgcaacgaagtgcgccagctcggtggctcggtcgacatccagtcggtgcggggccagggcgtgcgcttcaccctgcgcctgccgcagacgctggccgtcacccaggcggtgttcgtgcagatcggcgaaaccaccttcgcggtgccggtggcctcggtcagtggtatcggccgcctgtcgcgcgagcgtttcgaagccgccgacagcagctaccgttacagcggcgaagactatccgctgtacgacctcggcagcctggtcgggcaggccccggcgcgtgccgatggccaggaccaggtgccgctgctgctggtccgtgccggtgatctgcgtgccgccgtggcgatcgaccaggtgctgggcaaccgcgaaatcgtggtcaagccggtcggcctgcagatcgcgtcggtgccgggcatctacggcgcgaccatcaccggcgatggccgcgtggtggtgatcctggacgtggcgccgctggtgcgccgcttcctcgccaacccgacgctgcctgtgctggccaacgcaccgcgccaggagcgccaggtgccgctggtgatggtggtcgacgactcgctgacgatgcgcaaggtcaccggccgcatcctcgaacgccacaacttcgaggtcagcgtcgcccgcgacggcgtggaagcgctggaacgcctggaagagcgcgtgccggacctgatgctgctggatatcgagatgccgcgcatggatggctacgagctcgccaccgcgatgcgtgccgacccgcgctacagggacgtgccgatcgtgatgatcacttcgcgcagcggtgacaagcaccgccagcgcgccttcgagatcggtgtccagcgttacctgggcaagccgtaccaggaactggacctgatgcgtaacgtgtacgacctgctggggatcgcccgtgtccgtgagtga

SEQ ID NO: 503947 - DNA, 552 bp, Stenotrophomonas maltophilia
atgctgtcccggtgcctgttggcgctgtgcgctgcgctgcctctgggcatggcccaggccgcagcggcggatacactgtcgctggccaggcaggtcaatgagcagatcgtgcacaagcacatgcgcgaggaagtgcaggcgttcgccggagcattcaacggcagcacgatgctgccccaggatgttccggaaggctgccgggcgcagatgcgtgaggcggtaaccggcatgtacacggcgatgaccgagcacctgaaggcgggcgtcgagaacccggcgtatcagcgtgagcttgaacagggtctggccaccgtctattccaacgaccagctgaaagcgttcctggcgcgcggcgccagcgacgatatcgctgcgctgtcggcagagatcctgtcgggaccgggcctgaaggagatcgaagaggcgcagaagcagaagatcctcgctggcctggatgagcagaccacgtccagccctgcgctggctacggcgttgcaggccgccagtgccgcaaacgctgcctgcgaacgcctgcagatcgacgccagctga

SEQ ID NO: 503948 - DNA, 714 bp, Stenotrophomonas maltophilia
atgcgtctgttggtgatcgaggacaaccgccagctggtggccaacctgttcgactatttcgagtcgcgcgggcatgtgctggacgtggccccggatggcatcaccggcctgcacctggccggcagccacccctacgatgcggtgatcctggactggatgctgccgcgcatggagggaccggaagtgctgcgccggctgcgtgccgagcacgcgtcggaggtgccggtgatcatgctgaccgcgcgcgatgaactgccggacaagatcgccggtttccgcgccggtgccgacgactacctgaccaagccgtttgccctgcccgagctggaggtgcggctggaagcgctgctgctgcgtgcgcagggccgcaacccgcgcaagcgcctgcaggtgggcgatctggtgctggatctggcgacgctggaggcccagcgtgagggcctggtgctgcacctgtacccggcctgccgcaaactgctggaagtgctgatgcgggccagcccgggtgcggtgacgcgacagcagctggagttcgccctgtggggtgacgagccgccggatggcgacctgctgcgttcgcatgtctacgagttgcgtcgcagcgttgacggtccgtttgccgagaagctgatccacaccctgccgcgcgtgggttaccggttggcggtagtggagggtgccgacgccggaaggaatgctgatgagggcgcgtaa

SEQ ID NO: 503949 - DNA, 1155 bp, Stenotrophomonas maltophilia
atgtaccgttctgccgcccattgcctcactctttcgctgctggccttctgtgctcctgccttcggcgcaggccaggcaccgcccgccgatgtggtgacgaccccgaccatcaccgtgtcggccgcacgtgtgccgaccccggaagaagtgttcgccattcccgcggacctgcgtgcgatgctccagaagcaggtgatccagcgcagctactcccgcgaccagcggctgcaggcactcgtggagatgatcttcgaccagcacgggctggacctgcagtacgacgccaatgcgacctacaccgtcagcgatatctggcagcaccgccgcgccaactgcctggccttcaccctgctgttcgtgacgcttgcgcgggaggctggcatccaggcccgcgtgcaggaagtcgggcaggtggtgtcctggtaccaggaccaggatgcgggcgtggtctacagcgtcggccacgtcaacgccggtgtcgacgtcggtgggcgcttcggtaccgtcgatctggaccgcaatgtgctctatgaccgccgcgggccggttcccgtcagccgtgcgcgggcgttggcgcatttctacaacaaccggggtgcggagcgcctcgccgacggtgatttcgtcggcgcgcgtgcattcttcgacgcgtccctggctcaggacagcgggttcgctccggtgtggaacaacctcggcgtgctcgaccaccgcgaaggcaacaacgaggcggcgcggcaggcgctggaccgatcgctgcagctggaaggccgccaggatgccgcactgaccaatgcctccgcgctgttccgcagcctgggcttgaccgcgcaggcgcagtcacttgagcgccggttgaagtcggtgcagcgcgaagatccgttcgcacagtacatgttcggcgccaaggccgaacgtgccggccagctggaccaggcgatccgctattaccggcaggccgtgcgcctgtatgacaccgcgcatcagttccacttcgggctggcacgcgtctatttcctggctggccagctcaagcgcgccgatcgcgaactgctgcgtgcgcaggaactggggggcgcgccggagcaggcgcgctaccaggccaagctggacagcctggcccgctggcgcgcgcagcagcaggccaagcgctga

SEQ ID NO: 503950 - DNA, 1314 bp, Stenotrophomonas maltophilia
atgccgatctccgcaacgccccgtccatcgggtacctccagcagccaggcgccggtcatgaatgtccgtgctgctctggcggttgccaccaccatattcttcatgtggggcttcctgaccagcctcaacgacgtgctgattccgcacctgaaggcggtgttcgaactgaattacacccgcgcgatgctggtgcagttcaccttcttcggcgcgtacttcctgatgtcggtgccggccggtcggctggtggcccacctgggctacaagaagggcatcatcgccggcctgctgatcgccggcgtgggcgcgctgggcttctggccgtcggccgcattgcgcacctatgaagcgttccttggttcgctgttcgtacttgctaccggcattaccgtgctgcaggtggcagccaatccctacgtcgcgctgctgggcccggaacagaccgcatcgagccgtctgaccctggcgcaggcactcaactcgttgggtaccactctggcgccgctgtttggtggtttcctgattctgagcaccgcagtgaagagcggcgacgagatcaacgcgctgcccgtggccgaacagattgcctaccgtaccgccgaagcgcagtcggtgcagggcccgtacgtgggcctggccatcgcactggtgctgctggcagtgttcgtctacctgttccgcctgcccagcctgaccgagaccaccgagcaggccgacagcggccaccacacgctgctggatgcactcaagcatccgcacgtacttttcggcgtgctggctattttcttctacgtcggtgctgaggtgtccatcggcagcctgatggtgaactacctggcactgccggagatcggcggcatgactgaacagcaggccacgcactatgtgtcggcctactggggctgcgccatggttggtcgctttgcaggtgcgtggttgctggccaagtactcgccgcgcggcctgctggccggattcgcagtggccaatgtggtgctgctgggcgtcacgctggcgtcgggtggcaaggtcgcgctgtacggcatcgtggcgaccggtctgttcaattccatcatgttcccgaccatcttctcgctggccatcgaacgcctgggcccgctgaccaacaaggcgtccagcctgttgatcatggccattgtcggcggcgcgatcatcccgctgctgcagggcatgctggccgaccgcatcggtctgcacctcagcttcgtgctgccggtggtctgctacgtctacatcatcttctacggtctggtgggttcgcgcccgccggcttccgcaacgcagggaggctga

SEQ ID NO: 503951 - DNA, 1593 bp, Stenotrophomonas maltophilia
atgttggacgccaacctgcagtcgcagctgaagacctatctggagcgcgtgacccgcccgatccagatcaccgcgcacgccgacgacggcgccaagtcgcaggaaatgctggaactgctgcagaccctggacagcctgtcggacaagatctcgctgcaggtgctgcgcgatggccagggccgcgtgccgtccttcgacctgggcaccccgggccaggatatccacctgaccttcgccggcctgccgatgggccacgagttcacctcgctggtactggcgctgctgcaggtgggtggtcatccgtccaaggccaccgccgagctgatcgagcaggtgcagaacctggaaggtgaatacaagttcgaaacctacttctcgctgtcctgccagaactgcccggacgtggtgcaggcgctgaacctggccgcggtactcaacccgcgcatccagcacgtggccatcgacggtgccctgttccaggacgaagtcgagaagcgcgagatcatgtcggtgccgaccgtgtacctcaacggtgaagtcttcgaccagggtcgcatgaccctcgagcagatcgtcgccaagctggacaccaacgccagcaagcgcgatgccgagaagatcgccgccaaggatgccttcgacgtgctggtggtgggcggtggcccggccggcgcggcagcagcgatctatgctgcacgcaagggcatccgcaccggcatcgccgccgaacgtttcggtggccaggtgctggacaccatggcgatcgagaacttcatctcggtgaaggagaccgagggcccgaagctggccacggcgctggaacagcacgtgcgcgagtacgaggtggacatcatgaacctgcagcgcgccagtgcgctggtgccggccggtgaagacggcctggtgcaggtgcagctggagaacggcgcggtgctgaagtcgcgttcggtgatcctgtccaccggcgcacgctggcgccagatgaacgtgccgggcgaagaccagtaccgcaacaagggcgtggcctactgcccgcactgcgatggtccgctgttcaagggcaagcgcgtggcggtgatcggcggtggcaactccggcgtggaagcggccatcgatctggccggcatcgtgtcgcatgtaaccctgctggagttcgattccagcctgcgcgccgacgaagtgctgcagaagaaactgcgcagcctggccaacgtcaccgtgctgaccagcgcacagaccaccgaagtgctgggcgacggcagccgtgtcaccggcctggtctacaaggaccgtgtcggcggcgacgcccaccgcgtcgagctggaaggcatctttgtgcagatcggcctgctgcccaacaccgagtggctgaaggacaccgtggcgctgtcgccgcgtggcgaggtcgtcatcgatgaccgcggccagaccaacctgccgggcgtgttcgctgctggcgattgcacgacggtaccctacaagcagatcatcattgccatgggtgccggttcgaccgccgcattgagcgcgttcgaccacctgatccgctcgtcggtaagcaacagcagcggtgccgttgctgaagctgcctga

SEQ ID NO: 503952 - DNA, 843 bp, Stenotrophomonas maltophilia
atgcgggtcgtcgctggcgatgtatggcgggttgctggcaatcaggtcgaagcgtgcaccctgcagtggcgcataccagtcgtgcccgccatcggcgaagcggacgttgcgcagttcatggcgcgcagcattgcgcgcggccacggccagcgcgcccgggctggcatcggtagccagcacctgcgcttggggccgttcggtggccagtgcaagtgcaatcgcaccgctgccggtgcccaggtcagccagctgcagcgattggtctggcggcagccgctccagcgccagctcgaccagcagctcggtttccggacgcgggatcagcgtggccgggtcgacctccaggtccagcgtccagaaaccgcggcggccggtcaggtaggccaccggctcaccggccacgcggcgggccagcaacgcttcgaaggcggccaggtcggcggcggccagcggatcggtggcatgcgcgaacagccagctgcgcgggcgctccagcacatgcagcagcagcagttcggcctcgtggcgggcctcgacgccgccgaggcgggcactggcctcggccacgatctggcgcagggagggttcggtttgggaaaacatgccgcaattgtagagcggagcccatgctcggctgcttctggcgcagtcgagctacacatccacaggtccgcagtcgagcatggctcgactctacaaaaggctgcaatccgttcaggttctgcccgaggggataaggagggactattggccctattcagccgttccggaagattttccttgtcacacaggcagttgcaggatgaaagcgtccgggttcagtgcctgctcagtgcattctga

SEQ ID NO: 503953 - DNA, 468 bp, Stenotrophomonas maltophilia
gtggcggacatcacctatctgccgacgcaggggaagttcgtgtatctgagcctggtcaccgatgcctggtcgcgcaagatcgtgggctggagcgtgcatgaaacgctacagacagagcaggtagctcaggcgctggagatggcgctgaaagggagaaagacaccgcagaagctgatccatcactctgatcgtggaatccagtactgctcggattactaccagaagatccatgcgcggcacggcctgacctgctcgatgaccgacggctacgactgctatcagaacgctctggcagagcgagtcaacgggatcctcaagtgcgagttcctgcttcatcgcccacgggacctggggcaagcccgccagatggtggctgaggccgtagacatctacaacgttgagcgcccccacctgtcccttaaaatgcagacgcccgatgcgatgcatcgggcgtctttggccgcctga

SEQ ID NO: 503954 - DNA, 357 bp, Stenotrophomonas maltophilia
atgtcgctcaccacatcgccacgaattgaagttgccgcctgcgaattggatatggccatcgatgacgatgagctcactttcatctttgtccgatggggcgaggctgggcaatatctggacatcacacgcgattgcgaggaagccagaacctatcttgagttctgcgatcaaggcgctggcttctatccggaccgcgtcgagatcagttttgctgacggcaccctggtcgtgcagcttgatccgacccaggcgcttggacctgacgtgcaggaaagtcgcattcatatcagcttgagcaggttctcagctgacattgagttgctgcacgcctgcatttccttgctgggctccaaatag

SEQ ID NO: 503955 - DNA, 195 bp, Stenotrophomonas maltophilia
atgatggaaagcggccgcgcgatcggcaagcctcggaaacccttggccttcaatgctgccagcgtggtgaacctctccgatgccttggcacagcgccagaaaaagcggtcaccgggggcgatggctgggcccgacgccgagccacctgcagcagtcctgccaataccggggccgaaacgccgccagcgcgtgtga

SEQ ID NO: 503956 - DNA, 195 bp, Stenotrophomonas maltophilia; identical to SEQ ID NO: 503955

SEQ ID NO: 503957 - DNA, 864 bp, Stenotrophomonas maltophilia
atgggcatgcggcgacaggcgggaggtgggtgctgtagagccgagccaggctcggctggcgggaacgcaatcaggcgcacggcaacggccgcagggcgcctcagctggcgtgcggtgcgggcggtgcgtggccggggttcaaccgcagcgcgggatcatgcaactgccagcgcagggcatcggagcgccacagcgggatacgcgcgaccagagcggcgcgtgcagggaccagaccggtgcagggcgaggtgccctcgccatcaaacggaggctccggtgctggtgcggcgtgctgcgggcattcgtcggctggcggttgcggcagcggcatcgcctgcagcagatcttcagcgtgtgcctgccagccgtgcgcagccggatcgccgccacgcccctcgtgcaaggccgaccagcccagcagcaacgtcagcagcacggccacgagcagtggccacccttggcgggcgagctggcacagcgtggcggtgggcgcgggcgaagccatggcgcaggggcgatgtcgttacgaagatgttacgtagaataacatcaacgataatgattcgcatatgcgcaatcgggttgccgatctggatggcctggaagggccttggagggcccctcagtgcacttcagtggatccgccccatgggtggatgctctcccgcgaggcgccctctgggggctctccgggccgagcgccgcctcaatcccggtcgtcgcgggtccagaccgcgtcgtgctcgcgcttcaccggaaacttgggcaccggggtataggccggggcacacagggcgcggccgtcacgaacgtcgaaacgcgcgccgtgcagcacgcactccacgctgccttcggtcgtgttga

SEQ ID NO: 503958 - DNA, 585 bp, Stenotrophomonas maltophilia
atgcgcgcgttgattctttctctggcccttgccagcctgctcccccttgccgccagcgccgccgagccccgtagcgattcggtcgccgttgccgtcggggtgaatgccaccgtgatcacgccgcacaccatcgcagtaagggtcacacacgcctgggaggcgtcccccacggaaaccgccaccggggttcagtccttcgaacccatggaagcgccgggccgtggcccatacgcggcttacaactcaatcttgaagaagaaccccgcaacacgcgaaagcgtcacgctgtgggtgattgacgaggcgcagcgctactacacgctccgagtgacgtatgagcgcgtcccatgccgcgacacgcgaaacaacggtgtggatgacagcgtatgtgcgctgcgcatcgctggccgcattctgccgttctacatgcagggcgacgagcagggggcttttgaggtgggggatcaagtttttctccgctccgaagggaccgcgcagccagtgattacagagcttgaggcagcttccgtatccgtagtcatcggtgcgggcagagaaaatgtagccgttggagggcagcgctga

SEQ ID NO: 503959 - DNA, 210 bp, Stenotrophomonas maltophilia
atgaaatggctcgcatttttccgcaagcgccccgatgccgcgctgagcatcgaggacttcaagcaatctccaggccacgttttgatggacgagagcggatacctgggcctttctcacgaagcagcagcccagatcgatcggttgcgccaagccaagggctggggcgtgcgctctgccaacgcggcaacgaccggcaaagggcggcgctaa

SEQ ID NO: 503960 - DNA, 315 bp, Stenotrophomonas maltophilia
atgagtgcgttgacgatgctggtcctttccatgctggtccttgctgtgtttctctgctcggcggcgtttctctcttttatgatcgcgttgacttacccgaccgtaaagcaatcgctggcccttttctgcgccgggaagcgcgacgcatcgctctacgtggatttcgcgatttttggggggatcttcgcgggttgcgtcctcacgctcgcattcggggcggtggtaatggccctcaacatttccagcgctgaggacgccgctctatacgcggccaccttgcttagcgcggggctgggctactgggtgggccgatga

SEQ ID NO: 503961 - DNA, 1044 bp, Stenotrophomonas maltophilia
atgcctgcggagatccaagccatctacgacgctgcccaacgcaacacgcctttcagcatggacgtggacgacgccctggccgcgcaccgcaacgcacacggcgaagcggagcaaatcgagcacgctcagcgtgtggatcctgcggatgccatgccctcggagcgctaccgggcttatgtgagccaacgccgctatgcggtccgcgcctgcattcaggccggcatggcacgaaaggacatcgcaaggttcctcggggtggctgtttacaccttgcagaaagatgctcaagcccttggactgcggttgccggtctgccaacgacaaccgaggagcattgcagggcactcggttgaggaagtgctgagcctgctccacgaactgggcacccgcacccgtgtggcggctcggatcggcgtcacgcagcaagcggttagcctgttttgcaagaaatacgaactggacatgccgcaaaacggaaagaaggcggttgttctggctcggcgcaaagaggtgcgccggttgagcgaggccggcctatcggtgtctgaaatggcgcaacagttggccgtgccatacgcgtgcataacggccgaccgccaagcgctgaagctgccgcgtgtgcgtctgccggcagagaaaatgaccctcttgggcttgagtcgagcagagatcgaggcccttcttgctcgattccagaccatcaaggcagtggcgttgcatctcggaaccagtggggcgcatgtgtcctcttacatgaagagagccggcctcaaagcgccacgggacgggcgatgccgccaggccactacaccatcgaccgaccgcaaaccgctgaagcttccgggcatgcgtaaaccggcggagaaaatgaccctctcgggcttgagtcgagcagaggtcgagatcctgctcgcccgattccagacggccaacgctgtggctctgcatcttggggtcagcgcgtcgtctatatctgtttacatgaaaagagcaggtctcaaagcgccgcgcgatgggcgacgtcgtcaggccactccatcatga

SEQ ID NO: 503962 - DNA, 300 bp, Stenotrophomonas maltophilia; identical to SEQ ID NO: 498297

SEQ ID NO: 503963 - DNA, 1107 bp, Stenotrophomonas maltophilia
atggtcggtgatcgcgcggtgccgggcgggtcgggactcccctcgtctaacaggggagtcagtgaattcaggaacgagacgggcaccctgacggtcggcattgactggttctccgcttccatcgatctgcgcgcagcgctggacgaactcgcgttccgtgatggcgacagcttcgaagaggtccgccagtggattgagttctccccggagaatgcgcgcattgcggccctgcaggtgttctgctggttcttcgccgggcttggcctagaactggatgaagccgtgggtggcggtcgcttctacacgtggcgaatcaagatcatcgacgcggcaaagaagttcgtcggcatgatcgaattgggtggcgaagattgccgccgtgccgatggcacgtataccgctcgcatcgagctaactggtgatggatgcaaggcgataggcgcagcgcgctgcggccatgcgcagcggtggctggagcttcgagcgaagctcgaaagctgcgccggaaggatcacccgcgtcgatgtgtgcgccgatgacctggtgggcgactacccattgcgcatggcgcaaaagtggtacgccaatggcgacttcgacaaccgtggtcagcgccccaaggcgcagttggtggacgactacgacagcggtgacggcaagaccttctatgtcggcggcaagaagtcggagaagcagctgcgcgtctacgaaaagggaagggagcagggcgacaagagttcgccgtgggtgcgctacgaggcgcaattccgcaactccaaccgcaaggaattgccgctcgacattctgcgtgatccggcgtcctacctgctgggtgcctatccggtcctgtcctttctgcgctgcgttgcgacgcgcatcgaaatcacgaaagccgctgttgaagcgacgtggaagagcgtccgccgccacatccgtcgccagtacggtgcggccctcaatttcatcgccaagaactgccctgacgatcaggcgttgcgggcggtaatcgaatcctgcacttcgccatcgctgccgaagtgggtcacaggtgacacagcagcgcaatggcccgaaatcgcggccgtacagccaacccaaaaggggtaa

SEQ ID NO: 503964 - DNA, 381 bp, Stenotrophomonas maltophilia
atgattgagttcgacccgcaccaccgtattgacttgaccggcccttgggccggtttttctttcctgggtgaccgtctaattacgcccgaaggccgcgagctgctgcccgaggatctggcctggctgtcgctcactgcctgccaggcgcaggaatggcgccggatgatggaagctgcgcgctcggcaccgtcgatcgacagttccagcattgtgcacaatcggaacgccggcattcaccatcaccctgccactgtcgtcaatctgcgagacgttgtgagccggcgcaaagagcgttcggcggtggcgatggctggccccgacgccgagccaccaggagcaatcctgccggtatcggggccgaaacgtcgcgagcgcgtgtaa

SEQ ID NO: 503965 - DNA, 1374 bp, Stenotrophomonas maltophilia
atgatcgcttatcgaaatttggtcgcgttggtggctgtgattctgctaagcatggggcttcttttctccggaaccgcaggggcgcagcaatatcgatgcacggatcccaacaaccgcgtgtgcgatcaaggcgaggcactgtcagaggcgtggagccacgcacggcgcgtgcttagcagtggatacaatcctgcgcagtatgaagcatgcgtttccgcgagcagcaaatcgtttagcggctacatcacgcagactggcaaatgcaatgctggcctatggtctacgggccatcagacgttctattggggcaagtcatgcgctgagcgtagtagtgcaaccacgccgttttttcctccgtctggatcggtgcggtgcatcaacggttgcgaatcgacatatcgtgacaacggtgacgacactacgacttactccacaaatggaaagacctgtgacaagaagccggactgcaacgcacagggcaagaacatggtgtggaacgggatgctcggcgtatgccagcccgttgagcccgagtgtccagagggcaaggtcaagacgggcaacgcttgcaccgatgacaaagcctgtcctgatggcatggcattggtcgccggctcgtgtaagaagaaggatgaagaatgcccgtccggcatgatccgcagcccctcgggccagtgcatccctggcgatggttcgtgcgcatcgggtgaggtgcgtgggcctgacggcacctgtaaacgcgataaggacaatgatggcgagcctgatccgaccggaccggacgacaaggattcgttctcaggtggtgatacgtgttcgtcgcctccgtcgtgtagcgggtcgccgatcatgtgcggccaggcgcgaattcagtggcgcattgattgcaatacgcggcgcaacaacaacatcagcggtggtcagtgttctcaggccggcatgcctacttgcactggcgagaaatgcaacgccatggagtatgcggggctgctgatgcagtggcgctccgcgtgtgcgctggaaaagctggctgccgggaagaccgagacgccgggcaacaacgccgatgccaacggcaatggcgtgccggatgcgctggaaggtagcggcgaccctgctccgattggcgacagttcaacagacgtccagggcgccaaaaaatggggtatcggggtgtcaaccggattgctcgatacgagcaacatgtttggtggtggatcgtgtccaacaccgccaacgttcaagctcatgggccagacgatcagtggcactgacttcccttacttctgccaagcggcggcgattctgcgtgggctcattcaaatatttgccgcgttcgttgcattgaaaatcctgatgggctgggggttctga

SEQ ID NO: 503966 - DNA, 183 bp, Stenotrophomonas maltophilia
atgaacacggtgccgccaagcttcgttgaattcctggacgtgatgcgcaacgacagtggcttactggccgtcgccatcttcatcagtgttgtttccctgggcgcgctggtttcgatcctgattgagcatctctggctcgcgcttcggcactggttgcagcggcggaagggcaatgggtcatga

SEQ ID NO: 503967 - DNA, 240 bp, Stenotrophomonas maltophilia
atggacgcactcgtttcagtcgtgctgctgggttgcatcgcagccgtctcgctggggttagtcaaattcgtttcgtggtgtgttgatcggcgcgtttactccgccggacgcactgcacgcgaaagccagcacatcgcacggtcggtcgctgacctgcgccgcctggaaatcgaagctaccaagcgcggcaatctactggccgccgccgagcttgccgacgaacaggagcgggccgtatga

SEQ ID NO: 503968 - DNA, 687 bp, Stenotrophomonas maltophilia
gtgctggagggctccttagagctcttgggtgaaattcgagccgcttggatggagatagagcatggacgtgaccgaagatcgacggcggtggcggcactttgccagatgtcccttgatcacgccgtggcagtacagtccctgatcgctactctgccccagtcagcaatctcgctggtccggccccagtatgaggccctcgtgcgtgcaacctgggcatgttatgcagctaccgacaccgacatcgagaagcttcttgcgcccctgactctggagagtcagcaagcggcaaagaggctccctggcgttcaggacatgctcgtaaagcttgagtcctctggggccccgaggagcatcacagttgttgggcagagccagacaatgcctttatgtcggcttgaactcctatctccatgccgggattcaccccttggcaaggcagttaaatggctacccgggcgcgcttctggcgggggtggccatgaacagcaatgcgcttgccatgctaacccttctgaatctggcgcacctgtggccaggcgaaccagttctggcatggatgaatgcactgcatcatcaatttgggggtgttttgccagagttggagccattgaccccccatcagccctcgccatagagctgtcccggatcgcctgcgcgtctagggtggggtctgtggtgagtgactag

SEQ ID NO: 503969 - DNA, 1773 bp, Stenotrophomonas maltophilia; identical to SEQ ID NO: 497756

SEQ ID NO: 503970 - DNA, 609 bp, Stenotrophomonas maltophilia
atgctgtggaaacttttggcggtgatggctttgttggccggcgttccggcctgggcgcagggcggttcgattccgcccaccggaacggagcagggttggaaggggctgcacctggcggaactggtaagcgagcccggggagggcctgagcgatttcatgctgcgcattgccccggtcctggaccagcacacccgtgaaagcggccacgaggtttgcggcatggtcgcccagtctgcggatgcagagcggtttggcatccgcttgggcacgacgaaaggggcgatgacctgttccatgtcgcggtccaacgtgcccgacggcatgcacgccctgaacgtctctatccactctcatccccacacccgttcagtgctgccgaccgccgcagacgtgtccttctacgcggaaaatccgctgtcgtcgggccgaatggtgaagcgtgggcgttctgagcgtgtgggcggcgcctacttctcaagcggcgattatgccgccggcccgggctacctggtggcagaaggtcagttgctctaccaggagggcaaagggaccgaaagaaacctgggccacttcgttgttacgccgggggagttggcggaacccaaataa

SEQ ID NO: 503971 - DNA, 1752 bp, Stenotrophomonas maltophilia
atgagcgacgataagagacccacggacccgctgcttgaacagcagagggaagccctgcgcgttcacttcctgggctcgctgggcgacttgctcgacgcgcgtcgcaagcgcaaggcggagtgcccgacgcttccgccaagcgctccgcgtggccagaagccgggcggctatacgctggtggaggtgttgttggtgctggccgcaatgtcggccatggcggccgccggctggctgctgttcggtcccacatcggtggccgccgacgtgaagcaaacacaaatggacttcagcgaaaccgcaacggccatcgaccgctcgctaggaatcgtaggcggcttctctgggctgtccacgtccctcgtgcgaaccgatggcctggccgcgcagcggctgcggcacagcgatggcctccgcaatgcatggggcggctcggtgtcgttcttgccgaacaccgtcaagcacggcaacgactcgtttttagtcgaaacccgcgacgtgcccaaggcggcatgcgccaagctggttgccgcgatggccggtgacccggccgttgccgatgcgcaggtcaatggcgagagcgtctatgtgaacaacaaatacgacccggccagcgccgccgttgcgtgcgagcagcacggcggggaccgcctgggcttcgtgtatttctccggtctggcgtccggctcgtcggttgcggtgtcgtccatcgcgctgcctacggctccgccatcggtgaacccgaccaacccagccacgccagtcgccccggtcaatggagcccccagcgtgggcgatgctgtgcctggaacgcctggcgtggtgacgcctggcacgccctcagcaccacccccggccgtgcctacggccccgccagcaccagcgacaccgacgaccccgccgccaacgccgggagttttacctccgagcacgccgaaggttttgccggtctgcacggtgccgccgacgcaatctcaaaacgtgggttgcccagctggccaagtgggcgagcactggcagcaacgagagggctattgcggcgaggtgggcgggccttacgaggcctgggccacggggacctatggaccgtggacgactgtttccagcacatgcgcgcccgcgtgcgtggctccgtcgcctacctccgtggccatctcccgcgacgcgccggccgaacgccaaaacgtcggttgcccggctggccaggtgggcgagcactggcagcagcgcagccgcgtcgagaacggcacgcgcaccacgtcctgggtgtgcccggccgccaccggctcgccggtgtcgagcacgtcggatagctggagcggcacctacacggctaccagcgggtgggggactacatccaacaactgcgccacgcaggggctggtggttacctcgggattcgtcaatctgtctgtggccaatgcctacggaaccgtgggcaaccgcacgttgaccgaagccacgagctggacttacctggcgggccagagttccgagtggtccagcagttggggaccagtgcggggcaatggacagatagaaatcacgttcaatggcatcactgcaaccatcactggcggtgggagcagcagcaacaccgcacgtccgggaagcccgacgtcattcacggctagcaaccaggttctcagcttcaacggtaagcgcgtggagtttgagtttcgtggcaacgcctccactgacaacggctccgtcatacgcggcagcgttgcgttttactaccgcgttctgccctga

SEQ ID NO: 503972 - DNA, 366 bp, Stenotrophomonas maltophilia
gtggcagatattgaaaagcaaaaactaaaactggcgaagatgctggaagccgcggcgaaggagcaagcaaagctcttggtcgctgagaagcaagagaaagagcggcaagcccgccaggccgcgcgtgacaaagccaaggagcgcgccaaactgttccgctcggccgatgcgcaccgcaagattgggttgggcggactggtcatcgccgccggtgcagacggctgggatgaggcagagattgtgggtgcccttttgatcatcgccggccaactcgagcgcgaaccacaaaggcgggacgcactgcgcgagcgcggcatcaaacacctcgaagctcgtgcggccgcacgagaggcggcccggtcatga

SEQ ID NO: 503973 - DNA, 1371 bp, Stenotrophomonas maltophilia
atgtcgcggtgcatctgtccgcaaaacacgactaaatccggccccttcggcggctggtcgtccgccaccggccagcccagggttaaggttgtggagtgggcgcagcgcaggcatgcgctcgttgccaactccgggttttctgactcggagagcatcaacgctatctcgcgtgagagcgggggcgcgtcggcgctgggaattggtggtagttcggtcatggcgtggggcctcggtgggggatggctgggcagcagcgcgcaagcgcaccgccgattctttgcggcgttccagaagcgcttgtgcgtgcagggcttgctcgtccacatgggccaagcgcccctcggcggcggcttgggctttcaatgcctcgaagcgctcggcatgggcggtgacgcggctgtcggccgcttggcggacccgatcgtttcgcttggcgcgcggcaaccgttcgccacggcggcgggcttgggtgaccgctttgccttcgtgcttggtggccgggcggtccaactgggccgccttggcgaaatcatcgttttggacggccgcggcctgctggctcaacaacgaacgatggtccacgcgtgcagccatgccttcgctggccagcatgcggttgacggcagtggcccagaactcgcgttccctttcggccagtgtgggttgcttggcgcgtttgcacgcaatcgggtccaatgccacagcctttttccccaagcttccgtctgggttgacgctgcacgcgctgagcaaaatgtgggcgtggtggttgcgctcgtccccgcccttgctcggctcgtggatggccacgtcagcggccacgccgtagcgctcggccaaatggcgggcaaaaccatgcgccagttcttggcgcttttcggccgaaagttcggcgggaagcgccacctccacctcgcggcacgtgatggcgtctccgcgcttgtggtgggcctcgacccggttccaaaactcggcccggtctgcggtctgttcgcccggcaggcagagggccgaaaacgcgacgccttggcggcgcgtgtagtcgtggaccgtcccggtcaatgcatcttcaatccgcacccctgcacgataggcagcgccagcggtggacgagtgtcctcccgagcgcgagtaagccttagcagtgaggtggtaaatcgccaatccagtctccgagcgcagccccctggggggcgagcaatggggggctggcgtgcgaagcgcgccggggtgtcgggggcgaagcccctgaccgcacgtaatcccgaagggattactctaagtgcgctcttgttgttttctttgggcgcttcgcacccgcatcaaactaaagagaaccggggctgctcgctgcgctcgctggccccctga

SEQ ID NO: 503974 - DNA, 576 bp, Stenotrophomonas maltophilia
atggcaggcgagcaggtggcaaaaagtttggacgagatgatcgagatgatgttcaaggtggcgcgccgggcccttcagtccagcaatgccacgcctgagcagcgttctgtctctcgcacgctcctccaacggcgtgacgacttggccgaaaagcgccaggcgcatgaggatgccaaacaagccagggaggacgccaggctggcccgccgcagggcggtggctgacgccaacacgttcccagtgcccacggatctccgctccatgttgctgcgcaaggtgggacggcccaccgtgaaggaccgggccgcgcaggcgatgcaagaaaagagacagcaggccaggcggcaagaacagcaggcccgcgcattacgcgaacagaccaaagaagccacagacaaggccggcgtggcgttcgagctggcaacggcggattttttgacgcagttcccgcaccagttcccgcccgccaaacccaccgccgacatctcgccatcacccacgcttaagccgctgccggagtctcccactgcatcccgacagcctgctaccttcagcaagcggccagggccggcctaa

SEQ ID NO: 503975 - DNA, 207 bp, Stenotrophomonas maltophilia
gtgggcgaatggtcggactattttgacgattttccggaggagaacccagcgaactgggttaacggacgttttgaccctgcgggggcccggcgcgagcatcacagggccgaagcgcttacgcaggcgcaagcagacttgaacagcaccattcgaaggatgattgacgagggcaaccggcgcgccagcgaaaaggatgctaaaccgtag

SEQ ID NO: 503976 - DNA, 1395 bp, Stenotrophomonas maltophilia
atggtgaacgacgacatcaaggacatcttgcgcagggtgcgcgagaacgggcacaacgacctgaccatccagcaggtgcggctgcccaacgggctgacgctcggcggcgtggaaatcaacacggccgaggaccgccggctgttccggcagaccgtgcaggacttgaacgctctcgcagcaaaggacccgctcatggcgggcatgcacggctgggaacccccgcggcccctggcgccacctgcgcctcccgccgggccgctgctgtccgagcgcattgacgtctacctcagcgacatgcaacgcgctcaacgggccgtgcgcaacgtcatggacaccgaatacacgcttcgcctcttcctggccctgggcgatgacaagccgattgaagaagtcacggccacggacgtgcgcgcgttcctggatgcgctggcggtctacccggccaacgcaagcaagaaagccgtgtttcgtggcctgacgcccaaggaagtgttggcgaaggccaaaagaggcggccacccgaccctgctggaacgcacccaggagaagcgccgcgaccacctggccgctttcttcaacgcccaggccgacgaggcccttatccccaaagccccgcacaaggccatcatgaatcgctccaagtcgaagaccgacgcaccgacccgcgaacctttcacgccggaagagctggccgcgctcttcgatgccgaggcattcccgccgtgggcgagcaaatacccgcaccgctggttcggctccatcctgggcgtcgccacgggtgcgcgcgtcaacgaggtggcccagctctatgtggacgacgttgcagaggtgggcggccattggggcatccatatccgtgccctgcgcccggaccagcgcctgaagaacgcgcattcctcgcgctttgtcccgttgtcggacaacgtgctgcaggcgggattcctagagttcgtcgaggacgtgaagcgggccgggtttgaccgcctgttcccgcacctccagcacacagaggccggcggctacggcgacaccatgggcgaccagttccgcgcctacgccatcaagcgcggcctgaccggccgcctgaaatccttccattgcttccgccacaacatcgttagcaacctagtcaacgagcggggcattgccatccaggtggtgcaggaaatcacggggcacgacctgaccttgcccagcggcctcaggcactacgtcaatccgggcaccatccccaagcgctttgcggcgctgaacgaatacggcccacccgtgccgctgccgacctatgtgccaggtcagtttgaccgggcctttaagcaggtggcccacatcgagcgccgcagggagaaagccgccaagacgcgccaagccaagaaaagcaaagcccccgagtga

SEQ ID NO: 503977 - DNA, 825 bp, Stenotrophomonas maltophilia; identical to SEQ ID NO: 323946

SEQ ID NO: 503978 - DNA, 282 bp, Stenotrophomonas maltophilia; identical to SEQ ID NO: 323954

SEQ ID NO: 503979 - DNA, 639 bp, Stenotrophomonas maltophilia
atgatcgtcgctctgctcaaccagaaaggcggcgtgggcaagaccacgctcgccacgcacatcgccggcgagctggcgatgcgcggccagcacgtcgtgctgctggacgccgacccgcagggttcatcgctggactggacacagcgcagaagccagcaaggcttgccacggctgttcagcgccgtgggccttgcacgcgaaacgctgcaccaagaggcgccagaactcgccaggcgggccgatcacgtcatcatcgacggcccgccacgcatcgcggcactggcgcgctccgcgctgctggcggccgagcgcgtgctgatccccgtgcagcccagcccttacgacctgtgggccagcgccgagatggtggcgctgatccgcgaggcacaggtgtttcggcctgcgctgcgcgcggccttcgtcatcaatcggcgcatcagtaccaccgtgatcgggcgcgaagcgcgccaggcgctggccgaccaaccgcttcctgcgctgcgcgcggaagtgcatcagcgcatcgtgttcgccgacagcgtggccgctggccggcttgcacgcgagacggcgccggacagcgccgccgcgcgcgaaatcaccgcgctggtggacgaactgctgcggtggccgacatga

SEQ ID NO: 503980 - DNA, 273 bp, Stenotrophomonas maltophilia; identical to SEQ ID NO: 323957

SEQ ID NO: 503981 - DNA, 534 bp, Stenotrophomonas maltophilia; identical to SEQ ID NO: 323958

SEQ ID NO: 503982 - DNA, 1983 bp, Stenotrophomonas maltophilia
atgaccgaccgccgcgacgacgattttcgcatccgtcccggcgctccgacgaaccggggccagggcttcgtctccaaggtgctcaagcaggccggcaaagccagcagcggcaagtcctcgatgcgccgccctgggggcagtgacaagggcgccggcaccggccagcggcccggctcgcgcctagggcgcggccacacggcggcgcgcttcgcgggcgcgaagctgacgcccatgtcgcggcgcgtgaccatcaagaccctgctggtcaatcagcgcaacgccagcccgcagtcgctcgccaagcacttgcgctacatcgagcgcgacggcgcgggccgcgatggcgaaccgggccaagcctacgggccgcaggccgacgccgccgaccttgacgccttcaaggaacgctgcgccgatgaccggcaccatttccgcttcatcgtttcgcccgaggacggggccgagctggacgacctgcgcacctacacccggcatttggtgaaccgcatggaagccgacctgggcacgcggctggactgggtggcggtcgatcactggaacaccgacaacccgcacacccacttgatcgtgcgcggtcgcgacgacacgggtaaagacctcatcatcgcgggcgactacatcgcccacggcttccgccaccgggccgccgaactggcgaccgaatggctggggccgcgcaccgaactggagatccagcagaccatgcagcgcgaagtggaacaggagcggtggacgagcctggatcgcacgttgcaacgtgaagtggacgacgatggccgggctcggatcgaacgcttcaacgaaccccggctgcaacgccagcgcctgctgctgatcggccgactgcaacgcttgcagcgcctgggccttgccgacgagatgcagccgggcacctgggccgttcatgccgatgcggagaagaccttgcgcgccctgggcgagcgtggcgacatcatccgcaccatgcagcgcgccatgcgcggccagccgcgtgaactggcagtgttcgagccgggcgaggatggccgcatcattgtcggtcgcgtagcggccaaggggctggatgatgaactgcgcgaccggggctatctggttatcgacggcgtggacggcaaggcgcattacgtcgcgctcaatgcccgcgacgaaccggccaactatcccaccggcgcggtggtggaagtgcgtggttccgccgaggtgcgggcggccgacaagaacatcgccgcgctggcgagcgatggcctgtaccgcaccgatcatcacctggcaatcgaacaggggcgggccaaggctggccgtgatccgcaggaggttgttgcctcgcacgtgcggcgcctcgaagccctgcgccgggctggcatcgtggagcgcgtggccgaagggctatggaaggtgccggacgacctggccgagcgtggccgccagtacgacgcgcaacgcctgggcggcgtggcggtggagctgaaatcgcacctgcccatcgagcgacaggcgcgcgtgatcggggccacctggctcgaccagcaactgatcggcggcggcccgggattgggcgacctgggctttggtggcgacgccaagcaagccctccagcagcgtgccgatttcctcgaagaacaggggctggcccagcggcgcggacagcgcgtgatcctcgcccggaacctgctgggaacgctacgcaatcgggaactggcgcaggcggcgaaggacattgccaccgaaaccggcctggagcaccgccccacggcagacgggcagcgcgtggccggcatctaccggcgctcggtcatgctcgccagcgggcgctacgccatgctcgacgatggcattggcttctcgctcgtaccgtggcggccggtgatcgaacaacggttggggcagcagctcgccgcaacgatgcgtggaggcgggacgtcctgggaaatcgggcggcagcgtgggcctgccgtcggttaa

SEQ ID NO: 503983 - DNA, 2007 bp, Stenotrophomonas maltophilia
atgcaagggacgaacgtgctgttcggtcagatcgccgtcgtattcggcatcgtgatcgccggcgtgtggggcgccacacaatggacagcagccgcccttggctatcaagtacgccttggctcgccctggttcgacttccttggcacgtcgatctaccacccttggaaactgtttgagtggtggttcttcttcggggcctatgcaccggaagtattcgacaccggcggcaccatcgccggcaccagcggcatggtcgccgtgggcgttgccatcgccatgtcggtctggcgctcgcgccaagctcgcctcgttaccacctacggctctgcgcgctgggctagcgcgcaggacattcgcaaggcgggcctcacgcaaccggccggcgtgttcctcggccagcacgaccgccagtacctgcggcatgaaggcccggaacacgtcctgaccttcgcgcctacgcgctcgggcaagggcgttggcctcgtggtgccgacgctgctttcctggcccgcatccgccgtcatccacgacatcaaaggcgagaactggcagatcaccgcaggctggcgctcgcgtttctcgcattgcctgctgttcaacccgaccgatgcgaagtcggcggcctacaacccgctgctggaggtgcggcgaggcgcgcatgaggtgcgcgacgttcagaacatcgcagacattttggtcgatcccgaaggtgcattggagcgccggaaccattgggagaaaaccagccacgcgctgttggtcggtgcgatcttgcatgtgctctacgccggcgaagacaagacgctgcgcggcgtcgccaacttcctctccgacccggccagcccgttcgagctgaccttgcaccggatgatgaccacgccccacctgggcgatgggccgcatcctgtcgtcgcttcggcggcgcgcgaagtgctcaacaagtcggacaacgagcgttccggcgtgttgagcaccgccatgtcgttcctcggcctgtaccgcgacccgacggtggccgaagtcacctcgcgctgcgattggcgcatcgccgacctgatcgcggtcgagcatccggtatcgctgtacctcgtggtgccgccttcggacatttcgcggacgaagccgctcattcgcctgatcctcaaccagatcggacggcgcctcaccgaatcgctcgatggctccgatggcatcgagcgccgccacaagctgctgctgatgctcgatgagttccctgcgctggggcgcctggacttcttcgagacggcgctggccttcatggcgggctacggcatccgcagcttcctcatcgcgcagtcgctcaaccagatcgacaaggcgtatgggcaaaaccactccatcctcgacaactgccatgtgcgcgtgacgttcgccacgaacgacgagcgcaccgccaaacggatctccgagacgctgggcacggccaccgagttgcgcgcccagcgcaactacgcgggccaccggcttgcgccgtggctgggccacctgatggtgtcgcgccaggaaaccgcgcgcccgctgctgacgccgggcgaagtcatgcagcttccgcctgacgaggccgtggtgatggtgtccagcgtggcgccgatcaaggccaagaagctgcgctactacgcggacgccaatttcaagcgccgcgtgctgccgccgcccgcgctggcggacgggcagtacgccgacgcgccgccggcccgcgccgacgactggagcgggctggcgattcctgccgtgcccgccgcaccggccacggcatccgccgatggcttggagaacttgggttcggccgacgacggcggcccgcgccgtcagcccgaactaactgaggccgtcgcctacgaccccgagctggccactcccgcggccgaccttgggttgctcgacgacgacgacctgccgcttccccttccgcgccagcttgatccagccatgcagcgcacggcccggctggcttccctcgaccccaacgacggaatcgagctatga

SEQ ID NO: 503984 - DNA, 465 bp, Stenotrophomonas maltophilia; identical to SEQ ID NO: 323972

SEQ ID NO: 503985 - DNA, 1053 bp, Stenotrophomonas maltophilia
atgagcgccgttccgcagtccatgagtgccacgtcgctcgaccgccgcatccagatgctgcgcacggcgatggggccgctgatcgccgccgcgctcgaagaccctgacgtggtggaggtgatgctgaatcccgatcgcaccctctgggtggatcggctttccagtggtcgggcgccgatgggcgtggaactgtccgaagcggacggtgagcgaatcatccgcctcgtggcagcccatgtcggagcggaggtgcatcgcggccaaccgctgctgtcggccgagttgccggaaacgggagaacgcttcgagggcatcttgccgcctgccgcgccggggccagccttcgcgctgcgcaagcgcgccatcggcgtcattccgctggagcggtacgtcatcgacgggatgatgaccagcgcgcaagcgggctttctcgttcgcgccgtgcgcgagcggcagaacgtcttgatcgccggcgctaccagcagcggcaagacgaccctggccaatgcgctgctggccgagattgccgccacgggcgaccgcgtgctggtgctcgaagacacggtggagctgcaatgcgcggcccgtgaccacgttcccctgcgcacgcgcgcaggcgtggtgtcgatgaccgagctggttcgctcgtccatgcgcctgcggcctgatcgcgtcgtcgttggcgaagtgcgcggcgccgaggcgctggatctcatcaaggtatggggcacgggccaccccggcggcatcgccacgatccatgccggctccgcgctcggcgcgctgctgcgcctggagcaactgattctcgaagtggcggtgaatccgccccgtgcgctgatcgccgaggcggtcaacgtggtgatccacatcgccggacgcgggcgcaagcgccgcatcgagagcatcgcccgtgtcgtcggcttcgacggcgtgggctaccaactggcggacgcgctggaaacgccgtttcccgagcttcagccacttcccgatgccgcacccgctgcggcgacttccccaccccctgactcacttggagaactgccatga

SEQ ID NO: 503986 - DNA, 384 bp, Stenotrophomonas maltophilia; identical to SEQ ID NO: 132310

SEQ ID NO: 503987 - DNA, 273 bp, Stenotrophomonas maltophilia; identical to SEQ ID NO: 351380

SEQ ID NO: 503988 - DNA, 2454 bp, Stenotrophomonas maltophilia
atgctgaatctcgccgaataccgccagcgcccggccttgctggccgactggctgccctgggccggactggtcgcgccgggcgtcgtcttgaacaaggacggcagtttccagcgcacggcccggtttcgcgggcctgacctcgacagcgcgacgcaaggcgaactgatcgccacgtcggcgcgactgaacaacgcgctgcgccgcatgggatcgggctgggcgctattcatcgaagccgagcgccatgcggccgccgactatccgcgctcggagtttcccgagccgctttcgtggctggtggaggaagaacgccgggccgcgtttgaggaatccggccatcacttcgagagcggctatcacctgacgctggtgtacctgccgccggaggaatcccgtgctcgtgcagccaagatgctctacgagaacacgccgacaaatggcgtggactggcgcgagcggctgcaagccttcgtcgcggaaacggatcgcgtctttgacctgctcgacggcgtgatgccggaaattgactggctcgatgacgcgcagacgctgacctacctgcacgcgaccatctcgacgcggcgctaccgcgtcggcgtgcccgaagtgccgttccacatcgacgcgctgctcaccgattccgcactgatcggcggcctggcgcccatgctaggcgatcagcacctgcggctggtgtcggtgcggggcttcccgacctcgacctggccggggattctggacgacctcaaccgcctcggttttgcgtaccgctggagcacgcgctttctctgcctcgacaaagccgaggcggaaaaagaactttcccgcctgcgccgccagtggttcgccaagcgcaagaacgtcatcgcgctgctgcgcgaaacgatcttccagcaggaaagcccgctggtcgataccgacgccaacaacaaggccgccgatgccgacgccgccttgcaggagttgggcagcgatcaagtcgccttcggctatctgacggcgaccgtcaccgtcatggacgaggacgccgccgtcgcagacgagaagctgcgcatggtggagcgcgtcatccagggtcggggcttcgtcaccatccctgaaacgctcaatgccgtggatgcctggctgtcctcgctccccggcaatgcttacgccaacgtgcgccagcccatcgtctcgacgctgaatctggcgcacatgatgccggtgtcggcggtatgggccgggccggagaagaacgaacacctcgacggccccccgctgatcgtgacacgcaccgacggcgccacgccgttccggctggtgacgcacatcggcgacgtgggccatacgctggtcgcggggccgaccggcatgggcaagtcggtcttgctcgccacgctggcgatgcaatttcgccgctatcgcggctcgcgcatcttcgccttcgacatgggccgctccatgcgggccgccatcctcggcctgggcggcgaacactacgacctgggcacggatggcgaaatcgccttccagccactcgcgcgcatcgaccgtgagggctaccgcacctgggccgccgaatggatcgaaggccgcttgctgcacgaaggcgtggcgatcggccccgacgagaaggcggctatctggtcggcgctgggaagtctcgccggtgcgccggtggagcagcgcacgatgacgggactttccgtgctgctgcaatcgaacacgctgcgacaagcgctgtctccctatgtgctcggtggcgcgcacggcaagctgctggacgccgaccacgaccggctgggcatggccgacgtgcagtgcttcgagatggaggagctgatgcacagcaaggccgccgtcatggccgtgctgcattacctctttgcgcgtttcgatgaacgcttcgacggggcgcccacgctgctgatcctcgatgaagcgtggctgttcctcgatgacccggtgtttgccgcgcgtatccgccagtggctcaagacactacgcaagaagaacgtcagcgtcatcttcgccacgcagagccttgccgacatcaaggattcgagcatcgcgcccgcgatcatcgagagctgcgcgagtcggatcttcttgcccaacccgcaggcgaccgagccgcagattcgcacgatctacgagggcttcggcctcaacaggcggcagatcgaaatcgtcgccaccgcgcagcccaagcgcgactactactaccaatcccgcctcggcaaccgcctgttcgacctcgacctggggccggcggcgctggcgtttgcgggcgcctccacgccgcaagaccagcgggacatagaccgcgtgctgctggacgccggcgtgcccggcttcgcgggcgcctggctgcgccatcgcggcctcgattgggcggccgacctgctgccctcgttccccggcctcgcgccgggttccctcgctgaccaacccctggagaacctgtcatga

SEQ ID NO: 503989 - DNA, 726 bp, Stenotrophomonas maltophilia; identical to SEQ ID NO: 323977

SEQ ID NO: 503990 - DNA, 321 bp, Stenotrophomonas maltophilia; identical to SEQ ID NO: 323978

SEQ ID NO: 503991 - DNA, 1374 bp, Stenotrophomonas maltophilia
atgaatgacgtgaccatcatcgaccagttcctcaacacctttgccgcttatatcgactcgggtttcgggctgctgcggggcgaagtggcgttcctcactgccacgctgatcgtcatcgacatgacgatcgccggcctgtattgggccatgagccatgccaccggccagggcgaggacgtgatcgccaagctgctgcgcaaggtgctctacgtcggtgccttcgcctacatcatcaataacttcaactggctggccagcatcgtgttccgctcgtttgcgggattgggcatcaccgccaccggctcggccatcacgatggagaacttcttgcagccgggccggctggcgaaaaccggcatcgacgctggcgcgccgattctggagcagatcggcgacatggcaggctttcccgaggtattcgtgaacctcgatcccatcgtggtgatgttccttgcctggctggtcgtggtcttgtgtttcttcgtgctggcgatccagcttttcatcacgctgatcgagttcaagttgaccacgctggcgggcttcgtgctagtgccgttcgcgctctggaacaagaccgcgttcctggccgagaaggtgctgggcaacgtcgtgtccgccggcatcaaggtgctggtgctggccgtgatcgtgggtatcggctcgggcctgttcgcggagtttcaggtgcatcccgccgagccgtcgatcgaccacgcgctggtcatcatgctggcctcgctcaccttgctggcgctgggcatcttcggccccggcatcgccaccggcctcgtttccggtgcgccgcagcttggcgcgggcgcgatggcgggtgctgctgtcgccgcaaccgggatagccgttgccgttggcgctgccgcgactggcgtgggtggcgcggtcatggccggagcgcgcatggcgccagccgctgccaagctcgctggcagcggcgcacgtgcggtcgcatcgacggccagcagcgcacgatcggcgttccaggtgggttccgctgccgcaggcggtggcgcaaagggcgctgccgctgggttgggcaacgtcgccaagactggcgcgcaggccgccgggcgtggtgctgcatcccgtgcttccgctgccgggcaacgcatggcggctcccttccgcgctggctggaacggcccggaggctggcagcggcgtgggtacggcatccgcaggcgaggccgcttccagcgccgccaacgctcagaaacaagaacagcccgcctgggccaagcgcctgcatcgccgccagcaactcacccatgccgcgaccaccaccgcccacacgctgcgcggtggcgatggcggcggctccggccaggggccgagtctgcgcggctccgacgattaa

SEQ ID NO: 503992 - DNA, 1287 bp, Stenotrophomonas maltophilia
atgagccaggacgacactcccgaccgcgccgcgccacaggcgggcaaggtcgcgcccgaggcggtggcgctgcgcgcccagccgcgcccggtcacgcgcctgaaccggcgcacgctggccatcctcgtcggcggcctgtcggtcgccgtgctcggggccacgatctggtcgctacaaccgcagcggcgtggtgccaatgagcagaccgagctttacaacgtcgatcgcgtgtcgaagtccgaagggctggatgcgctgccggcggactactcgaagctgccgccggccttgcctcccgatgtgcccgaactggggccgccactgccgggtgacctggggccggccatcgtgaactcgcagcggccggcggtggccgcttatgcggcccctggctatgacccagccgatgccttgcgcaaggagaaagaagccgctgcggcttcgtcggtgttcttccgctcgggcaatcaaggccaagccgccgccacggtggcgcaggcagcgccgggtgcgcctggcaccgcaagcaccctggcggccttcgacccgctggcggccgggccagcctcgacggcggcccagctcgccgattcgaccgctgcgcaaaaccggcaagaccagaaagaggcgttcctgaaagccggttctacggaaacccgcaattccggcaacctgacgttgccggcgtcgccgtatcaggtcatggctggaacggtgatcgccggcgcgctggtgacgggcatcaagtccgatcttccgggcgacgtgatcgccacggtgacggagccggtctatgacacggccacgggcaagttcctgctgatcccgcagggatcgcgcatccttgggcgctacaacagccaggtcagttatgggcaaagccgcgtgcaggtggtgtggaaccgcgtcatcctgcccgacgcgtcctcgctgacgctcgacaaccttgtcggcaccgacccggccggctacgccggcctggaggacgacgtggactggcattggaatcgcatcgtcgcgggggcggtgctgacgacgctgctgggcgtgggcgccgaactggccgcgccggagaaccgccaggacggcaaccgcatcgtcatcgccgggcgcgacagcgcccaggacagcgtcaatcaggtcggtcaggagatcactcggcgcaacatgaacatccagccgacgctgaccagtcggccgggcctgccggttcgcatcatcgtcaaccgggatctggtgctgcggccgtaccagccgctgttcttcaaccggggagcctcgcaatga

SEQ ID NO: 503993 - DNA, 246 bp, Stenotrophomonas maltophilia; identical to SEQ ID NO: 498316

SEQ ID NO: 503994 - DNA, 435 bp, Stenotrophomonas maltophilia
gtggccatcgacgatcactcccgggtcgccttcagcagcgtccaccccaatgaacaggccgaaaccgcctgccaggcgctgctgggcgctctgcagtactacgccagcctgggaatcaccttcaagcggatcctgaccgacaacggtgcctgctatcgctccaccgcctttgccaagctgctcaaatcccttgggatcaagcacatcagaaccaagccctacacgccgcggaccaatggcaaagccgagcgcttcatccaaaccagcctgcgcgaatgggcctacgcccgcgaatacgcctcctcggaccagcgcaattccgtgctgacccaatggctgcaccactacaactggcaccgccctcacatggggatcggtggccagccacctatttccagagtcctgctgaacaacgtggtgggtttacacaactaa

SEQ ID NO: 503995 - DNA, 558 bp, Stenotrophomonas maltophilia
atgaccgacaccatcaacgagtttttcggcaagcgcggcgtgcgcttcatctcgtggctggcggtggtgctgatcggctacggcttcctgttcgccttcgcggccatttcgctggcgccggccagctggtgggtcacgtcgatggatggccacggtgtgcccgactaccaggccgcgttcgcagccgtgttcggccagggcatgtggaccatcgccggttcgctggtggccttcctgctcggccagctgatcgacgtggcggtgttccaccgcatccgccaggccaccggcgaacgccacgtgtggctgcgtgcgaccggatcgactgcgatctcgcaggtggtggacagcttcgtggtgatctggatcgccttcgtgctgggcccgcagcactggccgacctcgctgttccttgcggtcgccagcgtcaactacgtgtacaagatgggctttgcgattgccctgattccgttgctgtacctgatgcggcgtgccatcacccgctatctgggcgccgatcgcgcggcggcactgcgcgccgccgctgcggctgactga

SEQ ID NO: 503996 - DNA, 435 bp, Stenotrophomonas maltophilia
gtggccatcgacgatcactcccgggtcgccttcagcagcgtccaccccaacgaacaggccggaaccgcctgccaggcgctgctgggcgctctgcagtactacgccagcctgggaatcaccttcaagcggatcctgaccgacaacggtgcctgctatcgctccaccgcctttgccaagctgctcaaatcccttgggatcaagcacatcagaaccaagccctacacgccgcggaccaatggcaaagccgagcgcttcatccaaaccagcctgcgcgaatgggcctacgcccgcgaatacgcctcctcggaccagcgcaattccgtgctgacccaatggctgcaccactacaactggcaccgccctcacatggggatcggtggccagccacctatttccagagtcctgctgaacaacgtggtgggtttacacaactaa

SEQ ID NO: 503997 - DNA, 753 bp, Stenotrophomonas maltophilia
atggacaatggcggtggcggcggtgcaattccgaccgaaacggcgaaggaacagccgaccgatgacaaggagaaggactgtaatggccgcaagggcaatcctgtcgtgctctacagcggcaacaaggtcgagccggaactcgatttcgccagccagggcgaaatgggcctgttcctgcagcgcaactacaatcattactggagcgcgaccggtctgttcggcaatcactggctgagcaacttcgactattcgctcgcgttcaccgatgcaaaccagctggcgtgggtacaacggcccgacggtcgccgcatcaagtatctcaaggatccagccagcggccgctggtacgaggacaaggcccagcccatcgcgtatctcgccgcgaacggagacggcacgttcacgcttcgaaacgaaaacaacgggacggaaatctacaacgccgagggctacatcacccggctcagcaatgagcaaggtgtgagctggacgttctcctataccgatcgctacctgcagaaggtcatccactcctcgggacgcagtatcagctttggctggaccaatggacaggtctcccaggtgaccgacccggccggcaacatctaccgctacacctatacccccaacgtgttcgggaatgggcgtggtcggctcgccagcacgacattgccaggcgctcctgcaacgacgatcagctaccactacgaagacggccgcttcccgggtgccctgaccggcaagtccttttga

SEQ ID NO: 503998 - DNA, 1029 bp, Stenotrophomonas maltophilia; identical to SEQ ID NO: 497190

SEQ ID NO: 503999 - DNA, 741 bp, Stenotrophomonas maltophilia
atgtgtatacccatcccgaacggctgcaggcagacgacatttagcgtcgactgggtagtcgtcgactgggtagagtcgactgtcagtcgactgctcttcgttcagcccccccgaaaaccccgcgctgcgcgcgatagtcgactgacagtcgactctacccggtcggctccattcagaccggcccgggcgaccactgccacccgggccaggccaggtctcagcgcagcgcgaccttcgggaagtccaccggcacgtcaaacgctgcgttgtagagtcaactgtcagtcgactgctcctcgttcagacccccgaaaaccccgcgctgcgcgcgatagtcgactgacagtcgactctacccggtcggctccattcagaccggcccgggcgcccgctgccacccgggccgggccaggtctcagcgcagcgcgaccttcgggaagtccaccggcacgtcaaacgctgcgttgtagagtcgactgtcagtcgactgatcttcgttcagacccccgaaaaccccgcgctgcgcgcgatagccgactgacagtcgaccctacccggtcggctccattcagaccggcccgggcgaccactgccatccgggccaggccagatctcagcgcagcgccaccttcgggaagtccaccggcacgtcgaacgctgcgttgtagagtcgactgtcagtcgactgctctcttcgttcaaacccccgaagaccccgcgctgcgcgcgatagtcgactga

SEQ ID NO: 504000 - DNA, 2397 bp, Stenotrophomonas maltophilia
atgtcgcacccgctcccgtccgctgttcatccggccgcgccgatgcgccgcaatcatccgatggcgtgggccatcgcggtcgccctgggcagcatggtggccccggccagccaggcgcagcaggcgttcagcccgggctggttcgccgagcggggcgcggcccagggcagcgcggcacagagtggccggatgcccaacggggtgccgatccagttccagttgcctgcccagcagcaggatgcagcacggcagaagctgcagcagtcgatcgacaacctcggtacggcggcgcaggcgattgccctgcagcagcgcctgcaggaacaggcgcggcaggcgcgccgcgaggctggcttcatcgttgcggatggcctgggcaaggatggcctgagcgtcgaccagaacccgctgacccgcggctggctcaatgcgcgcgacgcgatccagtcgcagggcagcgacgggcgggtgcaggttacggtcgagcagaccgcggacaaggcgatcctgaactgggagaccttcaatatcggcggcaacaccacgctgaacttcctgcagaaccctgactgggcagtcctgaaccgcgtcaatgatccgcaggcgcggcccagccagatcctgggccagctgaaggccaatggcacggtgttcgtggccaaccgcaacggggtggtgttcggcaacaacagccaggtcaatgtacgcaatctgctggcggctgcagcacggatcagcgatgcgcagttccgtgacaacggcctgtacagccccgacgccagcagcagcgcgctcagcgatgcatttggcaaggtgatggtggagcagggtgcccgcatcgcgacccatgagccgaccagcgcgacgcgcggcggtggctacgtgctgctggccgggcacagcgtggagaatgctggccatatcgaggcgcgcaagggccaggtgcagctcgctgccggtgacagtttcgtgatccggcgcggcgtgggtacggcgaccaataccagctccaccacccgcggcaatgaaatcgcgccgcgctttgtcgctggcagcacggcgggcagcgtgcgcaacaccggtctgctacgcgcccgcgagggtgacgtgaccctggccgggcgcaacgtcgagcaggccggtgtggccgtggccagcaccacgctggcgcagcgcggcaccgtgcatcttctggcttcgaccagtgatgccggcagcagcgtcacgcttgccgatggagccaccacggcggtgctggtcgaggacgatggcaaggccacggtgctggatacgcagcgcaacagcctcatcaaggagtcggcagagcaggacgcgatccgcgccggcgcgcgctcggcaaccttcgacaatctgtcccagcacaatgatcgccgggaccagtcgcgggtggagatcgtctcgggtggcaacatccatttcagtgcggattcgctgacggttgccacgggcggccagatcatcgccgacgcggcagcccgcagctacgtagacgacgcggcacgcgtggatgtttccggcgcagtgggcgtacaggtgtcgatggaaagcaacaatgtccaggtcaaggtgcagggcaacgaactgcgcgatgccctggacaaccgcgacagcggcaagctgaccagcagcgaggtctgggtcgaccgccgcaggctggtccacgttccggccggtaccgggggctacgcgggtgagcgctggtacgcggcgggtggcctgctggaagtgggcggctaccttgacaatcaggggcactcgatcggcgaatgggccgcgcagggaggcaccgtcctgctgggcggcagggaagtgatcacgcatggcggctcacgcatcaaccttgccggtggcagcctggatgtgcagagcggcgtgatccggcagagctgggtgcgcggcgtcgatggccaggtctaccgccttgatgacgcgccggcggagatgctcttcgatggcctgtacagcggccatgaagtaaagcaggagcgctggggcatcaccgagaccttccgtgatccgattgtattcgcggcgcagcgtgtcgataacggatacacggtcggccgcgatgcaggacgcctgatcatctccgcaccgaccgcggtgctggatggaaaggttgagacggctaccttccagggcgcgcagcagaaccgcaggccggataccgcgctgagggttatgcgcaggcgcagacggcggtcgcgcgcaatgcgcagctgtacctggggcgctacgacggccagggccgcagcggtgtgttcgactcggatgtgcgcctggatgacaaggctcggacgaaggccgcgtggtcgctgctggccccggtcaacgaagagcggcgtggcaccgtgtggctggatatcgcagagctga

SEQ ID NO: 504001 - DNA, 351 bp, Stenotrophomonas maltophilia
atgctgaacccacttaaaggggaaagcgtccataggtccgaaagtggcgatttcgtgttgccgaagcgtcaagtctcggcacaggcaattgagctcctgcgctttctgcgcgccccagccacatcagatacaacgttcgcgttcactgagcgacgcggtatcaaaatgaatcgcgcttcacttagcacgttcttgtacgcctatcgaaccaagtacggctttttggacttgcaagcagacggacggtacgtgctatcggaacgtggtcgcaattacatcgacgcaccggcgcgtcgcgatatcaaatttgaaccctctgacgcgggtgcaaccgcgtcagaggaggagtaa

SEQ ID NO: 504002 - DNA, 126 bp, Stenotrophomonas maltophilia
atggactgcattgcagccaagcccaagagcgtgcgcgtgcgtgcttacaccaggattcgcttcggcagcctggagcatgtttgccagcactggcgctcttacccgcatcagctgagcctgttctga

SEQ ID NO: 504003 - DNA, 576 bp, Stenotrophomonas maltophilia
atgctcgcgattaaagaaatggagatgtccgtgaaagcatgtcttttgggaatttcgttgattctggcagccggtagcgcagcgtccgctcctgccagccagtccgatctgtctggtgtggcaaacgcagcagttcagatgaacccgacgctggctgtgccgcctggcgttaccttgagcgaggtcgtccgtatctacagacctaaccttggctcacacgtgagcgtgaactgggactacggtctctacttgcgggatgggtggcacattgagggaactttgggattcatctccttgactccctttgagaacagcttgccgatccgcgaatgtgtctcgcatactccctgggacaccttcagtagcaccgacgtgaactgtgaggggcagccgatgctcccatactcgcatctgcggggctacatctcgcaagcccagttgccaggtactgttcccctgtaccgctgccgccatctctgggaggggaagtcgcggcattttgatacccttcgcgcggattgcgacggggcgcctggcgctatccttgacggtcctttgggttacgtcttcatgtga

SEQ ID NO: 504004 - DNA, 432 bp, Stenotrophomonas maltophilia
atgcgggaggcgcccgacgggcatggcgagagcattcgctacttgcacggcacctactacgatcaagctatctacgaagctcgccaagacctcctgccgactgcggagtcggttattgagcgcatccacacgcttccagcttcgttggggcccgatctggccgcgctcatcgcagcgtgcagaaccctcaaggcactggcagagagagtcgacgtgaacgccctccgcacgactactaccactgctggcaagagcactagctatgtagatgtgagcagggtgctcgtcgactggctcaacctgcaggaccaggcgatctggatacttcgcttcagtgcccagttctctgatgagtttcactcgtttgtgggagttcccaagcgtgactacgcccacaacttggaggagttctccagctacacgattcactag

SEQ ID NO: 504005 - DNA, 129 bp, Stenotrophomonas maltophilia
atgacctatatacatccgaacgaccgggtctacaccctgaagcgcgccctggctgctgccatcgttcgcagcgagggatgcaagtccgacatggccctgatcgaaagccaggcggtgggcaatggctga

SEQ ID NO: 504006 - DNA, 228 bp, Stenotrophomonas maltophilia
atgaacaccttctacgctggccacttcaacgtggacatcgaaatcaccggtgacggtcccttcgtagcaagagggacgctgcgtcctctgtggtctcaggagccgcttagaagcgtccttgggcaaggcgcgacggaagcagaggcggtggctgccgcccgcgagctggcgaacgctgctgcaaccgagatgtcgctgatggagcgctaccggcgctatattgattga

SEQ ID NO: 504007 - DNA, 402 bp, Stenotrophomonas maltophilia
atggagctgctcaggccgattcgggcatggcgcatggacgttggggtactggcccaggccatcgagctcgacgacttcaagatgatgatgtccatcaccaatggacagtatggaaaagcgttggaaatgcccgctggtgtctcgcagttccgcgccgatgtatatcaacttggagtcattggagaggcgctcgcccaagcttgtttcctgattggtgagatcgccgacgactggcacagcatctccgcttttgttgacgggaagccttttgagggggaggaccctcagaagatgctgaaggacgcgctgtttcgatctacccaagcggagaagctcttgggtacgtgtgagcgcgccatcgtgaagcgcttgaactcttcccgatggttgtttaaaagctag

SEQ ID NO: 504008 - DNA, 504 bp, Stenotrophomonas maltophilia
atggctgaccagcagtttaccgctgcaatggtccaccgcgaggtcggccggcagctggccagcatgtcgggggtcgaactcgactcgatcatctcccaggatgctcgcctgtgggacgcccgcgggcaggcgcttcaggcgcttgctacgggcgatatggagactgcgctgcgaatcatgggcatggtgtcgtcgcggatcatggaccgagacgaagcatgggagatcgcgtcgaacgcggtagctgtccgcattgccgccggctggacgcgcgacatgctggacagcagcaccgtgggcggccgcgcgccgtgtggtcgcggctactacctgttctgctccggggccatcgcggtctgctacttcccgatggtctgcatcaccgacatgaacggccggggctaccacttccatatagcccatgacctgctcaacgagcgagatcccagcccctacgccatccgtcgtccgaccgtgccgcagcaactggagatgttccgatga

SEQ ID NO: 504009 - DNA, 324 bp, Stenotrophomonas maltophilia
atgatcggccaggacgcagcacgcgtgcctgacgctgatgaggatgagtacgaccgccggcgtttgcccggtgcctactcccaaacgatccatcacatccgggagttgcgcaaagagcgggatgcgctgctactgcgtggccacgccggggacagattcagggccgcccagctctcatggttcatcacgaacaacgagaactacgcagcgcgacttgtggtgcaaatggagcgactcgggcatggcagatcccgagcgaccgttgaacacgcgaccgcagccccgccgccgacgctgccggctcaactgaacctattcgcatga

SEQ ID NO: 504010 - DNA, 336 bp, Stenotrophomonas maltophilia
atgggagctgctgaaaagctggacatcgtcggaaaggactggctgaccgtggacgaggccgcgcactactgcggggtttcacgaagccagttcgattcgaacatcgccgactacggcatcgaaccacgaaacttcatgggcaagaagctctacgagaaggctgccctctactctgcaatctacggctccaagcaatggtcaaggtcacaatcttctagcgcgatggcgccgcgtacctcaactggcgggaaggcggcaagcgaagccgtgtcgccattggtcgcgtcagcccacgcgaagctgagggcgtacgagcagcgaaagaagcggagctga

SEQ ID NO: 504011 - DNA, 1047 bp, Stenotrophomonas maltophilia
atgcaccggcggctgcgggttgctgcgggctgcgctgttgccgcggccggccagggcatcaccatcgatgccggcgaaggcgtggttctccggccgctgcagtgcgagctgctgttcggcatcgaggccacgcacgggatcgatcacgccacgcgcctgtggaaacagtgcaaggtcgggttgccccgtatcggccgggttgcgcagggcaaggaacagctttccctgctgcgcacccagcagcagccggttggcatcggccaccggcactgccagcaccgcactgcgtgccggctgggtggcctcgttgcccgagccatgattgctgccattgccggtgatgtcggcggcgcggggatcgttgcgggtatcgccttcgttgccggcgacggcatcgccggtgaccggagcgatgtcctgttgaccgtagctgagcacgcgcagccgcgacagcagcaggcgggtctgcgcggcctctgccggaccgctggcgttgggctgggcattgcgcaggttgaggaagacatcgacgaaatcacccggcaggatgcggtttccggcgccgaccagttcgtccaccgggacggccagcgcgcgttcgccggggcgcagctgcagcgagaatccctgtgccagggcgccgctgctgatggcggtgccctcggcgatgtcctgcaccggcaccttgccgaccacggccgagatgctggtggcagcaccggctaccgccgtggtccgctgcgcaaggcgcactccattggcagagatcggttcaccggccggcagtcgtgccaccgcctctaccacggtgatcgcctgggcttcgctctgcgcaaccggggcaaccgtggccggcgcggcctgcttgcgcccgatcatcaaggcgatcaccgccagcagcacggccagcccgatcagggcgacggcagcgatgcgggtcaacttgagcatggaaccgtctcctgtgccgatggtcagttgccgctgccgaggtcgagctgggcgaccgcgacactacggatgggggcctgcatcacccacttgtaa

SEQ ID NO: 504012 - DNA, 435 bp, Stenotrophomonas maltophilia
gtggccatcgacgatcactcccgggtcgccttcagcagcgtccaccccaacgaacaggccgaaaccgcctgccaggcgctgctgggcgctctgcagtactacgccagcctgggaatcaccttcaagcggatcctgaccgacaacggtgcctgctatcgctccaccgcctttgccaagctgctcaaatcccttgggatcaagcacatcagaaccaagccctacacgccgcggaccaatggcaaagccgagcgcttcatccaaaccagcctgcgcgaatgggcctacgcccgcgaatacgcctcctcggaccagcgcaattccgtgctgacccaatggctgcaccactacaactggcaccgccctcacatggggatcggtggccagccacctatttccagagtcctgctgaacaacgtggtgggtttacacaactaa

SEQ ID NO: 504013 - DNA, 168 bp, Stenotrophomonas maltophilia; identical to SEQ ID NO: 497964

SEQ ID NO: 504014 - DNA, 435 bp, Stenotrophomonas maltophilia; identical to SEQ ID NO: 503996

SEQ ID NO: 504015 - DNA, 159 bp, Stenotrophomonas maltophilia; identical to SEQ ID NO: 497492

SEQ ID NO: 504016 - DNA, 435 bp, Stenotrophomonas maltophilia; identical to SEQ ID NO: 503994

SEQ ID NO: 504017 - DNA, 1149 bp, Stenotrophomonas maltophilia
gtggaagcggctgcgtacgttgactcgaaaatacagtccgactggagtggagtagaaaacaacactgacgcaattgatttcctgcgcaagaaccagaacaagtacgactggggtaccgcgttcgacagcagcgatcgggacaacttctctaagttcagcgaagagcttgggcgcgaaaccggctatttcaaagacgtctacactgccatctcgggaactgcttacgccgccggatcaaccaaggactggcgctttgagttccaggagccactgcgctactacggcgacgcctcgcgctcccagaagggcgttgccatggtccgggctggcgcagctgctcttggcatcggtgcggcggcggccgttgaattcggtggctggtgcatcttcaatccgtacagttgcaccaaggccatcagcggagcagccgatgcggtgatgggtgactacgtgggtggtcattcgcttgcacctgtgctgccggccctggtggtggcaaaggctgctaccactgcggaagacacgcttcgattgtcgagcagcgcggcaggtgctgagatcgcagggaatgctgcaaagaagggggggctgcaatccgagcagatcctgaagtctgtgcagaactcatcgacagaaacggcaggccaggctgcaaatggggctctgactgctgggcgtgagctgacacctttgttcaaagatgttgaaacaggtctaaactcgataaatcctgtccgctccaataatcgaggtggaattttggagcttggtttggatccggataaggggaaaattgcagtgcatgaaggtcaggcggccgtccagttagagaattccctgggagggactctgaagaggacagacccggtgcagggcagtaaaaatcccgacttcgtatttgtcagtgggccctatgcggggaagaccgtggatttcatgtggacagacggtacaaagtctactcaaataaataaattcttctccaataattctgcgcagaatcagcggcagctgatagatcatgtaaacaaggcggatatggttcctctggattacaggaatcttgctcctgaaaatcaggctttggtaaactcttggataaaaatgctcactccggagcagcagggtaaaattattattttgaggtaa

SEQ ID NO: 504018 - DNA, 138 bp, Stenotrophomonas maltophilia
atgccggccagcggccggcactacctggcatcagccctgtgcttcggctacggcgcggaagacctgctgcatctgcagcggctggaacaggcggtgggcgccctgccacgcttcccctgggaaactgccgaacggtag

SEQ ID NO: 504019 - DNA, 138 bp, Stenotrophomonas maltophilia
atgccggccagcggccggcactacctggcatcagccctgcgcttcggccgctgcgcggaagaccagctgcatctgctgcggctggaacaggcggtggacgccctgccacgcttcccctgggaaactgccgaacggtag

SEQ ID NO: 504020 - DNA, 159 bp, Stenotrophomonas maltophilia; identical to SEQ ID NO: 497492

SEQ ID NO: 504021 - DNA, 1893 bp, Stenotrophomonas maltophilia; identical to SEQ ID NO: 497491

SEQ ID NO: 504022 - DNA, 1050 bp, Stenotrophomonas maltophilia
atggaattcgactatctcgtcttcatcgggcgattcgagcccttccacaacggccacgccgccgttgcccgcctggccctgagccgggcccgcaagctgatcttcctggtcggctctgccgataccccccgcagcctgcgcaatccctggaccgtggccgaacgtgccgtgatgatccaggccgccctcgatggccacaccgaccgcctgctgatccgcccgctgcgtgaccacctgtacaacgaagcgcagtggatcgccaacgtgcagcgccaggtggctgaagccctgcgcaacgacggcgccgccgccgatgcgaaggtaggcctgatcggcatggacaaggacgcgtccagctactacctgcgcgagttcccgcagtggccgctggtggacgtgcagcacaccgccaccctgtcggccaccgagctgcggcgctacctgttcgaagccggcgacgtcgacttccacggcgcgctgctgatgctgcgtggcaatgtgccggcgccggtgtacgacatgcttgaagcgttccgcaaaagcgcgcctgcctatggccagctggtggccgagtaccgcttcatcgaacagtacaaggccgcctggaaggatgcgccctacgcgcccaccttcgtcaccaccgatgcggtggtggtgcattcaggccacgtgctgctggtgcgtcgccgctcggaacccggcaaggggctgtgggcgctgcccggcggcttcgtcggccaggaacagagcctgctcgacagctgcctgcgcgaactgcgcgaggaaacccggctgaagattccgctgccggtgctgaaggggtcgctgaagggccagcaagtcttcgaccaccccgaccgcagccagcgcggccgcaccatcacccacggtttccacttcgaattcccggccggtgacctgccgccggtgcgcggcggcgacgacgccgacaaggcgcgctggataccggtgagtgaagccctggacatgggcccgcagctgttcgaagaccacctgcacatcctggagtatttcctcggccgcggctga

SEQ ID NO: 504023 - DNA, 1410 bp, Stenotrophomonas maltophilia
atgcactacctcgataatcttctcctcaacaccgacagctacaaggccagccattggctgcagtatccgccgggtaccgatgccacgttcttctacgtcgaatcacgtggcggcctgcacgatcgcacggtgttcttcggcctgcaggcgatcctcaaggacgcgctggcacgaccggtcacccacgccgacatcgacgacgctgctgcggtattcgccgcgcacggcgaaccgttcaacgaggccggctggcgcgatatcgtcgaccggcttggcggccacctgccggtgcgcatccgcgccgttcccgagggcagcgtggtgcccacccaccaggcactgatgaccatcgagtcgaccgatccggctgcgttctgggtgccgtcgtatctggaaacgctgctgctgcgcgtgtggtatccggtcaccgtggccaccatcagctggcacgcacggcagaccatcgccgcgttcctgcagcagaccagcgacgacccgcaggggcagctgccgttcaagctgcacgacttcggcgcgcgcggtgtatcgagcctggaatcggccgcgttgggcggtgccgcgcacctggtcaacttcctcggcaccgataccgtgtcggcgctgtgcctggcacgcgcgcactaccacgcgccgatggccggctattcgattccggccgccgagcacagcaccatcaccagttggggccgcgaacgcgaggtggacgcctatcgcaacatgctgcgccagttcggcaagcccggttcgatcgtggcggtggtgtcggacagctatgacatctaccgcgcgatcagcgaacactggggcaccaccctgcgcgatgacgtgatcgcgtcgggcgccaccctggtcatccgtcccgactcgggtgacccggtggaggtggtggccgaaagcctgcgccggctggatgaagccttcggccacgcgatcaacggcaagggctatcgcgtgctcaaccacgtgcgggtgatccagggcgatggcatcaatccggacaccatccgcgcgatcctgcagcgcatcaccgacgacggctacgccgccgacaacgtggccttcggcatgggcggtgcgctgctgcagcggctggaccgcgatacgcagaagttcgcactgaagtgctcggcggcgagggtcgagggtgagtggatcgacgtctacaaggatccggtcaccgacgccggcaaggccagcaagcgcggccgcatgcgcctgctgcgccgcctggacgatggcagcctgcatacggtgccactgccggccaacggcgacgacaccctgccggacggcttcgaggacgcaatggtgaccgtgtgggagaacggccgcctgctgcacgaccagcggctggacgacatccgcacgcgggcggccgtggggcattga

SEQ ID NO: 504024 - DNA, 354 bp, Stenotrophomonas maltophilia
gtgaagcactaccagcgcaccgccgacagcatccccgagggctggcaaaaaaagaccgggcgcgtgtggggaaaagtcggccactggccggtgcaggaaaaggtccgtctcaaccttcaggatcagcacggcgacggtgggtggttcgcctacaggcgtctcgtccgcagctggcggttggccgatgccaggtcagcaggggatgcgtaccgcatccggtcagcgcgggccatgctgcaatgcccggatcaggtccgcgcccgcctgatcgggttctcggagtggatgccctacgaagtccagatggctctcatcggcaacgtcgcggcacggggattcgaagtcaccagctga

SEQ ID NO: 504025 - DNA, 801 bp, Stenotrophomonas maltophilia
atgaagaacaaccacccccgcgcccttcgcggcgatgtgcagggatggagcaccggagccacgcgccgcaacactcagttcctgatgtccgtgaaggagcaggagctgaccggggccggcttcgccgtaaccctcacccttcgggattgcccgcccaccggtgacgactggcatcgcatccgtcgtgcgtggtcgaagcgcgtccagcggcacggtatggttcggctccactgggtcaccgagtggcagcgccgaggcgtcccacacctgcactgcgccatctggttcccggaagggtgccctctcgatgttgcacgttggtgggcgattgatagctggctggctgtcgcctccgaatacggggctggccctcggggccagtccatccacgccatcaccggtcccgtcggctggttccagtacctcagcaaacacgcggcccgcggcgtggcccactatcagcggtctgctgagaacgtcccggagggctggaagtccaggacggggcgtgtctggggaaaatggggcgactggccgactcaggcgcaggtccgcatcaacctggaggaccagcacggtgacggcggctggttcgcctatcggcggctatgccgttcctggcgtcgggccgatgcacggtcatcaggggatgcgtaccgcatcaggtcagcgcgggccatgctgcggtgctccgatcagggccgcgcccgcgtgatcggcgtcatggagtggatcccctacgaagtgcagatggccatgctcggcaacctgggcagccgaggcttcaacatcacctgttga

SEQ ID NO: 504026 - DNA, 123 bp, Stenotrophomonas maltophilia
atgctgcggtgctccgatcagggccgcgcccgcgtgatcggcgtcatggagtggatcccctacgaagtgcagatggccatgctcggcaacctgggcagccgaggcttcaacatcacctgttga

SEQ ID NO: 504027 - DNA, 123 bp, Stenotrophomonas maltophilia; identical to SEQ ID NO: 504026

SEQ ID NO: 504028 - DNA, 144 bp, Stenotrophomonas maltophilia
atgtgtatacccatcccgagcggctgcaggcagacgacatttagcatcgactgggtagtcgtcgactgggtagagtcgactgtcagtcgactgctcttcgttcagccccccgaaaaccccgcgctgcgcgcgatagtcgactga

SEQ ID NO: 504029 - DNA, 849 bp, Stenotrophomonas maltophilia
atgcgtggcctggacctgaccgtgggcatcgccaccaagctcaaccgtgggcacctggttcatggccgcgatgcgctgatcctgccggtggtggcgcgctcggagcgcatcgtcacgccggccggcgagcagttcgtcaccatcgaagacgcgatgtccaatgtgaccgcctcgcgcggcgtgctcgaaccggtcagcgccgatgtgttgcccgaggtcgagattgtctgccgcatggcgatggccgcgctgccgcacagcaaggtcgactgggcaggctgcatgcacgactacgcactcatccgtgagctgatcgctgcggtgtacccggagatctacaccggtttcaacgagcgcatccagcagccgcatggttttcatctggacatcccgccgcgccgccgcgtctggcccacgccaaacggcaaggccaacatcctggtgatgcccggcctggatgtggacgatcccgtgcacgacccagacatgctgcgcttggccaccgtgcgctcgcatgaccagtacaacaccaccatctacagctacaacgaccgctatcgcggcgtgtacaacgatcgcatggtgctgttcatgaacatcgaggaccggctggcgcgcgggttggacaaggaagcgcgggtcagcctggagacgatcagcgctgatggcgtgcagcggcgcgtcgagggcctgaccgtgctggactacccgatgccgcgcggcgcgctggccggctactaccccgaactgaacccgttgttgccgctggaccactacgaccgcatcagcggcacgccggcggccaagtcgatcccggtgcggatgcgggcgatggcggcggtcgcctag

SEQ ID NO: 504030 - DNA, 300 bp, Stenotrophomonas maltophilia
atgacaggtttccgctaccttcccgccgccctcatcatgaccgccggcctgctgctgggcgcgtgctccagaagccaggaagccggcaaggccactgccaccgatgaagtgaccgaggtaaagctcatcccggcctatgcggcactggacaaggacaaagacggcgtcgtcaccctggccgaggtggatgcggtggcgccggactgggccgggcgcctgcacgcctgcgataccgaccgcgaccagaagctgagccgcggcgagtacgacgtgtgcaagcagaccagcacctcgcactga

SEQ ID NO: 504031 - DNA, 495 bp, Stenotrophomonas maltophilia
atgtccctgaagaccactgtgctggcagcggcgaccgccctgctgatcaccccggccgttgccctggcagcgcccgaaaccaagtcgatcaccgtcaacgtcaccgccgacgtgccgaacgcgtccggcctgcaggtgtccacaccggacggctgggaaggcctgccgcagaacctgccgtgggacaccgcccgccaggagctgattgagctgaccggccgcgtcatcaacgtgaagtcaccggcggccatcagtgcctatctcaccgcgccggcgcagatgtcatcggcggcagacgtggtggacctggtcgtcaaactggacaacaaggtcgtgccggccaccgcggcagccaagatcgaggtggccactgaatcgcaggcggcggccggcaagtcgctggcgtttgccatcgccccgactgcgccggccggtggctacaagcagggccgctacggcggccagttccacatgatcttcgagagcgacatctga

SEQ ID NO: 504032 - DNA, 1272 bp, Stenotrophomonas maltophilia
atgcgaatgaatcgcagcacctggcgctacacgctcatgtccgccatcttcattggattttccgcggcaataccatgcgcctggtcgctggagctggatatcatggcggagttccgcccgaacgcactcaatccttcgcacaaccgcttcgtgaacacaacgccggaatcaggcctctgtgtcatctgggcgagctactacaactgcaaggcccacggtgtcttctcgctggcgctgccaatcgatgtcagctttcttgatgtgcctgcagatggtgatgccaggcaatcgttccatctgaaaattccatcaaggaagagaacgctgaaggtctccaatggctcgcatgaatccgaggttgccattcgcattggaatcctggcgggtgatgccgtcctccccgcggatgtaaggcagttggtcggcgcggatccttccagtggtgcctatgatgcacactatgcgttatgggatggcagctggggcctgttcttgccgcccgcaccctgccggggtcgcggcggccccatcacgggtactgcgttcagcgcgctgttcgtatgggagttcgctgacgatggcagctgtgtaaagcgtgcgcgccacgccatccccgggaaactgagcatttcccgcgggctcagcttctcctatgagctggttacgccagatccactgttgatgcagaatggtatatacaggggacgcttggacctggatatagggcctggtggagactttgacttcggtgacaacgcggtggtgtccgacaggcttctttccctgaacttcacgctgcatgtcgcccatgatttccaggtcaactttgctggtgagcagcctggcgtgcagttggtgccggagggaggctggtcgcaatggagtgggcacggtcgcgccccccgatggttgcgccaggagcttccgttccacctcaccacatcgatggatttcagcatgaagctgcgctgtgagttcgaggctggcgggcgatgcggtatccgcaacgccggcgctgatgttgcggtgccggtggacctggatgtcaccattccgggcatgagcaacgtgcgcgatggacggcctgcgcagaacgcagcgctgctgccggatgatgcgcgggcgccacgtttcacgccggatggctatctggtgcagcggcgttcgacgctgcgctttactgctgggcgtgacgcggtgacggagatgctgaagtcacccggttcgcattggcagggcaacatgacggtggtgtttgatgccaatccgtga

SEQ ID NO: 504033 - DNA, 306 bp, Stenotrophomonas maltophilia
atgaatcgcaaactttcctcgccgatgcctgaccctactccccgctcgaacggtggagaggtgcccgtctggtacgcccttatcagtctggcgctctgcgctaccgtcgcatcgatctccagcaccctgctgtacattgcgggtcgcacgcttgttgcagtggcaggtgcagccccgatcgcaagctggggacgcccgggatacgggctgctgatcgtcatgggattccttgcgttggcgtcctggtacttcaaggcgagcgtgaaggccgcacagaaggttctgccggcccgcttcttcatctga

SEQ ID NO: 504034 - DNA, 375 bp, Stenotrophomonas maltophilia
atgcagcgcattcggagagcagttgcggtacttctggtcgccatggcggcagcctccacgacgggccccgcccatgcccagaaggtgtgcaacgtcatcggaaaagtcgcgggcctgattccgtcgcagggcgtcgccggcttcggcatgacagtgccgctgaccggctgctcctgcgatcacgccatgatctggattgataccgctacagaaggtggaaaagccatgtacgcggcggttcttgcagcaaaattgaatggcagcctggtgctggcgaccttccaggatggccagggagccagctcgccgggaaatgcctcgatcgcgttccgctatttggccacctgcaaactggcggcggtcgaaatgatgtag

SEQ ID NO: 504035 - DNA, 1767 bp, Stenotrophomonas maltophilia
atgtacgcaaggatcgcggcagctgcgctgctgtgtatgacggccctgcctgcgtcgagcgccaaccgcggctcgacggtgatggaggattacgcggcggcgctgaatgcccgcgggcagattctgcagttggataccggtgacatgttcggggaaaggatcgggctgtttaccggctcggtggaattcctgcagaccgacgtcgacctgccgggcaacagtgcgctggaggtgggcatcaagcggcgcttggtggcaggtgcgcagggccggcagggattgggcatgttcggggtgtgggacctggccctgcccagggtgcatgggacgttcagcacccaaggtggatggaagaattacgtggttgccgagccgctcaaccgctgttcgaagttcaccccgcctccaaccgagatcgtcacggtgaaggcgcagacgccgaccgggccagggacattcaccgagtacttcaactccgacgagttctggcatggaacgcagctctacctgccagagaccggtgacgaggatctactcgtgcaaagcaacgaatggcccgtgccgagtacaggccatgcctacccgatgcgaaccaagagcggcaatgtcatccgctgcgtcgccatggacgatggggcgggtgagggcttcgaagtcacgacgcctgccggtatcacctatacgctcaatcatatggccagccttggtagcggaccgccattgatcaagaagggatactcgcggggaaacttcggctcggttacggagttcgaattcgttcttttccggcaggagttccatattcttccgaccagtgcccgagaccggtttggaaattcggtgacctacacgtgggatccggcaaatccacggcagttgctgcgcatcgcagccaacgatggccgcaccgtcgatctcgaatggacggctggatcgcccagcacgctgccaagcgaagtgagcgcggtccgtgcgggcgggaggacgtggacctacggtacggtggtgggtggctacaaggtcaccttcccggaccagtcctactggcagactacggggttcaacgtaggcaccatgggtgccggtgccgttcccgcagagcggggtttctgccggaatccgggtgtggtgacctacggccattccggttcgatccgccatcccagtggtgcagtggcgaagtatcgcttcgagccgacgctgcatggccgctcgtgggcgcgttatggctgcaatatgcccgacagcaccggtagcgggttcctcgactcgatcgaatacacgcccgccaggtactacacgtggtcgctggtttccaggacagtcaccgggccgggcatcgaccagccttatacgtgggcctacagttacggcccggccaacgggtgctatgccgacggcagcaaggaactgtgccaggcgaattcgccggccacgaagtgggtggacgtcaaggatgcagggggtgtcaccacccggcacacctttggcaatcgattcaatgtggacgaaggctatctgctttcctcggtccagccgggccgcgccaccaccctcagctatcagcttgacgcttccggcagctatccggcattggccgggcgaccggcatatcagcgtgccagcggaatcatcgcagccaagcagataccgttgttgcagaaggtcatcgagcaggatggcgtgcgctacatctggaaggtcaatacgttcgacagcatggcacgacctgtgtccatcactgaagccagccagcccgtgcagtag

SEQ ID NO: 504036 - DNA, 360 bp, Stenotrophomonas maltophilia
atgcgggccgcctggcaccagccctacgacgccattgccggtagcccccttccctatcagggccgcgatctgcgcgacttcggcagcaccgcgatagagcgctactggctgtacatcctttgcagcagtcgcaagcctgatcagtgcaatgtcatccgatgctgccaggaacgccatgtggccgaagcggagatcatcgaactggtcgcggcgcgcagccgttccggagacatctcacgctatgcgatcccggagcgcgtgagcttcgtggatgcaatcgagcggaccagcgtgggcaagatcaacaagaaaaagctgcgcgggctgcatgatccggtccttggcaccggcgggcgatga

SEQ ID NO: 504037 - DNA, 735 bp, Stenotrophomonas maltophilia
atgaagacagtattggagctcgttgccgatcgcgccgcgtcggacattgctcgcatcttcccagagaactggagctcgcccaaggccggccggaacatcagagatctggtggcctacgcactggcggggatgaactatcgggacgctgttcggcaggtgcgcactgagggcgagcctcgctatcccaacccgctgccattcatggacgcggttccagatcacgatggggagttcagcctggacgtcgccatcagggacgccttcgactggctccaattcgaactcgtcgcttgcggaggtgtgttaaccagcgtgtccaagtcgaggcgcgggccaactgccatgcttgttcgtacgcgcttggacgcggtccgcagtcagacgatcgaggatccaaacaagagggcgttcacggcaatcgttctcgcgaccgatcacggacaactgctcagtgaactggagcttcttgccgacctcaaaggttcatgggagctttcgaactatgagtatgcgcttgctggcaagggcgatgccattggtgttcacgtcacggtcgatcctcaggatcgattccgcatcaggaagcgccgcaggtgggctgccccctctgttgatgtgtccacgaagcgatccgccctgagcgattcaatggccgccgtctacaacccttcctatgaaagtcgcgtgtgggttcccgtgctacgcgatgagcaggattggtggctggagcagtag

SEQ ID NO: 504038 - DNA, 342 bp, Stenotrophomonas maltophilia
atggctgaagaaaagaaggcagtgacgctgagcagtgtggatcagaagaaggtaaatcgactcgcgcgggaagggatgaagctggtcgacatccgtcgggaacacttcccggaggtcaagtactccgcgctccgcgccgtggttctcgatacgggttcccagtcagcgattggtcgcttcaaggcgatcaacaaggagctggctctcatggcacaggccactacgggggcgcagcgcaaagaacttgctgcttcactgagtgcgcgtatcaaaagccttcatgaggactacatcaggagcgcaaagaagctggaccaggtgcgcgacgtcctccaggagtag

SEQ ID NO: 504039 - DNA, 657 bp, Stenotrophomonas maltophilia
atgatcctgcgcgggcttgtcctgttctgcaggcaggccttcagctaccggctgggagggccggggatccgccgcttgcggagctgccctggttgtcgcgcatccctccatgatgcgattagcgatccaaccctggatgtcacggcaggcattgaaatttccaccctgacactcccgacgggtctgggcctcgcctcgatcgatgatcgcgcacttgtcctctacaggcgcgactgcggtctgaggcggagcagccattccctgcgccgttgtatctcccttcaccaccatgcgggcgttgacggtcaacacggagccgttgctggactgcgagacgatcgacatgtaaggcgtgttggcgggaatctcaccccgccggtctccctctggaaggatgaattgcttcactggcaccggggagacgcagaccacgtagaaccgctttgccaggccatgcgctggtgccgtggtggcgattcccttgcattgcgtgccgttggtcattcaccgtggcggatcccgtggaggctggagccgatcgttcggccaagtctgtgcgagcctccgccatcatcagccgccattcccgcgcaatgttgcaggtcagggaccaccaggtcatgtcgcatggctctagctgatgaccttcgggggtga

SEQ ID NO: 504040 - DNA, 177 bp, Stenotrophomonas maltophilia
atgagtaggtatccctccttcgccgagctggccgagctcgatatgggcctcactgcgtgcgttgtgttggtcgcgctcgttctcggcgtggctgtcgtctccatcgtcatcgaacaggcatggctggcgcttcgtcgcctgtggaatctccggaagggtcgctccgatggtcggtga

SEQ ID NO: 504041 - DNA, 552 bp, Stenotrophomonas maltophilia
atggttgagcgcgttcaacgcctgatcaatgcggtttcgtccattcctggcgtgcgcaccgcttcggtgaccaagcaggatttgtcggagctggctgtagacgaattgtcgctattgccctacgcggatctaccgctggccgtattgcggcgtagcgaaggtactctgtcgcatgaggtgctgattgggatcgagtttgaactggacggcggcccggcaggcttgctggcgctggagtttctgtcgtggtgggtgcgtgacgctgcgcgcagtggagcactgatgcagttgcgcagcctggcgttgccccccctggagcagcagtttggccagaccctgaagttcaccgtcgactggttccatgctgacccacagcaggacctggaacggctgctggtcgccgtagacgaacgggccgcaaacctggaagcgaccttggatcacttcgccattgccgagcgcatcaaggccgccgctgtcgattcgtccagcagcgacgtgcccgcgcccagtgggtttgctggacgactgcggaagttcttgactgagtga

SEQ ID NO: 504042 - DNA, 417 bp, Stenotrophomonas maltophilia
atgcctcgcgccgatcctctctcgatcgacaatgagtttcgtgaacgccctgtactgacccgcgagatccggtctgaccggatcatcctcttcaaacttcatgaaatcggaacgaccttcgtctacgcagtcaacgcgcgtctccacgatcaatacagagtactcgccacgaacatcctgaccctcgatgatcaatggttcgacaacgacattcatatagggctcatcgaactcaggcaagccaacaagcgcatctcgaaatctcgcacttaccactggaacacttgcatacccggcaagagagtaatcgacctcaaccccacaattcacgagatcaaggctgtaggtcccaggttccatgaagttgacgggaggatctatgaagagccagttatccacatgattgatattccctag

SEQ ID NO: 504043 - DNA, 594 bp, Stenotrophomonas maltophilia
atggataggatgtcggcaatcgagtgcccattgggattccatgctctcgagctgccgcctgtacccgactgtggaggagaattgctggcaagctatgagatcaagactggactgaaaggtctgtcgatcatcggtacatacgctttcagggggaccgggtacgactacgcggatgtggctgcgttggacgagatcactctgtatgggttcagaagcagcaacaaggcacgggactatccgagcgttctgacgaactgcgtcgcttctgttgccgaggcgttcggtgcgtacagagtgaaggtcacgtacggcatgcattcgatggactatcaggacggtgtgggccgagaggggccaacccttgaggatctgaaagctgctggagtcaaggatttcgacggcaggaagaacatcctgacgatgtaccctgcccagttctgggatgcccggctttgcagcgacgcacttggatttggacccgaggaggtttcctcccgccttgaaggtaaggttgataaggtggaactgacagcgagtggtgtctacattctcctgagtgacaaggttgatctttcctatgaggagtatctgtag

SEQ ID NO: 504044 - DNA, 819 bp, Stenotrophomonas maltophilia
gtggggcgcctcgatgactacaaccgtgcactgaacgcagtgacgacggcgctggtgagtggtgtggcgggacagggcgctggtcaggtcgcgcccaatgcactggcgccatatgccgcttacttcatcggcagcaagctggacccgagccacggcagcgatcccaatgcgactctgcactttctgtcgcatacggtgttgggtgcgccgctggcggaagccaatggaggcagcgcgggaaccgaagcggtgtccgcgaccggcggcgagttggccgcgagagtgctgaccaattcgttgaccggcggaaaccccgccaagctgagcccggaacagaaggaggtggcgctggcgctgtcgcacgcggtcggagtactggcgggtggcttgttagcgcaggatctggctgggatcacgttgaatgcggggattgccaagaattcggttgagaacaacttccttgcggaagaacaggctcgtgcaatgaagcagcagctcgacgagtgcggcggcgacacttcatgccagaagacggtgcgtgatgttgttaagcaactgtcggagcgaatggactacgggctgctatcggtgtgtagcgcgaactcgtcgagccctgcgtgtcaggtgtttgtcaatgcggccgtctcctacaagtacggctcgtggcccggagtgcttgggctgttcgatgaacttggtcacagtagcgaggcgctttcctcgttcggccactccctgaacggacgtgcctatcgtgagctgatttttgagagtgggggctccagccggtctatatcctgcctcaagaacacactgtag

SEQ ID NO: 504045 - DNA, 1032 bp, Stenotrophomonas maltophilia
atgccagtctccacgatcaacaccccgatgacgtccgccaccgcccgttacgctgattccctgcgcctgtccgttgccccgatgatggactggaccgaccgccattgccgcgtgttccatcgcgtgctggcgccgggtgcacgcctgtacacggaaatggtgcacgccaatgcggtcatccacggtgatcgcgagcgcctgctcggcttcgaccgcagcgagcagccgctggcgctgcagttggggggcagcgacccggcgctgctggcgcaggccgcgcgcatcgccgcggagtggggctacgacgaggtcaacctcaactgcggctgcccatccgaccgtgtgcaggccgggcgttttggcgcctgcctgatgcgcgagccggcgctggtggccgattgcgtggcggcgatggtcgacgcgatcgagatcccggtgacggtgaagtgccgcctgggcgtggacgaggacaacgactacgacgtgtttgccagcttcgtcgaccgccaggtcgccgctggtgcggcgatggtggtggtgcatgcccgcaacgcgtggctgaagggcctgtcgccgaaggagaaccgcgaggttccgccgctgaagtacgactgggcctaccgcctgaagcaggaacgcccagcactgccggtggtgatcaacggtggcctggccagcatcgaggcggtacaggcgcaggccgcgcacgtcgatggcgtgatgctgggccgggcggcctatcacgacccctatctgctgcatcagctggaggcgctgcacaccggcgccccgctacaggcacgtggtgacctgctgcgcgcgatgcgcccctacatcgaggcgcggctgggcgaaggcctggcgctgaagcacatcacccgccacctgctcggcctgttccatggccagcccggtggtcgcgccttccgccaggtgctgagcgagggcgcacaccgcccgggcgccggctggagcctgatcgaacaggccttggcggtcaccgaacgcgaagctgatcgcgccgcggcgtga

SEQ ID NO: 504046 - DNA, 183 bp, Stenotrophomonas maltophilia
atgcccggtagtgccggccgctggccggcatccctgtgtggcgggatcaacgcggttgccggccagcggccgacactaccgttcggcagtttcccaggggaagcgtggcagggcgtccaccgcctgttccagccgctgcagatgcagcaggtcttccgcgcagcggccgaagcgctgggctga

SEQ ID NO: 504047 - DNA, 1302 bp, Stenotrophomonas maltophilia
atgttcgcctactacgcccgattggcggcgcgcagtttccgccgcaacaaggtcctgaccgcgctgatggtgatcgccatagcgctcggcatcggcgcctcgatgaccacgttgaccgtattccacgtgctgtccggcgacccgattccgggcaagagtgaccggctgttctatgtgcaggtcgatccgcgcccgcgcggcggctataccccgggtgaggagcctgaggaacagatgacacggcgcgacgccgagaccctgctgcgcgagaagcgcggcatccgccaggcgatgatgagtgcgggcggaggcacggtggaaccggagctcagcacgctcaagccattctcggtggatacgcgctggacgtcggccgatttcttcccgatgttcgacgtaccgatgcagtacgggcgtgcctggagcagcagcgatgatgacaatcgcagccgcgtggtggtgctgtcgaaagcgatcaacgacaagctgttccagggtgctgacagcaccggtcgcgagatccgcctgagtggccattcactgcgggtgatcggcgtgatgaagaagtggaatcccgaaccccacttcttcgatctgaccaccggcaactacggcaaggatgaagacctgctggtgccgttctccactgcgatggacctggagttcggcagcaacggcaacatgaactgcttcggcgagaatccggatggcagcagcaactcgatcagcgcgccctgcagctggatccagtactgggtggagctggacccggccaaggtcgaggactaccgcaactacctggtcaactactcggaccagcagcgcgcggcgggccgtttcgagcgccccaccaacgtgcgtctgcgcccggtgatggagtggttgacgttcaagaacgccgtgcccagcgacgtgcgcctgcagatgtggctggcactgggctttctcggcgtctgcctggtcaacaccgtgggcctgctgctggcgaagttcctgcgccgcagtggcgagatcggtgtgcgccgcgccctcggtgccagccgtgggcagatcttcctgcaatgcctggttgaagccggtgcgatcggcgttgccggcggcgtgctcggcatcggcctggccctgctcggcctgtatgcggtacgccagcaacccgtggactacgcgaacctggcccacctggacggcagcatgctgctgctggccattggcctgaccctgttcgccagcctcgccgctggtttcctgcccgcctggcgcgcgatgcaggttaccccggccatccagctcaagtcgcagtaa

SEQ ID NO: 504048 - DNA, 204 bp, Stenotrophomonas maltophilia
atgctcttgctgtccgatgcgttgaagaacgagagggttgggccggggtggggcggcgggaccgttggcgccatggatggcgccatcgagcttacatggatgtacttgcagcgtgtcccgccgccccaccccggcccaacccagcacgtagaaacaacgagccatgacccgctgttgctgttgctgttgctgttgatttcatag

SEQ ID NO: 504049 - DNA, 798 bp, Stenotrophomonas maltophilia
gtgctgaagattccaaagaaggtctcggacagatggccgacaacggtaaggtctctggtttcggtcgccgtttcccacaagaccaaggatgtgtctgaagccgataccgtgaccttggtcaaggacatgcttgccgacatcttcggttacgacaagtacaacgaattgactagcgagcagcagatcaggggaacgttctgcgacttggctataaagatcgatggaaagatcagagtgctaatcgaagtgaaagcggcagcaatctcgctgaacgagacacatctgcgccaggccatcaactatggcgcccacgagggcatcgagtggatcgtgctcaccaatgcgttggaatggcgcctctacagaatcaagttcggccaacccatcgagtacgagctcgtctcatcgttctgcatagcagatgtcaacctgaagaacgaagaagaccagcgcaaattgttcctactctgcagagaaggaattacctctgacgctatgggcctgtatcaccagcacatctcggtactcaacaagttcacggttgcgcaagttgttctcggtgagccggtcgtttctgtcatccgtcgagagcttcgccgtctgttccctgaactgaagatcgagtcggaggcagttgttgaacttctcaacaatgagattctgaagcgcgaggtcctggacggagagaaagtgaaggatgcccagcagcgcatacgccgggcagtctccaagaatgctaaagcgcagacgaagaagactccctcagtcgacactgcgcaagagcccgcactgagctag

SEQ ID NO: 504050 - DNA, 255 bp, Stenotrophomonas maltophilia
atggctaccgcctatgccaagagcgacagtcagcgccctactgtggtgcaaccgatcagtggacaactggcgtctcccggcggcccgttgcacggagtgccgggaagcatggcacaggcagaactgatgactgccggccggcttcagggagcctacgtcaatgggaaaatgggacgtgtggtagcaggtggccacatgctgatcggatttctgcagcacggccaagcggtcgtgaaggatctgtggccgatctga

SEQ ID NO: 504051 - DNA, 1185 bp, Stenotrophomonas maltophilia
atggcatttgcaccgtctgaggcgctcctttggagcaaagctacgaagggcaagcccgcacaggtcaccgatgccgagataaacgagcgctatgcgcggggcgaaggtcgtatcgtcatcgagacgaatcgcgagaagctgcctggctttgttgcttcgttgaagcagaccaactatatggatctgcgtccgttctatcagcgacgccctagatggacgtcggagaagcagagcctgttgatcgagtcattcatcatgaatatcccggttccgcccgtatttctctacgagaaagaatttaattcatacgaggtcatggacggacagcagcgcataacagccctgagggacttctacgcaggcgagtttgaactggtcgggctgacgcagtggccagagatcaatgggcgcacctaccacaccttgcccgacaagattcaagccggactggatcgtcgctccattacctccatcgttctcttgaaggaatcaacgactgatgaggaagaggcctcaaatctcagagaaaccgtgtttgagcgtctcaatacgggcggcgtgcagctgacgagacaggagatacgaaacgcactctatcgcggccgaataaacaacttgctcgataggctttctcgaatccctgccttccgcgaggcatgggcattgccgcagtacatcgagaacgaaaccgaggtaactccagaacttcttgacaattcgatgtacgcaaagatggaagacgtggaaatggtccttaggttcttcgcattgaggcatgccgataactaccgaaacggcatgcaaggatttcttgatctgtacatgcggaaggccactcagttcactgacgatgatgcgatcgttcttgagcgcgaattcatcgacacattgcagctcgcgcatgatgtgtacggcgacctcctcttcagaccatatgatccggcgaagaaatcctggtcaaccagcgcgcagaaggcttactacgatgcggttatggttggtatgtccggattcttgaacaaggcagcattggtaagatcaaacgcagccaaggtgcgtgacctcaccatcaaaatgttcactgatcatgaagccggaaccttcactgggcgcggcaattcaaagaatgacgtgcaaactcgaatcaaactcttcaccgaaatggtggaaaggtcaatttcctga

SEQ ID NO: 504052 - DNA, 1032 bp, Stenotrophomonas maltophilia
atgcacaacgcgctcatcgatagaagcgtcgacgccttcggcgcgataagaaagcacgtttcattctcagctaacttgcggcagtacatgtcgacggcccaagcatctgcagacgacgccgctgcggctcctgttctcgcaactgaagttctaggtgatgctgctgatgcaaccagctggcggataatagatcattgcgcggcagttacaaggtcttatgcgatttttgaatcgttcgtgctgcagattcttcgcgagtacctttccttcttgtctaggtcatacaagatttcctccttaggagctgagttcagaagcaagtacaccaaggggctgggtcaaatccttctcgatcaggataagcagcgctatcgaaatcttgacatagcgggactgatcgtagctgccggtgatgccatcggcgacaaagcaggctatcagatcgaacctgaggcgctactacgttccgaacagaatttacgtatgagcgagctacagcggctgttcggccagtgtggcctgctagggattgagccctggattactcgccatccatctattgttgaattcttcgccactcaatctcgtctatccgagaccgccgtcagcgagctaagacagatagttgattaccgcaatgaagctgcacatggggacgtagatgatgtcttaggtgcggacgtgcttatcgaatttacgcacttcttcgaagcactctgtttgagtattggcgacttcgtccgatacgatacattacggcgcgcaaaagcgctcggcagtgcaacggttgtcggggttatctcggagcgcttccgtaacgacatcgtagtcgcaaaggtcaggcaagcaaccatttcgatcggagatcagctgtacatatttgggaaaggaatggcaacgctggcggagatagggagcctgaggatagataacatcgataccgagactgcgaaaattagcgacgaagtggaagttggacttgctttaggggtccgcgccaaagttggctgcgagctactccgcatgaattag

SEQ ID NO: 504053 - DNA, 702 bp, Stenotrophomonas maltophilia
atgcgaaatccgcaccaagggatcaccgaacttacgccccccccgatcgcattcagtagtccgtttaccgagtgccgtgcactcttcggcaagcgcaaatccttggctgcactcactttaaacactcccccctgcgaattttctgcacggatgcccagcatgattaagctctaccactacacgtcgcctcacgcagcccgcttgattgctcagctaggcatctattatggtgcagtaggcttcgaggatggtcttaatgtcgtccctgcaagcaccccctggaatccatcaccgggatattcaacagctggcgcaaatcattgcgcacttctcgagcttgagtggtcagggccgattgtgcagaatcctgccggcgggtcggaaccggacaagctattcgaccttggggcgcacaggctttttatcccccaagggacgaccaagcacctgcgcctcactaagatacgacttcgcaaagggcttcagcagtccaattggattttccactccagtgagcctcgagttcatctcttccgcccccttagctggcgcctcattattccatgcgaaaaggcgaaagaaattgctcggttgcgactgcgtgacttggaggccgctcgcgcgacgataaaaagggtgtcgatccaagggatgccgattgaggtacgctccttccgagagcgcccttggaagacgctttga

SEQ ID NO: 504054 - DNA, 618 bp, Stenotrophomonas maltophilia
atgttgatggtgcaccacgcgcctttgggggaacgggcggcacgcgtacagcttgccgtcgctgcccttcaccacggtctggcctggcacgtagctgccaatgcccgccggatacagatggtcaaagtccccgcccggcgtacggatatccacctggtgcgtgaatccgcttttgagatacacgcggttctccgtcaccgaagccacaggcgtgatcacaccattcttcatcacgccgatacgggcgttgaccgcgctagcattcccattgcgagcgacgtacagcggccacaggttcgcagccgtctaaccggccgacagggtcgtggtaacacgctcggcatcaccaccattgctgttgaatacacgcagctctaccgaggtggcgaccggcagcgcgtcacggccagtaagggcgctagcgtccagccaggtcggcggggtagtgccaccaccctcgaacttgacgtcgatgcacctgtagaacgcctcattcgagtcagagcgctgtcaggtgttgtagataatgtgcgggccggtgcgcttgggcagcggacagttcaacttgtaggtgccatcggccgagagcgccggctcctgactcccccaaggccgtag

SEQ ID NO: 504055 - DNA, 1641 bp, Stenotrophomonas maltophilia
atggcttacccatctttggagcagtacaacgaggcgttgcagtcaccgcagttggtgctgctggacgcggagctcaagcgcggcaccctgagaaccaccgggctgggattgcctctggcgctatgcggaggttttgccttgacctacgcggtgacggttggggcgcagaagtacgcgcttcgctgtttccacaaggaatcccgggagctggagcggcgctaccaggcaatctcgacacggctggatcagctcaagagcccgtacttccttccatttgaattcaatcctgccgggatccggattcagggcagcacgtaccccaccgtcaagatggcctgggccagcggcagcacgttggccgagttccttgaggccaagcacgccaacaaggtggcgctccagaatctgcgagccgctctgacctcattagccagctacctggagcagaacaatctcgctcacggggacatccagccggaaaatctgatggttagtgcggacggcaccaaagtccagctgatcgactatgacggtctctacgttgagtcgctaaagggtgccaaggcgaccgagctggggcagctcaactttcagcacccccagcggtccgccaatgactttggtcccacgctggatcggttctcgtttctcacgctggatgtagcgcttcaggttctgattgccgctcccggggcctgggcatcttctcgctctgagcccagcgcggttgtgttccgtcgaaatgacttcctcgaccctgcgcagtcaagcgtgtttcaaggtgcggtggccctttccggcgtcaaggcgcatgtagagaacctggccaaggttgctgccggagcgttctcggccgtcccgtccctgaccgatttcctccagggcaagggagtgcctgcaggcccgatcgccatacgaaccgctgctcaagtccttgcctaccaagggccgtatgtggtggctgacgccgccaactacagccaggttcttcagatggttggaagccgcgtcgagctcgttggtcgggtatacgccgtgacgcatcaacgcaccagcggcggcaagccctacatcttcgtgaactttgccgattggcgtggccaggcggtcaagctgtccatctggtcagacggcatcgatgcaatcaggcccaatctgcctgacgcctcatgggttgggcgctggctctcggtctccggtctgatcgatccgcccttcagcaagggataccgttctggccgctacacgcacttgtcgatcaccatcagcacacctggacagatccagactctggcagagaaggatgccaagttccgcttgcaggtggcgggtaaggcggcaggcgctgctgtgccaacggcgaccagccgcaatacgggcatcttgataggcatgggaggtgcagcgacaaggccggcagtctcggcaacgccatcgactccgcccgcacctccccagagtcgtaatcagtccattctgggcagcatgcagcagtctacaaatcaggcttcgcctccgcagcgtcgaccacctgttccgagcacacctcagcttggctccacttcgtcgaacaaggggcgctggccggtagtgcttatcggcgttttcttcctgctggcgctgagggcatgtgcagggtag

SEQ ID NO: 504056 - DNA, 723 bp, Stenotrophomonas maltophilia
atggctctgaccgttctcttcgaagggacggtggccaagcacattgagtcaccggatgacaatgaggacgcccaccgcctggcccctgatagggggcgggtggtgctatcggacggtgcgtcggagtctttcgacgcccgaaactgggcgcgtttgctcgttgagcgcatcgtagacgaagagctatctatggatgcggtcaccgcgtgcgcgcgctcatacgaagcgatgcatgatccgaagactctttcctggtcaaaggctgcggcctatgagcgggggagctttgccacgctgctggtcgcgcaggatctgcccgaggccaatgccgttcaaatcaccgcggttggtgacagcttggccgtgtggctggacggtgatcattgggtgacctcagccccttatgagtgctcgggccagttccaggagaagccttcgttgctggccacccggctggagttgaatgagccaggtgatcatctctggagcatccgggagtggacgtatgaaccccaaggacatcggttcctgctctgcatgaccgatgcgcttggtgcctggcttctcgctcaccaggagcggggggatggctcggcactggagctgcttcgtggcatacgcgatgttcaagagttcaccgagctggttgagaacgagcgggctgcggggcgcatgcgtcgagacgattccacgctgatcattgcgtctgcaattcagtcttga

SEQ ID NO: 504057 - DNA, 834 bp, Stenotrophomonas maltophilia
atgacatacaccgccgagatcagtagaaccagccctaccgcgttccttttcctagtcgatcagtccggctcgatgcaggacacgatggagaacggcaagtccaaggcgcagttcgtcgcagatgtgctcaaccgcacccttgccactttgatcacgcgatgcaccaagtcggaaggcacgcgcgactacttcgaagtcggcgtcctgggctattccgggtcttcagcgggaaatggcctgagtggcgggctggcatcgatggtcctccatccgatctcccagatcgaagccaatcctctgcgtgtggaaagccgcaccaaaagggtggatgacggcgccggtggtctggtggatcagtccatcaagttccccgtatggtttgaggccaaggcctcgggcggaaccccgatgtgcaatgcaatcaccacagcggccggagagctggtcgcctggtgcgatgcgcatccggacagctatccgcctaccgtgcttcacgtcaccgatggcgagtccaccgacggtgaccccgaatcccttgcccagcagctgcagcagatcagcaccaacgacggcaacgtgctgctgttcaacctgcacgtgagcaccagcggtggtgatccggtcaagttcccgagctctgatgcaggcctgagcgacgcatacgccaagctgttgttccacatgtccagtgcgctgcctccccatctgcagaaggtcgcagaggaaaagggtatcaaagcaacgatggagtccaagggcttcgtgttcaacggtgagatcgccgagatcgtggacttcttcgatatcggtacgagggctgcgcagctgcgctga

SEQ ID NO: 504058 - DNA, 312 bp, Stenotrophomonas maltophilia
atgaatgatgtggagcacgatatgcctcagcccgtgcaaaccgatttcccgccgctgctggactgggatgaggtgatgcgggatgagtgtgaggatcggttggggtttgcacgtcgtacgacgtatgcgctgctgacgctgtctagcgcggaactggttgagggctttggtggcagcaatccgccgggcctggaagcgaccagaaggacggtggcgctgttccaggcgcacctgcggcggcaggcgtggctcgcgaaagcggcagagaggcgtcttgggcatattgcggcagcgctggccgctgctggctag

SEQ ID NO: 504059 - DNA, 420 bp, Stenotrophomonas maltophilia
atgaaactcatagggcaggagcaacggcttacccgtgaagacctctgcgacttctcaaaaagtacaggtttgaggctctccgatgagttctcggacttttacctgatgaacaacggcggatatccggatattcgtccggacgaggcgaatccacttctgctgaatagctttctttcgatccgctacggtgatgcgacgattgacgctgtctaccaatcgctggtgagaggcaacccggcgctggaggggttggttcccttcgcttacgacgattgcgggaatgttttcttgttgtccggaaagcccggtatgcctgaagaggtctttctctggttgccgggggagaaggagcaggagaccattttcagctcattcgctgaatttcttcatgccctctacgaagagaaggagtgccgctga

SEQ ID NO: 504060 - DNA, 423 bp, Stenotrophomonas maltophilia
atgaagaagtggcttctgctgggaacgcatatcctgatcgccatgatctcctccctactgggagggctatacgtaatccagacgtttcccagcctgcggcagcagtacagcaatgaacttgcgatgtcgatccaacttcttttcgacgaacagaggcagccaagggacgaggccgaccttcgccgcagaatctctctgaacatcgccaaaagcctgcacctttccgccagatcaccgggcaggtcggagacagaactcgagcgcctgagagccctcagccgtcgggtactgcagcaggatctgctgagatatgtcgagcagtcggatgcgcggcgcaatgcgcttgacggggccgttcatctgacacgcgacctgccaacacacggctcgccccccgctaatgccaggacacgcccggcatga

SEQ ID NO: 504061 - DNA, 456 bp, Stenotrophomonas maltophilia
atgccaaaaaagatcatcaccaaggcaacgctgccaaagatcatgcgtgagctggatcgctgggaaggcaagctcacttggccgcttttctgtgagcgtgtcgcaaaggtgctgaacgtggcctcgatttcgaagcacacgatgtacctttatcctgccgtcaaggagcggtttcagcagcgtcaaaaggatttgcgtgaggcgcgaagcgcgctgccgagagatttcacactggatgctgctacccgccgcatcgctgaccttgaggctcaagtgaagcgccttgaagagacgaactgtgtattgctcgatcagttccgtcgttggcaatacaacgcctatgcgaacaacgtccggatggattttctaacgctagataagccgttgccagaagtggataggtctggtcaccgtcgggctaagaacgggcggaaaaaagtcaagcctaaagaatga

SEQ ID NO: 504062 - DNA, 429 bp, Stenotrophomonas maltophilia
atggccctctacctcgttaatcccggtgtggatctcactctcgaactttacatagcccccgctatggaggaggccgtttgcattcagtgggagcgagtcaaggacaagaccatccggcagacttttgtccgtaagctcgagaagcagcttgagcgcctgatagccgaatgcatggactgggacctgaaggaacctacccctgcacaggcatcctacgccgcgctcatcagcaggaaactggacgtatcaataccgtcagaggccatgaagtatcggttccacatggcgctgttcatcgatacctacaacgagcagtaccggacggagatgtcaaagcttcccacaccaaacacggtggaaattgagaaagcacaggcgcttgttgcgaagaaactgaaatcttccccttccggcaacaacccgggttga

SEQ ID NO: 504063 - DNA, 192 bp, Stenotrophomonas maltophilia
atgaagcgcctgaagaacgagaccctgtcgatccgtacatcgccggagatcaaggatctgcttcggttggccgccgagcgtgagcgtcgttcagccgcgtcgatgatcgaatccctgatccttgagtacgcgcgggagcacgggattacccaagccaagccgtcccctgcgggcaaagcggggaaggcgtga

SEQ ID NO: 504064 - DNA, 2391 bp, Stenotrophomonas maltophilia
gtgaacaagaaggccctgtccgagcgggacatctgtaccaagttcatcaccccggcccttgaaaaggctagctgggacgtcgttacccagatccgggaagagttcccgctgaccaaaggccgggtgatcgtgcgcggccaaatgcatacccgtgcccagcccaagcgcgccgactacgccctgttccacaagccaggccagccgattgcggtgatcgaggccaaggacaacaagcacagcctaggcgatggtatgcagcaagcactggcctatgccgagatgctgcaagtccccttcgtgttcagcagcaatggcgatggcttcctgttccataaccgtatcgccaaggacggggtgatcgaacgcgaactgaccctgcacgaattcccaagcccgcaggctctgtggcaactctgggcggagcaccaagggctgagcgaggaccagcagcaggtcgttacccaagactattacagcgacggcagcaacaagaccccgcgctactaccagctgctggcgatcaataagaccatcgaggccatcgccaaggggcagcagcgcctgttgctggtcatggccacgggtactggcaagacctataccgcattccagatcatctggcgcttgtggaagtcgcgggcgaagaagcgaatcctgttcctggccgatcgcaacatcctggtcgaccagaccatgaccaacgacttcaaaccgtttggcccggcgatgaccaagatcgccaggcgccaggcgaacaaatcctatgagatctacctctccctgtaccaagcggtgactggcaccgaggaagagaggaacatctacaagcagttcagcccggacttcttcgacctgatcgtgatcgatgagtgccaccgcggcagtgcagccgaggattccgcctggcgcgagatcctcgaatacttctccaacgccacccagattggcctgaccgccacgccaagggaaaccaaggacgtatccaacatcgattacttcggcgagccggtttacagctactccctgcgtcaaggcatcgaagatggcttcctcgcgccatacaaggtggtgcgcatcgatatcgacaaggacctgaccggctggcggccggacaaaggcatgttggacaagcacggcaatgagatcgaggaccgcatctataaccagcgggacttcgaccgcaatctcgtgctggagcagcgcacccggctggtggcgaagaagatcagcgattatctcaaagccagcaaccgtttcgacaagaccatcgtcttctgcgacaacatcgatcacgctgagcgcatgcgtcaggcgctggtgaacgagaatgccgacttggtggcgcagaactccaagtacgtgatgcgcatcaccggcgacaacgaggaaggcaagcaggagctggacaatttcattttcccggagagcaagtatccggttatcgccaccacctccaagctgatgaccaccggggtggatgcgcagacgtgcaaactggtggtgctggaccagcgcatccagtccatgaccgagttcaagcagatcattggccgtggcacccgcatcaacgaggactacggcaagtactggttcaccatcctcgatttcaagaaggccactgagcttttcgctgacccgtccttcgatggcgaccctgtgcagatctacgaacccaaaggggaagaccccatcgtgccgccagagtccacgcctaccgatggcgtcactgccgcaggccccagccttgatcccgatggcaactatccgcaaggctccagctacaacccccagccggtaagcgacggggatgacgacgacaagccccgccgctatgtcgtggccaatgttgaggtcagggtgttggctgagcgcgtgcagtacttcgacgccaacggcaggctgatcactgagtcgctgaaggactacacccgcaagaccattggcaaggaattcgccagcttcagcgacttcctcaagcgctggaatggcgcggagaagaagcaagcggtgatcgacgagctagccgagcagggcgtgttcttcgatgccctcgccgaggaggtcggccagcaggggaaggccttcgaccccttcgatctgctctgccacgtggcttggggtcagcctccgttgacccgccgcgaacgcgcggaaaacgtgaaaaagcggaattacttcggcaagtacggcgaacaggctcggagcgtactggaggccctgctggataaatacgccgatgaaggcgtcggcccgattgaagaaccgcaaatcctcagcattgccccgatcaatcagctcggtacaccaatcgagctgattcgtgccttcggtggcaaggacaagtatcagctggccttggccgagctggaacaagccctttacagcgcctga

SEQ ID NO: 504065 - DNA, 1464 bp, Stenotrophomonas maltophilia
atgtccattaccacgcttatcaagtccattcaggacatcatgcgcaaggatgtcggcgtcgatggtgacgcccagcgcatcagccagatttgttggttgttgttcctgaagatcttcgacgacaaggaacaggagtgggagatcacgcagtccaactatcgctcaccactgccgagccgtttccgctggagcaactgggccaaggatcccgaaggcattaccggcgaagagctgatcgacttcgtcaacaacgacctgttccctgcgctgaaggcgctggctacgcgtgcgggggtgtcgcgacagggcaaggtggtgggtgcggtcttcgaagacgcctacaactacatgaagtctggcaccttgctgcgccaagtcctcaacacgatcgaagcggatgtggatttcaattcgtccagcgatcgccacctgttcaatgatatatacgagaaagtcctcgccgacctgcaatcggcgggcaatgccggcgagtactacaccccgcgtgccgtcactcagttcatggtggacgtactcaatccacaactgggcgaaagcattctggacccagcctgtggcaccggcggctttctcacttgtgccatcgagcatctgaagaagcaggtgaagactcctgacgatcaggagcgcctgcagaacaacatccacggcgtggagaagaaacccctgccgcacatgctggccatgaccaacatgatgctgcacggcatcgacgtgccgacgaatattcgccacgacaacaccctgagtcggccgtacaaggactattcgccgcgcgagcgggtggacatcatcctcaccaacccgccgttcggcggcatggaagaggacggcatcgagaagaacttcttggccaagcaccaaacccgcgaaaccgccgacctgttcatggcgctgatcatgcatctgctcaagcatgacactggccgcgccgccgtcgtgctgccggatggtttcctattcggtgaaggtgccaagaccacgctaaaacgcgaactgctcgaagagttcaacctgcacaccatcgtgcgcctgcccaagggcgtttttgcgccctacaccagcatcgccaccaatgtgctgtttttcgaaaagggcgagccgacgaaagatgtctggttctttgaacacccgtacccggatggctacaagagctattcacgctccaagccactggagatcaaggaattcgacctagaaaaggcctggtggggtggcccctcacgcaaaggacggaagacaacagagaacgcctggaaggtatcggctgcagacattgcggcgcgcaactacaacctggactgcaagaatccccacgcggtggaggtgaaccaccgtgatccagccgagttgatggcggagtgtcaggaaatcagccgccaactggctgaggcgcagagcgcgttgaagagcgagctgatgctcgcactcggagggcagtga

SEQ ID NO: 504066 - DNA, 1707 bp, Stenotrophomonas maltophilia
atggagctgctgcagcaatacttcgatacggcctttgccgcgcccgatggcatcccgaagttgcgcgagctgattttgaagcttgcgatgcagggaaaactggtgccgcaagatccaaatgactcaccggccagcgaactgatcaggacgattgaagccgaaaagaagcggctggtgaaagaacgtaagatcaaagcgcccaaaaccttgccggaggtcaccgccagcgatgaaccctactctttgccccatgggtggcagtgggttcgactcggtgcgatgggcaatattttcaacggcaacagcatcaatgcatccgaaaaagaatcgaaatatgccggtgtcgaggggttgccctacatagcaaccaaggatgtcggctacggtttcgaaccgctggactacgacaacggcatttgcattcccccggatgaagaaaaattcaggatcgcacatcaaggcgctgtgctgatttgtgctgaaggtggcagcgcggggaagaagtgtggactgacagatcgcgacatctgtttcggcaacaaactgtttgcaaatgaattgtatgggcagattccgtcgcgattcatcctctacgtttatctgtccccagccttccgcgcttcatttacagccgcgatgaccggaattattggtggcgtctccattgccaagtttgtcgagataccaatcccactcccaccacttgaagagcaacaccgcatcgtcgccaaagttgatcaactaatagcgcaatgtgatgtgctggaaaatctgcgaattgagcgcgaaaaaaagcgcttgaccacacacgccgctgcgatctcacagcttctcgacacaactggcaactgcagtgtcgacggtgcttgggcctttatcgcccaacacttcggcgatctatatttagtcaaagaaaatgtcaccgaactgcgtaaggctattcttgaactcgcgatgcgaggaaacctgtctaagtcgggatcatctgatgagccactagatgctctgcttgccaggcttcaggaagaacagaaagctaatcgatcaatcggtcaaaaggacaaggagcttattgcgaaaagattggcgatggcgtcccgtgaaattgaaaataatagagtatgtttgaccgctagggatttttgcgaattcatcacgaaggggacgacacctgcgacagatgaattgagtgagggaggggatgtcccgtttcttaaggtctataacatagtcaataacaaaatcgattttgcctacaagcccagctacatatccaacgaagttcactacagcaaacttaagcgatcaattgtctatcccggcgacgtgatcatgaacatcgttggcccgcccttggggaaagttgccgtagtcgatgacctttatcccgaatggaatataaatcaggcgttggccgtatttcgacctatggcaggcatcttgaaccagtacatctactatgcactttcaacacacagtgtattgggcagtgcgttgcgtgaggtcaaaggtactgcaggtcaagataacttgtcgcttgaacaatgccgagatttggttatctccatcccgtcaatcgaagaacaacatcgaatcgtggatagcattcgccagctaatggctttgtgtgacacgcttgaccagaaaattgatgccgccaaaagcaagcaaaccgaattgctcgatgctttgatggcacaggtgtga

SEQ ID NO: 504067 - DNA, 1914 bp, Stenotrophomonas maltophilia
atgcgcctgaaatcactctttgtcagcgactacaagaatctgaagaacttcacgttgggtttcgacggcacgagctttatcgatgtgttcgtcggcaagaatggcagcggcaaatcgaatctgttcgaggcgctgattgagatattccggcatctagatcaatttggccgccctgcgaatgaaatctccttcgattacctcgtgagttacgagatcgaagggcaagagactgaaattgaatggaaggcaggaaaactgcgaatcaacaaggacgaagatcgcaaaacgctgggacaaacaccattccccgacaacgtcttgatctattactctggccacaacactactgttaccgacttgattgccgactacgaagagaaatttcgtgggcgcatcaaaggagccaatcttgaggactcccgtcgcttccttggtatcggccaagagtacaaggcactgctattggcggtattgctggtgcagccctcagatagcagagctcatacattcattcgacaaaagctgaaaatagatagacttggcatcacaaaacctggaactgcagacgtttccgagcctgtgttgagggttgatttacagcggccggactacgcgcgaggtggcgagaaggaaaagtacgacatcgacaatgttgatgtcgcctcccgttattggcgtccactcggcattacaaaggattttctcggcatcttgagcgattgtgtgtgggacaacacagagaagctgacggtgacagagggttatttgcctactgaggatcgttacatcttatacctgtccatcagcaagctgcaggagagatttgccggaaaatggcaggaattgttccggcagtttgataacttgaagaccttgggaatgctgggcggcgtttctgtaccgcttcgccttgcttctggcatagaggctaatattagccatttcagtgacggccaatttcagtcggtctacatatattctattatcgaactctttaaagaccgcaattgcctgatttttctggatgaaccggatgcttttcttcaccctgaatggcagtttgagtttttgcggcaggtattcgacattactgatgcggcagcgaaaaccagccacgttttgatgagcagccatagcgcatcaacaattacctgcgctaacgagagcgttatcaatttgttcgagtttgacggtgaaaaggtggcgctaaccaaggtaaacaaggcagatgttatcaagtcactgtctgctggcttgataactttctctgaaagtgaggcgcggctcagcatcaatcattttctccgcagcacatccggtgatgttttgtttaccgaaggtgtgacagatgaaaagatattggagacggcatggctgaaactctacccagaggagccatgtccatttgcaatacagaatgcgtttgatcgcatttttcttagaaacctcttttcaagagatgagcttcgagtcaattttcccgatcgtaagatgtttgccttgttcgatttcgatgaggcctacgatgattggaatggcctggattctaaagcatgccatgctgaggtaactgaccctcataagggattggtcaagcgacttcggcatcaaaatcattacgcagcacttctcccggtgccaaatgttgatgccgtcaaacggcaggtactcgacgacacaggaaagccttggggtcgagggcaggattcccatttatccattgagctacttttctttaaagaagaatgggtcggcacttggttccaacggaaggcagcatccgctggcgctcagatcattgagttttcaggcgataaggtcaagtttgccaacgacgtcgttccaacattggatcgggcacactttgaagcattcaagccggtttttgagttcatcaaatccaagtgtgcttga

SEQ ID NO: 504068 - DNA, 921 bp, Stenotrophomonas maltophilia
atgctcaagctcagcctcgatgccctgcagatcctggatgccatcgaccgccgcggctcctttgccggcgccggcaaagccctgcacaaggtgccctcgaccatctcctacaccgtggccaagctggaggaggacctgggcgttcagctgttcgaccgggtcggtccgcgcgccgagccgaccgatgctggccgcgcgctgctggacgaaggccggcacctgctgcgcgccgcccgcgagctggaactgcgggtgcgccgggtggcgtcgggctgggagaccgaactgacgctggcggtggattcggtgttcccgacctggctgctcgggccggacatcgccgcgtttcgcgaggccgaggcaccgacccggctgcgattgatcggcgaggccctgtccggcacctgggaggccctgctggaccgccgtgccgacctgctggtcggcgcgccgggcgagggccccagtggcggtggttacgtggtcgagccgctgggcacggtggagttcgtgttcgcggtcgcgcccggtcatccgttggccgcagtgccgggtgtgctgggtcgcgagcagctggtcgagcactgcgcgatcgcggtctctgattccgcgcgcaggctgctgccgcgcacggtcggcttgttgatggggcaggagatgctgacggtgccggacatggccagcaaattgaagttgcagtgcgaaggcgtgggattcggcttcctgcccgagccgtgcgcacgcgctgcggtggcgcgtggccagctggtgatccgcgaggtggaggaacacaagccggaagagaccttctggctggcctggcgcaccggagaggatggcgccgcactgcgctggtggcgcgagcgcctgcgcaggccggagctgctgtcgcagtggtggcaggcaatggccagggggtag

SEQ ID NO: 504069 - DNA, 669 bp, Stenotrophomonas maltophilia
atgggaatacgcctgcccacctgggtctggatcggcgcggtcgcgctctcgtgcgtggccggcatggtcaacgtggttggtttccttggtttcgagcaccaggcggtcagccacatgaccggcagcaccagccagctgggcatggcactggcccagggtgactggcgcgcggtcggccacttgtggggactgctgatcgcgttctcgctgggcgcgatgctcagcggcctgctgatccaggacagcaccctgcagctgggccgacgctacggcgtggcgctggcactggaatcggcgctgctgctggtcgccattccactgttcgaacaacaccagatctggggcgcgctggccgccgccatggcctgcggcctgcagaacgcgatggccaccaccttcagtggcgcggtggtgcgcaccacccacctcagcggcatgttcaccgacctcggcatcggcctgggccacctgctgcgcgggttgccgctgcaggtacgacggctgaccctcagcggcctgatcatcagcggcttcctcgccggcggcatcatcggcgcctggctgttcatgcgctggcagtacgacgccctgctcgccccggccctgctgaccggcctgaccgggctgggttatgtgctgtaccagcagtgggcgcgttggcggcattga

SEQ ID NO: 504070 - DNA, 630 bp, Stenotrophomonas maltophilia
atgcggggccggtgccttgaacttgaaggtgtagcgcccgcgcgaatcggcgcggatcggcgaggtcggccagtcactgcggttcagatcgaggccgcggtacttgctgttgccgccgctgcacaactcgccatctggaaccaccgcttgatggttgccgttggcgttggcctggttgacaccggcccagtcgtagaacggctgggcgccgccgatggccttggcggcggcgcaggccgggttggtcggattctccggattgccctcgtggcactgcttcacgcggctgagcggcttggacagcgtgccgtgggcgaaggcgttgccggacagtgccaggccgacaacggcggacagtgcgaggacggcccgatgggacaggtgcatgcaggaactcctttgcgaagtgttggaaacctcgcggagtcttcccatgtagccgccatatgcccatcagacaagtttgaaaggctgctgcgttcctctgtttccgcaacgcgcgccccactgcgcggcaggggagccaggaggcggtgtgatgtgcaccgcctcccacatcactgcgtcagtacgcgatccacgcatcgcgccaggccgcgcccacgcccggccggtaggcctcggcattga

SEQ ID NO: 504071 - DNA, 147 bp, Stenotrophomonas maltophilia
atgcaggatcgcaagcccgctcgctggaccgccctcagaatcatcctgtggagcctcattgccgccttcgtgctgttcttcggcggctatcacctgggcaaggatctggccctgcgtgacaacgcccgccaggcagcgggcgggtaa

SEQ ID NO: 504072 - DNA, 960 bp, Stenotrophomonas maltophilia
atggggcaacggccgatggttgggggtactgccttttcgcgtcgcacgccgccggatacgctattgaatccggaatcacgcagggcgtgctctttgaattcccgaccccaaacaatccagatctttctcccacatggcgatccaactggcatccggattgccgagatcaccacgcgaacagtgcgagccgtggagattcctagaaagttgctgtcccgatttctggaaatgccggagtcaacgcaagtgggactttacttcctgtttggaagtgaggatgacgaaagttcgccttcaatgtacatcggccaaactggggcactcaaagatcgcctgtacacgcatcaaggtactcgtgattcctggaatcgggctgttgccgtactttccctaaccaatgctttcaccagtacccatgtcggctatctggaatggcattccattcaggaggcacggaaagccgcacgtttccggctagagaacgtcaatggagtatctcggccccatacgccgcctccgctggaagccgattgccaagagatacacgagacagcttccgtcttgctggctacattgggctacacaccattcaaaccactcgcagatagaagccaagcaacagaacttctctgcaaaggccctgatacggaagcgaagggactttacggcagcgaaggaatggttgtcctcaaaggatctgtggggcgtcgggaggtcgtcgcgtccttcggcgccgcttccagagcggttcgagagcagctgctcgccgagaaagtaatcatcgaagacggccgaaacatccgattcactcaggatcatcagttccgatctcccagcgccgcctctggttgtctgcttggacgaccatccaacggatgggacgactggaaatcggctgacgggcgatcattggacgaacttgagcgccgcgcttctttacagctggccaaagacaactga

SEQ ID NO: 504073 - DNA, 234 bp, Stenotrophomonas maltophilia
gtgtcgaccaaggtcgacatctaccgggccgttgccgtgtcgaccaaggtcgacacctaccgggtcgttgccgtgtcgaccaaggtcgacacctaccgggccgttgccgtgtcgaccaaggtcgacacctaccgggccgttgccgtgtcgaccaaggtcgacacccagcgggtagtcgccaacctgggttggcgctcttgccgcctcaccccgcgctgccgcccagtgccttga

SEQ ID NO: 504074 - DNA, 201 bp, Stenotrophomonas maltophilia
atgaagggttgggaccgggcgtgggacatcctgagcgaggttggtaagttcaccctggggatgtcggcgcctttttttgtgcccgggcgcagcctgcccgggcctggatggccggtcgaacaccttcccacccgtgaaattccccaacaggagctcccccatgtgttcgatcttcggaatcttcggcctgcaggccggtga

SEQ ID NO: 504075 - DNA, 549 bp, Stenotrophomonas maltophilia
atgcccgtctctgatcccctcgcgttcgacctgctgcgggcgttcgcgcagctggagtttcgactcaagaacgatccaggctttcttcgcgccggtccctaccgaatggcccaggtgaactggcctgcggtggatgaaacggtgtcacggctggacgattcactcttcttcgatcgggtgtcggacagcacgcgcgagcagattctctcacctccgcgtgaccgcccgatggtccaagaggtggtggtgctcaacggcctcaaccgcgccgtcttccagcgcctaccccttcagcaatccaatgcctgcgctctggtcgaagccgcacgccgcgtgcgcaacaacctcttccacgggggcaaggaggagccgcatttgggcgatgatgacgagtgggccgccgccgcactggacgtggccgagtgcccgcttcacctgctgaactatggcacgcttagatcgggggtaggcccgtgggggagatgggacgcccatgctttacctgaagaccgaatagcttgtcgccggcagacaccggccgaccggtaa

SEQ ID NO: 504076 - DNA, 339 bp, Stenotrophomonas maltophilia
atggacctagaagtgatcgaagcagtgctgctgaaatgggctcgccaagaacctatcatcgcgaagatccacttgttcgggagccggctaagaggcgatcatcgccccgacagcgacattgacatcgcggtggagcttgatctttcagcggcaccaggagtcgactttagcgatgggttcgcgaccttcagccgatactccgagcactgggaggccgaactagcgcaacgactgcccatcccggttgacttggagttctaccatggccccgaggaaaccccgatcctccatgcggggctcgaacggtcgggaaagctcatctacgaaaagtttcgttag

SEQ ID NO: 504077 - DNA, 792 bp, Stenotrophomonas maltophilia
atgagcggccgcgagtggagcgcctatcagctggtggattccgaacgggagctccgcgtctcggagcatcggttctacgttgagcaggccaagacccgccttctgtctcagttcgccaacattgaggcggaggccgatcaagcggaatccgagcactgggagcgcagcggtcagtccttcgaccctgactggcacgaccctggcgatctagcggacgctgcgcgcgatcacggcgtcgagttctaccagcttctaagtgagatgcatgatcgaacccgcctcagtgtggtggctggcatgtatcaccattgggacaagacatttcgacgcttcctcgttcgtgagtttaggtggcccaagttggtgatcggcgacaacacgcggcgcgctctttggaagctggatagcgcgaagctggagaggttgcttgaagccatcggcttggacctttctgctctcgcctgttacccacgcattgatgccatgcggttggtcgtcaatgtgttcaagcacggggaggggaagtcattggacgatctccagctgcgctacccggagttcttgcgagcaagttctcacggatggaacttgttcgacgacaccgacatggaggtgtcggatgttcacgtcgatgactttgctgcgtctattgaactgttctggcgtgaattgccggctaccgtaaagttcgacgaggcaaacctagatgttccagacgattttgcaaaggcctggaacaaagaccttgaggcgcagaaggtatctcgctttgtcaaacagcacgacatttaa

SEQ ID NO: 504078 - DNA, 1770 bp, Stenotrophomonas maltophilia
atggctgtctacatctcaagtttggatgttctgaattttagatcatgtgtttccacaagcttgcagctgaccagctttacaccgctggttgggttgaataattgcgggaagagcaattgtcttaccgcgctccaatggctcgtgcgtaaggcaaagcttggtgtggaagatttccacgagccgaccctgccggtgcaagtgatgggaacgctgcgtgggatcaccgaggctgatctggcggtcctggagcaaaagcaccgaaagaagattgaaggacacgttcgggacggggcgctgatggttcgtcgcgaacagcaggtgcctgggggcgacaccgaactgaccgtgatgaatcccgacacaggcgactgggagccgaaccctacgggcatcgataacgccatctcagcactctttccagatcctattcgcatcggagcaatggagaatgctgaggaggacgccagtaaggccaagacgacgaccacgatcggcaagctgctggcctcgatgcttgccgctatccaagagcagcacgaggaggccttgaccccgcacttggcagccatcctaggaatgatctctgcagaaggtggggatcgttttaaagagttgggtcgcatcgacgattcaatcaatcgtaagatttcggatctttttcctggtatccacatcaagctggatttcccagtgccggtcttcaatgacctcattaaggcgggaactgtcaaagtttacgaaggggaggggcgtggacgtgccttcgggtcatacggccatggcgcgcagcgcgccatccagatggccatggtccggcatctggcggatctcaagcgtggagcagcggctgcgggcggagtaacgctactgctggtggacgagccggaactcttcatgcacccctttgcagtggagcaggtgcgtgaagccttgcgtgcgttgtcagaggctggatatcaggtcgtgttctcaacccactctgctcagatgatcttggccaaggacgcgaagaacgctctgctaatgacgaaaaagcatccggagggaaccaaagcccgtccgcgcatgcaatccgtcgtagaacaattggtggacaatcccacgcatcaactccagcagctattcagcctgacaaattcgtctcagatattgtttgccgacaaagtcgtgctcacagaagggaagaccgaactccggctgttgccatccatcttccagttggtggcgggcaaaaccatggggcagtcatcgttggcaattgttgcgatgagtggggtctcggatactcgtaagtcaatggaagttttgtctgccctagggttgcctgcgtgtgccatcgtggacttggatttcgctttccgccaagcaacaaagcatggtttcctgcaggcggatgatcccgatgttgctgcgtgcaagaacgttctcgcgaggatggcaggcgcgggcgtcgtgactttagacggagcgttgccttgcaaggggattcaagggccggcttcgaaggcattcgagttgcttgcggccgatgaccaagcaaagccccacatcgctgctttaatacagaaaatgcgtgctcaaggcctttggttgtggggcgctggtgccattgagcctcaccttgggatttcggagaagtcggaacacgcctggctgtctctccaagtccgattggagagcgagccactggaagattgctgctcggacgcagatggcattcgatccttgatcgaatggctggatgccccgcctgcggttcagccggcatga

SEQ ID NO: 504079 - DNA, 483 bp, Stenotrophomonas maltophilia
atgcccgacatgatcgatcccagccttgctctaacgtcgttccaagaagcccttgctgcgggcggccttcggctggagcgaggccgcatcgatccaacgatctacctgcacgtggatcacctccaaggcaagccgcgattcacttacgtccatttggacgggaaaaccgtaacggcctttgccaatttcgttcccaatggaacctttgaaggccatgcaaacctagcggttggttacgcggtccccgagcgttatcgaaaccaggggcgcgccaaggccatccttgcagcgggcattacagagctccaaaacggctttcgcgggcatccgcccttctacatcgaagcggtggtgagcgtgaaaaaccccgcttcgcagaacgtagcccaggaggttctgggcggcgagcctgagccaatcgtggataaccattcggacgagcccgcccttcgatacgcaaaactgctcccaaccggcaagtag

SEQ ID NO: 504080 - DNA, 801 bp, Stenotrophomonas maltophilia
atgagcaccttctcagaacgccacaactacagctcaccagatccagaaataacaatacgcgaaggtgccccaaaagagcttcgagtccatgtcattcagggcgcgatgctgaacggcatgaacgaaatccatctacagcaaattgtgtgcgaaacccttggcgagcttcccaataattcggaagatgtgctcgtagaagtgagccaaatgctcgaatccgccgagtggttcgagatctacgacctgatcgaacgtattgcatccaagcttcccgagcgctccattgcgctcatgaagccaatcaagccacgcgacaatttctcttcctacatcaacaagatcttccggaagaacgggatcggctggcaactcttggggaaccgtattgaattccgcggttcagaggcatttgaagtagccatcagggacggaaccagcgagttgcgcagcgctggaaagaacacgacagccaatgaactccacgaggcattgcgcgatctgtctcgtcgccccaaccccgagctcaccggcgctatccaacacgggatggccgccttggaatgcttgtcgcgggacatcaccggttccaaagacaccttgggaaaactgctaggaagaaaccccaagctgcttccagcgccactcggagacgccacggaaatgatctacggctttgcctccaacaacggccgccacctaagagaaggcggcgatccgacattggaagaggcggaacttatcgttggactgtcaggcgttctgtgtcgctacctgggccgcaagcattctcaaagcaagtga

SEQ ID NO: 504081 - DNA, 252 bp, Stenotrophomonas maltophilia
atgagcgaaccactgctccatgttgacgaccagaacgatgcgaatgaacctcggctcgcagggctgcggacccaagtggcctcccagcagatagaactgtcacagcttcgaacgctgctggtgatcgctgcactgaggaagcgtcagcaggaacaggctgaaggcgattggcagaccttctgctggggcgttagcgtcggcgcccctctggggatggtggcgtttggggcgggctggtggttgggctcatga

SEQ ID NO: 504082 - DNA, 843 bp, Stenotrophomonas maltophilia
atgagtaaccagaccaaagcagccctccatatccttcagtggatgagcgatatggaaggcagggttgaggggtgcgatggcgcaatcaatgttgcgaaggcatgggaggaacgggaacttcaaaagaaggcgcaggcttacaaacggctggtgaaggccgtcaactgcattcctgccctctcgcctcgcgaacgcatgtccaaattcgtggcatacggtcttagggcggccgttcacaagcagctggaaaagcgcaaaaacggggtgggggtatcggtgttgccttggatggacgtgggcctgctcagcgacgtggatcttgaagacggggattggggggcagaggtggccgacgcctacatcgccgccatcgaaagcgctgagccgtttgagtgcatcctggggtgggtgttcaacgagttggcgggatcgggtcagaagagaagggattgccaggacttcaccccgtgggctcttgcacagggcgcgatgaggtttcttcccaggggtttgggcgatgggtgtcaggaaccgctgatcaacgatttcacctgcggtgctggaacgctgcttctggcccgtgtccacgcccttctttggagccaatccaacgatccggacgcgttgatggacctggtggtgtcggccaacgacagggatccgctctgcgctgcaatgaccgctctccagctgttgatcaatcagttggtctgggagcgccccatcggagccgttcacgtggaatgcaaagacgccatcgctcagcgtcacctgttggtgccggtgtttgtgtcggagtgtcgcgaggattgcccattcgaactcgtgcggggcgatgtgtaa

SEQ ID NO: 504083 - DNA, 252 bp, Stenotrophomonas maltophilia
atgttcggactgcacattgcccggacggggtgctctgagccgtttgagttcaacatggttcgcgtgtttctcggagcggcaggcctcgacgcattggagcagacggtcctcgatgagcggctgccccatacggagaccttcttcttcggtgaatcggatcccgatcaacctgaagaagatctggacttcatggcgcaggcccgcgcattgatcaacgacggttgggacgtgttccaccactcttggtggtaa

SEQ ID NO: 504084 - DNA, 732 bp, Stenotrophomonas maltophilia
atggccctcagtgctgcggacgcctaccgccgtgcggtcgagcggtttcttggaaagctcacggggacgcagacggtgggaggtatggagagggccgtcaaagaacagcgtcgccacgggctgaggcgtcccatcttggatcttgaactgactttcaacgaagccgccggtgttctcgccatcagcactggccagttggagacactgctccaacagcaccctcccaagggtcatctgttcgaggtcaaagggactcgcaagagggccactaccctatccaggttaatggactgggccgactggctaaggggggagggctactggaagccgctgacggaacgcggaaccagtcccgataccttgctcacagctaagttgcccttcttgctggtcaagtcgtccggagcgcagcgagtgattgtggagcctctgtccggcaaagacatctccgatgcgctccttcaacagatacaggagcttggacgtgcgaacaactgtaaagtcatcttcaggacgtttgcagatgcctttgccatgccttggctgaggcctgacatcaaacgcgcctgggctgacacgttcttcaagatggcaaaagcacaggcggcttacttccgcgatttagcgcaacggttggaaaccacccgcgctcaggttagtaggcaagtattggacgagcacctgcagtcagcgcctcaaaagacgccccatcagggcgctaggcgcctctaa

SEQ ID NO: 504085 - DNA, 1125 bp, Stenotrophomonas maltophilia
gtgcccctgcccgcttcccgtcgacgcttcctgcaactggccggtgccggcctcgccgtcgccggcagcgggctgccgcgactcggccatgcccaaccgtcgactgccgccgcccccgcccccgccgagggcgcggtactgctgaacttcaacgaatgcccctacggcccctcggccgcagcccagcaggcggcacgcgacagcatcgccggttgcggccgctaccgtttcgcactggccggtcaggtgcgcgacgccttcatcgaacaggcccgcattccggctgatcacgtgcggctctatccgggctccagcgaaccgctgaaccgggccgccgtgctgtggacaagcccgcaggcgggactggtagtcgccgatccgaccttcgagacgctgggcgaggtcgcggccgcacacggtgcgcacgtgcagaaagtgccattgcgcgacgacggcgcacatgacctgcgcgcgatggtcgccgccgcacacgcgcgcccgaccgggctgctgtatgtgtgcaacccgaacaacccgaccggctcgatcagcccgccggatgagctcgcctggctgctggcccacaagcctgcgtccacccgcgtactggtcgacgaggcctacctgcagtacagcgagcagccgagcctgatcgcgcaggtggcgcagcgcgatgacctgatcgtgttgcgcacgttctccaaactgtatggcatggccggcctgcgcctgggcgtggcggccgcgcatcccgaccgcctgcgcgaactggccagcctgggcgacaacccgctacccgtgccagcactggccgcagcactggccagcctgcaggatcctcagttgatcgcgcagcggcgcctgcagaatgccaaggtgcggcaggccaccgtcgcgtggctgggcaagcgtggtttcagctgcgtgccgtcggaagcgaactgcttcgtggtggatgtgcagcgcgacggtgccgcctttgccaaggcgatggcagacaacggcgtgatcatcggccgcagctggccgatctggccgcagcgcgtgcgcgtgaccgtcggcaccgaggacgagatggccgcgttccgcggggcatttgccaaggtcgccggcgtaccggcctaa

SEQ ID NO: 504086 - DNA, 780 bp, Stenotrophomonas maltophilia
atgagtataacggcgcgaatgttccacgggcgggatgaccggctcggagcgcgcttgaaatgggtccagatgtcgctttgcgcctggggcgacggatttccaagccaccgatcaaatcgcaagtcattgatatttattgattgttggaccgattcacagccctgcacatcagaagccgtgcaggatggggggatgcatcgaccgcttttatttacccccgccgacgacgcgatgaccgctcccgtgctcggcgggaccgcttggctggatgcccttaccccttggccaaccagcatccatggacacgcactgcttcacctggccagttttccagccgcattcattcgaagccacgtcgccggactgtacatcgcgcctgggctgagcatttcggtcttcacgccttacgtcacctcgggcgaggatagattcgaagaagccatgagccatggtggccgcgtaattgctcactggccctggcatgaaccgacggtctccccctgtgtgccaattggaccacgccgcatttgcgccgggacggcaatggatgagcgcggagcacttcagggaacttcgcaaattggaggacggccttgctggcagcaggatgacgaatcagagggccaggcattcatccttcagttcgatgaattcgatcttgatagggcagcaccgacgcatcgaggaatcctggtcggcggaatgggttatctgttgcttgatcgcaacattccctcaccttcgatggactgcggtcgattcgtcatccagaccacttga

SEQ ID NO: 504087 - DNA, 399 bp, Stenotrophomonas maltophilia
atgaaccacacgatgctcatcacaaacgacaccatcaccgtcaaggaagctcacgaagctgcgcatgccgctgccagcactttgtttgaccagttgtctgggtatacctattcgaccggcgcggcgggctatcccgcgttccagtcttccgctgaagacgcattgctggctttcctgctgaaccgcaattgggcagagctgggacgcgaagacgacgagctgctggctgagcaaaccgtctctgtcaatgtgcagcgtcaagaggacggggagctcctctatgaagtggggctcgacatcgaagggtcggattacggcaccaattgcaaggtcaaagacctggcgacgctgaacgaatggttcgatgaagaatggatcgacgtggagtgcgcggagtga

SEQ ID NO: 504088 - DNA, 360 bp, Stenotrophomonas maltophilia
atgacacggatcccacacatcgaaggcgcgtccatcaacgacatcatggccaacgaagactggcagctgggcgcaagcctggacgcgcttgatgacccgctgcacggcagctacggcgcgctcgccggtcatgccgccaccacgatggtgtggcgtgacatcgcccacggccgcgaggcactgggccgcgagaccacgcgcgcctggctgcggtccaaactcgatcaggacggcaggttcaacggtccggtcatccagcctcagttgacggcactgtcgattggccagggacaggcctacttcgagatcgtcatggagatcttcggcagccatccgcagatcaccctggtgccaggctga

SEQ ID NO: 504089 - DNA, 3345 bp, Stenotrophomonas maltophilia
gtggctggacattccactcatttgcaggaccatcacgcgattgagcagcagacgctgaggcacagcccattgctcgcaaagctgcaggaggccgggcgattcaatattcacgcccaagagaaccggctattcctccccgcaaaccctgcctatgcagatgcgatgggcattacgcctcacagtggcggaccgttgggtgaataccagaacggaatgattcggcgcttgaacgagattcagagaacgcgagacggtaaggccgcgctgctgaatgactctgacgccctcgatagagtcatggcacgtgtagaagcattgcgagacaccgtcaaggtcgggttgatcaacggcgatctcaacacgaatactccgctgggaagcacgcctgcgatcacgaacaaacgaatccgggatttttttgacggagttcctgagtaccaccaaaggcatatcgctcagatccaagccttgaaaggtttcaccggggtcgaccttggctgggtggctgtcactcattccgaaagtggtattgtgactacgctcaatagaatcgagtatgacgccaagccactgactcgcggtggaaacattgagttgcagcgaagcggcctgtcgcttgccatttccaatgcccaccacggtggccgagttgttctgacagagccgggtatccagacggtcgagcgcgtgctcggcgaggaggccgggcatcgcattcgcagcccgcgctcgcagcaaggcggtgcgacattggacctcctcctcggcgaagcctccaccagccaactgatccgctccggtggcctgcttgcctccggcgccgatgccgtcatcaccgcccgccgcacctcacagctgctggaagaaggcaacggcaccgccgcccagtccgagctcacccacgctctggcgcgcaacggcggtggctgggtcggtggtatggctaccgcgtcggtgatcggcacgtccagcttcgtccctgcggctatcgtcgcgggcgatgcgctgctgatgagcaaggcattcgacaagggcgccgatctgctcgacaaccgcgccgtctaccggcagaccgacaaggccgatgtcacatggcagttcgatggccgcaactggcagcgccaagcggtcatggacagcgcgggcgacggcctgggcaatccggctgagcgcagtgtgggcgccagttacgagaaggcccgcgagctgggcgcatacgcccacgtaaaggcggtagagctggcgctgggcaaggcaatgccgccgcaggatcctttcagcatcccggcgaaggacggcgagggccgtctggacaatcccaactggtaccgcgatgcacagactgaacagtggacgcggcaggtcaagattggcgtgtccggtgccaacgaccggggtgtgtatgagacgcagaccgccagccctgagcgcgccaacgagttgaatcgcgaggcggtgcaacgcatcgagaacaacatcgccaacggcaaggccgccattgccgccagctatctggagacccgagctgctacacgggcaagtgacttcgtgccgctggtgccggaagcggtagagcaggcccgtgccaagcccgacgccatccagggctccgacagccatctttatcagcgcgatgaagcaggacaatggagccatgctggccagaacgcacaggggaacatggcgctggagctggagctgacccgcaccatccagcagccgtcgctcgatcagttcaaccagaccattgccgcattggaatcgcggccgctgccgtcggcggcggaagtgaaccagaacgagctccgccacagctactacgctgcgggtgttgcgctgaccccggcgtgggagcaggccattgccttggccacggcgcgcacgcgcgagcagcacggcattacgggtcccacgctgcaggaactggggcctgtagccgagggcaacgcgggcgcgtcccggcccatcacccattaccaagtgggtcaggatggcgtggcgcgtgccgtcgcgaccaccagcacgcaggagttgcaggccgcatggaatgaggtgcgcgcgcgtgccaatgagcaggcgccgttgccggactcgcccgagctgcgcattgctgcactgtcggcgggtgagcaggaggcgtaccggcaggcactgcaggaagccaatcggctgggtgctgcgcaggtagatgcaggacaggctgcacgagcagccgcgcaggtggcacatggcgacaagccatctgagcaggatggaaacgtggaagcgcgggctgaagagccggcgactgcgcagcccgtcgcgcctgtaacggttgcggcagcgccgcccgcggtagcggtcacgccaccgcctacgcccgccccccaggacaagcccgcgcctcagcgacacgccgagcagcgcgatccgccgggacgcgaggcggagcctcaacctcagccccatccaaacaacgaggcgcctaccgaaaaccgtaccgcctcacagacgccggagcccgctgggccgatgcaggcgcacccggccgcacctgagcgcgcgacgccacacgctgacacgcctctggcagcggcaacgcagaccatgcccacgcagcgcacagagcaggcatcggagccggagaagatggccccggtgcctgcggttgctcccactccaaagcaggacatggcagttcaggaggtggaaccggtgcccttcaaggagccgctgcctgctgagcctgcgcgcgatccatggcctttggagcaggaagcggcacatcacgtgccagagcccaaaccggctccgttggatgacctccagcccgtcactgcggctttcactgttcctaccgagcccacgacagcgccaggccctgaaccggccgcgcccgcaccggatgagccatcgggcccgcaccgggcgctgcaggaccccacgcagcccggccaccccgatcacgcgctgtatcagcagatccgcgagggtgtggaagcgctggacgccaagcacggtcgcagcttcgatgaagtcagcgagcggatgacggccagccttctggtactggccaaggacaacgacctggaacgggtggaccatgtgctggtgagcaacgctacgcgcgaacacccggccgggcacacgctgttcgtggtgcagggtgagcccagcaatccggcccatcagcgcgctgcgatgccgaccgagctggcggcgcagacatcggtggaggaatcactgcagcagttcgactccgtcagccgcgaagcgcatcagcgtgcgcttgccaatcagatggaccagcagctggaagaccagcgggtgcagcacgagatacagattcgtgcggcgaacatgtga

SEQ ID NO: 504090 - DNA, 903 bp, Stenotrophomonas maltophilia
atggcgtactggtgggtgaaccagaagcagacgtttgatcgggctgttaaggcaggctacttgtggtcgccgaagaccaatgtagaagggaagacgaatcccttctatgagcacatgactcaggtgcgtccgggtgatgtggtctttgcatttgccaacactcgaatcaaggctgtcgcaatcgtcaatggcgcgcactatgcgaaagatcgccctgatgacttcaagaagacggacaacgagtggcgcagggacggctgggccgttccggttgactatcacctggtggaatcgccgctaaaggtgagcgagcatatggcgaagattcggccgcgtcttccgatgaagtactcgccgctgaagccggatggcaaggctaaccaggcctacctgttcccagtgccgccggaaatggctactgagcttttgtcgctgctcaacgttgacgttgatgacctgagcgcttggcaagacgaggtgcgagtcaaggagatcaaggaagacaaaaatattggcgagacagtgaaggcccagctgatcaatgccagagtgggacagggaatctaccgtaagaacgtgagcgacatcgaaaaggtctgccgcgttaccggcacgagtgagcccaagtttctcgtcgctagccacattaagccctgggcgaagagcaccaactctgagcgccttgatggaagcaatgggctgatgttggcgccccatatcgatcggctattcgaccgtggatacatctcttttgaagatgacggccggctaattctgagcaagcagttgccggaggcagtgcgcttgaggtgggatgtggtgcagaagattccgagcgttccgttctcggcggcgcaggtctcgtacctgaattaccatcgggccgtactgctgcgtaagtag

SEQ ID NO: 504091 - DNA, 1389 bp, Stenotrophomonas maltophilia
gtggataagacggagttgcaagaaacctacgcggtttttaatgctagtggggatggtattgaatctttgctgtgggggaatgagcacgaattcgtttgtgagagagtgcttaatattccgagtgatccgctatccaaggtgcagctgaaccagttgcttggatacaaacgagagatggcggtctcagatgagttcttcaagttctactggtgcaatggggggcgttctccatacgtagtatctaacgttcccaattatagcgagtcgtatgccgctcatgatgatattaggagcgtggagcagctttttcatgggctatatagaatattcatggatggcctgcttctttgcggtaacgtgcgggcgtactttcgaagcagctgttcacttggattggaggcgattgaggcgagattgaagcctttgttcttcgatacgaatgccattaaagcgcgcgggcccgcgctcgaaatgcgcggaatctccaaggacgatagatacttgatatcggagatggcatgtaaatcatatggtgacatgccggagaatggggagcttctgaattacatgcgtgaggcgtggggagcccatgcgaaacggagcggtggttcgatttccatcacccaacttcttggtgacgagaaggagccaaggcagcagatgtttattttttcggctgacgatatattaagtcatgacgtcagctcggaagacgagcttgttgagaactataataaagttgccgcgaaattcaagaaagctagagaggcggctcttcagaatacaaagcactatctttcgcttgttaatgatctggatgtctatgttgccacgagtatgcggactaggcaggactttaggcagatggcggaaaagtgtgaatcgatattcggtgatcaagcagtcgcggatctgcatcttcgatatttcgatcccaccatgagtgcggctgagggccatcaagacaagggcttgattgaatgtcttatggttagatgttctaaggtgttaatatactgtgcgggtgaaaaggaaagttacggtaaggatgctgaggctgcaatggcccttagtcttggaaagaatgttatctttctctgtgataacgagacgaggaataacttttacaaggaggttcatcctctttcaaggctaataaatttctcaaccggtgttgcagttggtacgatcgttactacatcagttactgacgttgctttgcttttggatagaatattcgagaatgagatgaaatacgagctgcgccagcacgagtcccgtaagggatatctccagctcgtagagtctcaaactgagtctattataagaattcagacggacgataaaatgctgtcggaagcattttggaatcactataagaggctttag

SEQ ID NO: 504092 - DNA, 837 bp, Stenotrophomonas maltophilia
atgatgacccggctcgccattgcggcttccctcgcgattgtccccatatcctccccagcacaagggcttcttaccgtcaccggacagtgggagtaccacgacgcatcccgtatggaaacggacgaaggactcaacatctgctttcagttggatgccgcctcggtggcgcggaatccgcagttgcagcagttgggaggtgccttgtgcctgtcaaacccctcggaagcggccaagcttcttggggtcgtaccgaccgcgcagaagtcaggatgcaaatacatagcaaagggaacggccagcgttgtgctagccaatgtgaagttgctgcccgaagatgagatgtatgacgagcgcattgaggcccgtctcatgcaggtacgggtgaatcgagtgaccttcccacttggcagtgactgtgaccgccgtgccgatgcatcgaaagggttcacctcaatccacgatgccatcgctgcactgaggactcatccaagctatgcagggacatcatcatcggacttcgtgcgcatagatgctagcaacgggttcgccgaactcgatgcaagcactcagatgtggctaccgcctggctcctcgaacacgctggtgacccactacgaaggcaactcaggcttgcatgagttgaacgtctatcggtatgaggatggcaagtggcgcaacgtgagcagagatgtcctgcctggctattccgagaacgccagccagttcaaggggacgaacttctatttggacaaccgaggcggtaagcctgtggtgaggagtctgccaggaaaaaaggcttggcgcttctctgatggcaggttcgtactggagggttga

SEQ ID NO: 504093 - DNA, 240 bp, Stenotrophomonas maltophilia
atggagtgcgtaggtttcgacggtcagaaacgcatggtcggtagacccaagaatgtgcacgcaatgatgggcgttaccttgatgccaggagaagagcgagttgccaccatcttctatgagaagggggtcaccagcttggtgtgcgtagacgtgaaggacagcatcccaacgttcaatcgggtggaagagctgattgccgacccgaaggccaaggacatcacctcagttcttgctctgtag

SEQ ID NO: 504094 - DNA, 567 bp, Stenotrophomonas maltophilia
atggaagtgattggctatgcacgtgtcagttcagcgggccaatcgctcgacgttcaattggacaagctgagcaaggctgggtgtagcaaggtgtaccaggagaagcgctctggtcgccaggccgagaaccgccctgagttgcaggcagccctggaatatctgcgcgatggggacgtgctggtcgtatgccgcctggaccgcatggcccggtcagtactggaccttgcaaagattgccgaccgtctgagacagaagggtgtcagcctacgagtgctcgaccagggtttggatacgaccacgtcagaaggcaagctcatgttcaaccttcttggagcctttgcagagttcgaggccgacatccgagctgagcgccaacgagacggcatcgcgctcgctcagcagaagggcacccagttcggccgcaagaaggcgctcacgagtgcacaggaagagcgcattcgtaggctgcgggtggaagaaggattcagtattgagcaactggctgagcgcttctccatcagccgtagcagcgtgtaccgtgccctacagaccggtactacggcttaa

SEQ ID NO: 504095 - DNA, 2202 bp, Stenotrophomonas maltophilia
atgttgctcaaggtagaggagcttaagacgctatgcatcgctcgggccgcaaggcaatcgattcgtactcggaacttgttgagaaggcatcgagcagcattgaccctagcgggcttggctgggctctttgtcttgacgctatggggaacttccgccaaccaagagacgcttcaggcccacctgtcatcgaaggagggctttcaggctctaactaatgttctcctgggcataggctccgcgatggtgggcgcgaccgctatcgtgtttacccttgtgctgttcgcgacgcagacgaatgtagcccggatgccaacggagctgtttcgtatgtttagctccgacaggaggctgctgggggccttttttggcacgctgataggctccattctcatcgcaatgacgaccatcgttatcagcccggaaacggcaacttggtacttgtttgggtcgctttggaccattgcactcattctgctgacgttcgtactggcttatcagagggcactaagcctcgtaaatcccactgtccaatccaaactcgctgcctccaaggcgaatcgcagtctgaagcgatgggggtttctcgctgacagcctgactgcttcggccaagaggcagggcgcggaaggatttgacgccgagcgcttcgctttctttgcaaaaaattcaggttgggagaggggcgcccaagaaattgtggggcatatgaccaactatggagcgaggttggcagagcaaggcgaccacgattcgttcaaggccatgttgacggcggcaattagcgttcacaaattctatgtggccgtcaaaggaaaaaccttccttccgggaaacccgttctttgaagtcgtgccgagccgtgatggctttcagatttccatgctggagaatctacggcgtgcaggagtttcggctctatcaaggaaggatgaaaggcaggtaattctcgtttttcaagcattgcatgacgtgttcaatgtctacatgaagattcagtacgacgtggagcgagcaaccaagacacacgccgctatggctgccggctatttgcgtgctcaagttctggattcgctttctcacggtatgcccgacgcgacaatggagggcgttcgtcagttaggtagcgcagcacgtcattgcctgagctacggtcttaccgaagatgcttcgtctttgataaaggcgttgggtcagttggcagcggcaggcatcgctggtaagcagttgctacccgttactaacacagcggtcgaacagctacgagacaacctccttgttggtgtggtgagccgtcatggcacagagttcacaattgaagacatacatcatcaggccatttccgcagccatgttaatcatggcgggggtcaaagagtcttctccaatcgagagtattcatcgaggctacctgtcgccgtacttctcaacttcagaccatacttcactcttgccgcagctagctcaaacgttgagcttagcttcgcagaatcacccccaggtggggccgcattcggtcaagaacttcgtgaactgggttgaccgcatcagacacccgacgaaggaattgatgctatctgctttcaaagtgaagtcttctttggtcttcgacctgctcaattggccagtagagttggctaagctccttctaaggctcgcctctgatgcggctcatggagaaattgccacaagcctgttggaccaagcggacggggttgttgcaatgcttacgtgggttcccgctgaccaagatggggcgcatcaggcgaacgccgcaggctatttggagttgttgatgacgcttgccattgaagctagaagggcaaaagcgaacggcgcctatctaactgccacgaggcaattgctgcgttggtctattgccaggtcagaagctcccaccggatgggccgaactggaaatcgctgtggtcggtttggttggccttgagctagcagtcggtgagaaggatattgatgcccttgtaactcgcgtcaaagaggctgtgattcaggcgcagcttgtgtcgccggaggttctgcatcgggctgcgcaaggcctggcccgagaggctggcgtgtaccgagacgatgtcatggcaatgcgagtctcggaacaactgttggcagcagttgcgcaggctgatgcaatgcatgggttgaggacgcttgctgcaaccttggaagagctgagtcagaggcctggctga

SEQ ID NO: 504096 - DNA, 603 bp, Stenotrophomonas maltophilia
ttgaacctagaacaacgcataagacttgagcgcggctatctgcaatacctgggagagcacgaaccagagtacttcgtaacattgacctatcggtacccatatggtgaccgggttgcagagatgggaatgaatgggttcgtcctcaaactcctcaacaggctacccaagcgagcaaggccacacttttctggactcgtctgtgcagagcgtcatatcgatgtcaagttcgaaggctgctaccacttccatttcctgttctggggcctcgacgaatcgttgcaggacgcctacgcttggcttcaaaccaacgtgattcgtgctgcatctgccttgcaccctagacttgctggcccgcgatgcgattgtgccgaggcaaaaaggcaaaaacgaccaaagacatgcaagggtggcttgagctgtcgaggaccacagatgtcaggaccggagtgcgttgcggtcaagcgtatcgattacaccccagaactcgtctacgaatataccgttgaagacgtgctaagactggacatgcctgctggcggtcaattgcttgatatcagtccatccggcgtaaaaggaagcctccttggtatcggcctgctgtga

SEQ ID NO: 504097 - DNA, 1230 bp, Stenotrophomonas maltophilia
atgagcaagaatcgctatctgcaacgcctcggacactcttggtacgtccgtatcaaggttccaaccgcgctacgcggaatcgtaaaaggcacacacatccggcgtgcgctgaacacacgcgacctggatgaggcaaaccgcaggaagtgggcggtcatctctcaggtgcatgagcacttccaagcgcaagccagtaatccgaaccttggtctggctcttgtcgtatctcgctctaaagctatcgagcaaggtgcgaccttctctctcgcagaagccaaccgggagagtctccgcccctcagccggcctggatgcgctttcagaggaatgggccgcaactagcaacctcaagactgttcggtttcaacgacagcaggcttacaaagagttgcgctgctacttggggagcaaccgcagccctacggctgtcacgggcgccttggcagcctcgtatgtcgatgaaatcctacttgagtccaaggacagccccagcactcgtagacgcaagctcagtgccctagcgtcattctgggaatggatgagcagtcgatgctatctgcccaagggaacaaatccctggaagggcttccgcatccgtgcggagggtgcatcaagcacgcccaagaagcgtccgtacacaatgccagagctggtccaactgttctctggagagcccagctacccagcacttcgggaggtgatggtgctcggcctgtataccggcgcccgaattgatgaaatctgctcaatcaaacgcggggatgttcgcgtggaagatggcttcgtatacatccatatctgcaagagcaagacagccgccggtacacgcacgctggcaatctggcatcccattcccaagggactgctgatgcgacgcctcaagcaaaaagaagcaaagacagcccagctatttcctgaactgaaggggggaggctatgacaacaagctctcttggcgtgtgggtcaagctttccgctatcacagaaacggacgcggactaaccggggcaaccgatttccactcgctacgcaggacgttcatcactcgcctggagaacctcggcgtagaccaggtccgcattgcgaggtacgtcggacactccctacctactctcgccttccagctctacagtggtggcgctaccgaagccacccaggccgcgacggcccagatgattgagtacccgccggatgtcgaatctgctgctgcccttttcattgaagacacgtaa

SEQ ID NO: 504098 - DNA, 747 bp, Stenotrophomonas maltophilia
atgcctgacgtcaaactctcccagctcgccgccgccagtgcggcctcggtcgcggccggggccgccctatggacgatggcgggccacatccttggcctcaacatggagtacgtcggtccgaagtcgttccgagtttccagcggcagcgcctggattccctcgctgcagcaggctatcgaggttccgactgcgctgaccctcagcggcctgacgcttgcggccaacacgtggtaccacgtctatctgttcctcaatggcacgacgccggcgatcgaggctgttactgacgccccggctgctccttacagcgggaccgcccgcgccaagaccggcgcctcctcacgccgctaccttggcagcttcaaaaccgacgcgtcctccaacatcatccagttccaggtcggtacgaacgactcttttgagtatcgaattcccgcgaacacgcagcccctgcgctgcctgagcaacggcaccgccaccacccgaaccacggtgtctctggcagccgcagtgcctcccacggccactgctgccagcctgatcctcaccaatacgatgtcgagcggcttcggtctcctctccgtgccaggcgtagcagccgagcttttcggcgtgccgaccgcaggcggtgtaggtcagttcttcgaccttgtgctgtcgcccagccagacaatggactaccgaatcagtagcgctgattccaatgggctctacatcgacgtccgtgctttccgtatcgctcgttag

SEQ ID NO: 504099 - DNA, 2265 bp, Stenotrophomonas maltophilia
gtgggtagtggcaagaagcagaccgtcggctaccgctactacatgggcatctactttggcgagtgcctcgggccggtcgacgccttgcgggagatccgcgtcggcgatcggatggtgtgggacggtaacgtgcagaccgcctggaccaaagtgttcggcatcaacgtgccgctcacggtgccggccacggggccgattacctcctcgcgaaccatcacgattcttgcccccgaagtgtttggcggcgacaagggtgaaggcgggatcgtcggcaaactggaggtgcgcatgggcgaacctacacagatgcccagcgcctacctgcagtcgctggtgcctgggccgtggccggcggctcgggggctgttcacaagtgtgttcaatggccaagtgtcggccatgaacccctacatcaagaactggaccaagaaggtttcgcgctggcgcgctggctggaagaagggcctatggcagggcggcctggtgcagatcgatgaaggtatgaacccggcccacatcatctaccaggtccgcactgagggtatggggcacccaatcgaggtgattgacgaagccagcttccttgccgccgcgcaggtgctcaaggatgagggtcttggcttgtgcctgaagtggtccaggtcggtgcccgccggtgagttcatggacatggtgtgcgaccacatcggcggcatgcgcattgaagatccggtgacgggtctgaccaagctggtgctggtgcggccggactatgacccggccactctggcagagatcggtcctggccagatcatcgagatgatggagtggcagcagccgatgctggagaacagcgtcaacgagatcacagtggtctatcgcgatatcgccaccaacaaggatgctgcggtcacctatcagaatctcgccagcgtgcaggcccagggccgtgtggtcagcagccgcaagaactatccaggcctgtggaatgccacgctcgccggccgcgtcgcggcgcgcgaggtggcggcggtaagcagcctgccctgcagggtgaagatccgggtgcggcgcgatgctggccccttcgaacgtggtcaggtgcgtgcgctgtcgtggccacggcgtggcgtggcccgcatgccagtgcgcattctggacgtcgacgaaggcacgcagaccgaaacggccgtggtgctgaccgttggccaggacgttgccggcatggcggctgccagttacatccagccctctgatagcgcctgggtcgagccggataccaaacccaaaccggtcacggtgcaacgcctgcaggaggcgagctatcgtgacctggccaccacgctcggtgcgccggatcttgctgccttgtcgccagacgtcggctacctgacctcgatcggcgtgcggccgtcctcggtggcgttcggctacaccctgcagacccgcctgggcaacgctgcattcgccgaagccggtacggccgacttcgcccccaccggcctgctcacgaccgcaatgcctgccaagagcgagccgactgcgatctcgctggccgctggagtcagcctggacgccgttgaggtcggcagcgaagcgttgatcgatgacgagctggtccgggtggtgtcgatagatccggtggccgcgacgctgaccgtggcccgtgggtgcgtcgacaccgtgccagtgcagcatgcggtgggctcgcgggtgttgttcaccgatgaatacgtcggtttcgatggtcgcgagtacctggccaacgaggcgcccaaggccaagctgatcacccgcaccagccagggtgaactgaacccggacctggccacggcgatcgcattgacgatgcgccggcgccacgtccgcccgtacccgccgggccgtttgcgcatcaatggcgacgcgtacccggccgaggcctggggcactggcggtaccgtggtggccacctgggcacaccgcgatcgcctcctgcaggccgaccagctggtcgactccgaacagtccagcatcggcccagagccaggcactacatacaccgcccgctggtacctgcagaacaccctggtgcgtgagcaggctggcatcacgaccacgaccgacagctatctgccgccggtcggcagcggcggcaagacgctgcgcgtggaaatcgaggcggtccgagccggtttcaccagctggcagcgcctgcaacacaccttcctataccgcgcacagcttgtgaccgaggcgggcgaccgcatcgtcacggaagccggcgacccgatcatcctggagtaa

SEQ ID NO: 504100 - DNA, 783 bp, Stenotrophomonas maltophilia
gtgagcctgttttcccgccatgtggagctgtacgagttcggccgcggatctcagcgctggcgctacacctccagcgatagcgcagaattctacgactcgcagcagttcagccccgtggccatcaagcgcggccgcctggggcagtcggcgcaggaggcccggtcgaatctggagttgacggtaccgctgtcgctgcccctggcatcggtgcttcgcccgttcgcaccgactgaacggatcacggtgcgttggcgcagggtgcgcaagagcgatggcgtcatccgcgacacgtggaatggcgtgttgagcgacttcaacgaacgtcagaacgaccttgtgctgacctgccagagcaacatcggcgcagctgccaccaatggcctgcgccgctgctggcaaggcccgtgcccctttgcgctgttcgacgaagactgcggactcaatgcagaggctttccggatcgatggcgtgttgtcggccgcatccacgcagacggtcacttccaatgcctttgctaccaagccggatggctggttcgtgggcggcttcatcaagtggaaaaggggcaccgccactgagtaccgctttgtcgtcggtcatgtaggtccggtactgaccctgctgaccgctgcgccgcttgctgccggtgaacttgtttcggcctatcccggttgcggccacgcgctatcggtgtgccacgaaaagttcaacaactcgctcaacttcggcggccaacacacgatcccgaagaaaaaccccttcggccctgaccccatcttctga

SEQ ID NO: 504101 - DNA, 1701 bp, Stenotrophomonas maltophilia
atggcgcttctcctttccacctcgatcagcgcggggccgaactggcgaagccggaacctggacatcgcacgcacgcggattccagtgccatttcgtggcgcgcttgccagcgctcgcgtgctggcgggcccggcacgtgaggccaccattgtcgaacccgaacagcgctcggccggtcccgcgctgcgcacctccttcgatgactggtaccaccgaatccacatcctgccgctgcgcattgacctcggtaatctggtgaccaaccaggtgcgatttgtgcaggtctggaacgcctatctgcagcctcagaccttggcctcggtggtgctggagaatggcgagggtgtcgaactggtggggccaggcacgccgccgctgacgttcgcgccgctgcagctgcgcaggtggcagctgtcgatcactaccgaggggccgcccgtcatcgcggccacgctgtcctacgacttcgtggccctgggcagccgcacagtcacaatcaccggcaatcgcatgtcggcgtggatgttgccgccagattggtcccggccggtgtcggagactctggcgtgggcaaccgacgttcagcaggccgccagcggtggcgaggcgcgcttcccccttcgcggctccccgcgacgctcctgggaattcagcgtcctggccgatcgccgcgagcgtcaagtgctggagcacgcgttgttcgactggtcggcacgtacctgggcgctgcccatctggaatgacgtgtcctggctgcagtcgcgcctggcactgggcgtgcagtccattccggtaccggccgccacccagcgagactatcggcagggcggcctggcgatgctctggcgggacgtcaccacctatgaactggtcgaggtcgctggcattgccagcaacgccctgcagctggctcgacctactgccaacgcctgggcgccaggcacgcgggtgttgccctgcaggacagcgcgccttgcagaaacacccagcctggagcgcctgaccgaccaggctgtgcgctccaccgttcgcctgacggccgtagaaacttgcgactggccttctgtcgcgccggcggtcacctatcgcggtcgaccggtacttgagcaacggcctgacctggaccaatcgccgaccgctgaattcggccggcagttggtcgtgattgatggggacatcggtccgatcgcgatcgatgacttcacgggcaaggcctggccggtgcagacccatgcttggcagacgtggggccgcgccgagcaggtcaacctgcgcagcctgctgtactggctgcaggggcgcgcggccgcactgtgggtaccgtcctgggccgatgatctggagctgatcgagcccgccttggccacctccggtggcatcgtggtggcttgggcaggcgtgtcgcgcttcgggcgcgctcagcccggccgccgccatctgcgcatcgagctgttcaatggccaggttctctaccgccagctggtccaggccaccgaacttgatccgcagcgcgagtttctgcagttggacgtgccccacggtatcgccctgcagcctgcagccattcgcctgatcagttggatgatgctggcccgcctcagctccgacaccgtcgagctgtcccatgaaaccgacggcgaagggctggctcgctgcaaggtgtcctttgccggcatcggtgccgaggaaggtgaatcgtga

SEQ ID NO: 504102 - DNA, 975 bp, Stenotrophomonas maltophilia
atggcctacgccgaattcagcaacgtccccaatgtgcagaccctgatcgaccttgtagtgcaatttgcgcaggccaatggctggaccgttgaacgcaacaatgtgaccggggcaaatcgtactgccaccgttcgcatccctggcgtgtccgactacgttcacctgttcaacaccgatcagctcagcctgcagtcgcgcctgtccgtcgggtacaacggcgcgctcgatcctgcgtcgcagcctctgccgtctccacgtggcgtgtcgaccctcgggctggtcggtccgttcccgcgtgtgaagctgttcgccaatggcaccgcgatccacgtcgccatcgcccaggccaccgccggcgagtatcggcatcatgcatttggggttcttgccaaggctggagcctacgaaggtggtacatatgtcgatggcacatactggccactgaacaccagctccagtggtgtgatcggtaccaacgccccaacggtggtgctgtttggatacaccaccgggttgggttgcggacaggtgcgggccgactctatcgaggacgggcgtagcaatagctaccacatgatctgcaacaactatgctgggtcacttggcacggagggtcaggctggcagtggcgttggcccgagctaccaggggtcatacaacgacataacgattgatcacctctggctaggccgagcgttaggcaacgccgatgagaacaccttttccggtcgcagcatctttcacccgatccagttgtgggtcaggcgagctggaaccacccccaacctgtcgccgatcggcgaggtgatcgggctgcgggcctgctacctggaaaaattggaacccgagcaggagatcgcgatcggtgctgagacttgggttgtgttcccgtgggtacgcaagctaacgatggccagcggttcgaaccagcctccggcaagcaacgcctatggctgggcagtccggaagtcctga

SEQ ID NO: 504103 - DNA, 975 bp, Stenotrophomonas maltophilia
atggcctgggcaacggacaccgccgccaacatcaccgacctcatggcccgcctgcgggacttcctgaccaccaatgccgccctggtggcggcgaaccagcaatggcaggtggtgggtggcgtggccagcggtccgatcgcggccaacgattttgtgtcactgaagggccgaggtctggcgggcgaggatgagatctacgtgtctctgcaggcgtgggtggtgcccgccagcgcttactacaacatggcgatcttcggtcataccggctacaacccggcgcagccgcgcttggatcctcctggctccaattcgaatccggtggcgttgctgggcgtcaactcgccgatcaagtactggttcgtcgcaaacggccgttgcttcaaggtcatcacgcgaatcaacggtcgttatgacgccgtctacgctggcttcatcttgaccgaccatcttccagccgactggagctacccgcttttcatcgggggatcgtgcctggagcggaactacctggcctcgtcggatggctacgagcattccaatttctggagccccaacgcagacggtacgaacaacaccaatcgcagccaagcgtatctgttctcgccaatgcaggcttgggttccgatccgcaacctcgctctgaacggatctctcactaccgggcgtatgagcctgccgtgggcaaagacaatctgcaaccagaacgtgcgcaactgcctggacgggcagcgctgggtacagcgcggtcagttggcgggctttgcgtggggcggcagcctcaccgacagatcttctcccgacagccaaatgcctgagaagggacagttctatggcagcttcgacggcgtcttctacaccccgtccttcggtgcaacggcggagcaggtggcagcggtgggcggtgttgaccacctggtggtgcctaacgtgtaccgcaccggctctggcgagttcgccgcgttttccttggagtga

SEQ ID NO: 504104 - DNA, 570 bp, Stenotrophomonas maltophilia
atggcgcagtttgaagtcacccttgattcggcaacacctggtctggccgatgcgctgcggcagctggagggcgaggcgcgccaactgatcttgaaggactggggcgagtacctgctgaggtccacgcgcgagcgggccgcaaaggagcgggacccgactggacgtcgatggcgcgcgcttgagcccagctacaaacgctggaaacagaagaagcgccccggcgtgccgattctgaagttcgatttccacatgctcggtgacatggcttcatggcaaacggacgggaacgatgccgtcctggtcggtaccaatgcaccctatggcgccatccaccaattcggcggcaccatccaacgcgccgcgcgtccggccaatatccacctgaagacgggtaagggcggcagccggttcgtcaaagccagtcgtgggaacgcgcgctacaagcgctcggtcacaatgccttcgtacacgaacaccatcgctgctcgtccgtggctcggtgtcagtcgcgaggatgagaaggagctgctggatatcgcccaggatcacgtgagcggcgccttcgagtga

SEQ ID NO: 504105 - DNA, 1278 bp, Stenotrophomonas maltophilia
atggccggggtcgcctacgctcaacttccgttccgggagcagatcgagttcttccgtcgcaaaaagaacgtgctcaccgagagctacctcgacgtttgggagtcggagcacgactccagcttcatggtggccggtgccaaccgtgacgctctgctggcggacttccggcaatccatcgatcgggtcattgctgaggggcgaactcttcagcagttccgggaggacttcgaccggatcgtggccacgcatggttgggactacaacggcggtcggaactggcgctcacgggtgatctacgagaccaacctgcgtcagagctacaacgccggacgctgggcccagctgcagcagctgatcaaggtgcggccgttctggcgctacaaccacaacgacgccgtcgagcaccctcggccgctgcacgtgtcgtggaatggcctggtgctgcgccacgacgatccgtggtggcgctatcactatccagccaacggctggggctgccagtgctatgtcgatgcgctcaacgagcgcgacctgcgccggttgggcaaggatggtcctgacacggcccccgagatcgtgatgcagtcggtgaccatcgggcagcgcagtcctggtgggccgcgcactgtgctgacgccggcaggcgtcgatcctgggttcggctacgcacccggcgcaacggccgatcactggcccggtgggcgtggtggtccggtcaccccgccgtcattgactgggcaactgacctccgctctgcagaacgccctggagacgggagcacggttgccggcggcgccagcggctgccagcgctgctcaggccttggcgcggccgcgcgccagggatgcgctgcaggccggctatgccagctggctgaccagcattgatggcgatgctgcccacgctgcccgctacctggccggagcactgtcgcccggactggtttcgcagctgcagcgtgccgccgttcgcccagcgacggcggcctttgctgtgttggccgaccagctccccatcactcgacctggcgcggtggccatcgccgcagccgagctgcccatccgccttctcgatgcggtggccatcctgctggacgctgccgcaggccgcttgcgctatgtgctggcggtggggcgtcctgccttcatggtggtcgatgtggccatctcggaaacgggcgtcagcacggtgcagtcccagctgcagatgctgatgcccgccgaactccagcgcggcgttgccgatggcacgctgcagctgctgcagggagagatctga

SEQ ID NO: 504106 - DNA, 558 bp, Stenotrophomonas maltophilia
atgcctcccgtgagcaagatcgacctattgccggccgaggtgcgcgacgaactggatcggcgcctggtcgccaatgccttcggcggcagcatctcgctgtccgaatggctcggcgagcagggctatgagatcagcaagaccaccgtcaacgagcgggccaagcggctcaagcgccgcctggcctcgatcagcgccagcaccgaagccatgaagctggtggccgagcaggcgccggacaatgccgccgagcgcggcagcgcgctgatgggcctgctgcagaccgacctgttcgaagcactgctgcagtttcaggaggcggccgaccaggacgatgagagcatttcccccgccgatcgcattgcgctgtacagcaaggcggccaaggccattgccgagctgacccgatcttccatcgtgcgagagaaatgggccggcgaaatccgccagaaggcgctggtcgacgcggccagccgggtcgaggaggctgcacgggcaaagggcctggacgctgagggcgtggagttctggcgcaacaaggtgctgcatggagtcggctaa

SEQ ID NO: 504107 - DNA, 324 bp, Stenotrophomonas maltophilia
gtgagtcacggaaatcagggcccggatctgggcaagttgcgccggcagcagctgcgctggctgatgctgctggtgctggatcgctctcgtccctatccgatcggcgaagccgtcctggccggcgccgcccaggacatgtatccggatgccaccgctttggaagtgcgcagggagctggattacctggacacccgccgcctgatcgacatcaccaaatccccttcggggccgtggtcggctgagctgacgcgccacggtgtggatattgtcgagtacagcatcgactgcgggccgggcatcgcgcgcccaccgaagtactggtga

SEQ ID NO: 504108 - DNA, 318 bp, Stenotrophomonas maltophilia
atgatcgttgaagtacagccactctacctggtgtggttcgccggcatcggcatcacgctgctcggcggcctgatcgccggcggtcgctggctggtcaaccagctgcagcagcgcactgatcagcagttggccatcctgatcaacgacagcaagcgctggcgcgaggttgagagccacctcaccgacttccgcctggaagttgcgaaggattacgtccgccgcgaggactatgcccgcggacagagcgttatcgaggcaaagctcgatgcagtggcctcgaagatcacgaagatgcaaagcaaggggaacacgccgtga

SEQ ID NO: 504109 - DNA, 507 bp, Stenotrophomonas maltophilia
atggtccgcaccctgaccgcaacggtcgccttgctgctggtgctcctgctggtcgccatcgctgcagcacttctctatcgcggcaatgccctggacgcgcaggcccgtgatgccacggcgcagcagcgcgtgaccacgctccaatcgcagttggacagcgagcgcagcgctcgcgacaccgagcacacccaggccaaggaaatggctcagatcggagacgaacatgaagatgatcgggaggcgtccgcgtccatccctgctgctgttgtggctgacctgcgcgctggcaatctccagctgcgcgacgacctcgccacctgtcacaccgcccgcctgtcccaagccgtctctggcgccgtcgaacgtgatgcgagcgcccaactacgtccagaggttgcaggcgctgctcttcaaatcgtcaccgaagctgaagaccacgtccgctcctgtcaacgcgtcatcggcgtcctcaccggacagcgcccacccgccgaggccaacccatga

SEQ ID NO: 504110 - DNA, 519 bp, Stenotrophomonas maltophilia
atggcagcagagcaacccggtaacaaggcactgcccatcgcgggaggaatgttggcgaccatgctggcattgctgctcggtttggtgcagcccttcgagggctactcgtcccagccctaccgtgatgtagtcggcaagctgacggtctgctacggccatacggccaaggtggaacagcgcacctacacccgcgccgaatgcgagcgcctgcttcagtcggacctcggcgtcgcctggaacaccgtgcagagctgcatcaaggtgccgatgacggactaccaggccgccgccctgacgtcgttcgccttcaacgtcggtcccggtggcgctggggtcaaggacggcttgtgcttcctgcgcaacggccagcagccgcggatccgtgtgtacgccaaccagggccgctgggatcttgcatgcgcccagctgagcaactgggccaatgcaggaggcaagccttacaagggacttgaacgtcgccgcacggcggaacgtgcgatgtgcgagggccggcactga

SEQ ID NO: 504111 - DNA, 642 bp, Stenotrophomonas maltophilia
atgcccaatgcgatcgcagccaagtgggcttcgccgaagttgccctttcgtttgcctcgaaggaggtcgacaacggtgtggcggttgaagccatgcgagcggctccattcagaaatggaaattccgctggcaagcaaatgtctccggacctctgatccagttttcaggctcattgcagtaccctgtggtcaattgtggctacctagggcacatcgtggagacatttatgacccttgtcaatgggttctggagacatttttgactatcggcgaaaggcttcgtgagcaacggctcgcgctggggtactcgcagactgactttgcggcgctcgtcggggcgtctaaaaagacgcaaggtcgctgggagctgggagagtcgtctccgggtgcggaagcgttggccggatgggcggaagtgggacttgacccgctgtacgtgctggtgggtcgccgaagcgtttctcaggccggcatgaaagaagaggagttggagcaattcaacttgctggttagccttttctggtcgtcttctgacgatagccggcgggaggttctgaacatcctttcggcacttcatcagcgggatgttcgaaacgacactgcacgaggtgtgcgcagaaggcgcactccagcgtctgactaa

SEQ ID NO: 504112 - DNA, 240 bp, Stenotrophomonas maltophilia
atgagcggcttggacgagattccgacccgtgaactggagctactgctcgcttcagcccgcgatcagtacgccaccgccgtgaacaactggcagcgcgccgtcgagtcagacgcgtctctggccaacaccctgccgctggccaacaccctgccgctggccggcgccgtcgacgcagccgaccgccgcgccgtccggatcctgaaagagttggcgcgccgccagcaggacgctgcggcatga

SEQ ID NO: 504113 - DNA, 159 bp, Stenotrophomonas maltophilia
atggcttcgctcgacagcatcaagaaagacgcacgcctgatccaggaacgcgacggattcggttactgccaagctctggagatcgctgcgcgaaaggctggcttcaacacctatgccgctgcgaaggctgccttgcaggggcggagggcccgcccatga

SEQ ID NO: 504114 - DNA, 237 bp, Stenotrophomonas maltophilia
atggcgattcgaactgaaggctggccggcagtggaagcgatggtgaaggcgccgcagggcgatgcgtggcccttcgccacccaagccatcctgattcccttcgagatgcaggaccgacccgagccgatcaacgtggacatcctccaggtggtgatcgtgccgcgcgccaactgggagcgcatcaccgcgcatgttccggccgaggtgctgcagcgcgagggggtggctcatggttga

SEQ ID NO: 504115 - DNA, 240 bp, Stenotrophomonas maltophilia
atggttgattacaacgcctctgggccgcagtacctgcgcagcttcgcttttcacttgatgcgcgatgccgagctacctgatcgacaggtgacggtgatgcaccggaatctgttccgtcgcgccggcatcgagtggcgcgacgggcagagcatggcttcgctgctggacagcctcaacctgcagcagctgcgtgcgctggtcgaccagctgcgcgacggcgatgacgacgaggaggaatga

SEQ ID NO: 504116 - DNA, 402 bp, Stenotrophomonas maltophilia
atgaaatcaacaatcaggcgcagtcagcgggattactcgctggccttcaagttgtccgtggtcgatcaggtcgagcgtggagaactgacctataagaaggctcaggagcgatacggtatccaaggcagcagcacggttctgaagtggcttcgccgccatggtcggcaggattggtcaggtggtgcatcatctgcccccatgacgacttctcccaaaagtggaccggccacgccgctgacgccggaacaacagatcaaggccctgcaggtccagttacgggaggccaacgagaaagcacagcttttcgaagccatcgtggatgtcctcaaagaggattacggggtgcgcatcgtaaaaaagccttcaggcaagtcctcacgcaagggcgcctcaaaggcgtaa

SEQ ID NO: 504117 - DNA, 468 bp, Stenotrophomonas maltophilia
gtggcggacatcacctatctgccgacgcaggggaagttcgtgtatctgagcctggtcaccgatgcctggtcgcgcaagatcgtgggctggagcgtgcatgaaacgctacagacagagcaggtagctcaggcgctggagatggcgctgaaagggagaaagacatcgcagaagctgatccatcactctgatcgtggaatccagtactgctcggattactaccagaagatccatgcgcggcacggcctgacctgctcgatgaccgacggctacgactgctatcagaacgctctggcagagcgagtcaacgggatcctcaagtgcgagttcctgcttcatcgcccacgggacctggggcaagcccgccagatggtggctgaggccgtagacatctacaacgctgagcgcccccacctgtcccttaaaatgcagacgcccgatgcgatgcatcgggcgtctttggccgcctga

SEQ ID NO: 504118 - DNA, 183 bp, Stenotrophomonas maltophilia
atgaaatttctagatgacctgatcgtgagcattgcgacgcgaatcattcgcggaattttcgccgtgggcactggccttgtgtacgtccaattcgtggggctggccttcgtgctggcgatgtttggcaccgtcggttttgcggtgcttgtggcggccttcaagaccgcactgtttggagcttaa

SEQ ID NO: 504119 - DNA, 1296 bp, Stenotrophomonas maltophilia
atgtttgacagccaaaacccgaagaccgggcggactgcaaagcaggccgaattgcaacacaaggcgctgacgaatgcggttactggtgaaagcatggcgaactatcaagccatcttcgagggtttcgcagcgatgggcatcgacccggacgacgtgaagccgcgcgagaacgtctttaccttcaacgcatggaaagccctgggccgcgtggtgaagaagggccaacacggcgtgcgcatcgtgaccgtgatcccctgcaccaagaaggacgagcagaccggcgaggaagtgcccgtgaagaagccgaagaccacaaccgttttccatatctcgcagaccgaaccgctcgacggcccgcgcaaggacgacgacagcgaggcccaagccgagcagccggctaagatcgaggacgcacccgcagccgaggaaagcgcccaggcagcaccggacgcggccgaggccatcgaggccgaggaacgccccttgaaccgttacgagcagcgcctagccgacaaaaaggcccggtacgaggaacgcgccgaacgtgccgcccgcgacagcgaaagcacctaccgcaaggcccggcagatgggcgaagctatccccttcggccagccgatcctagtcggccaccacagcgagaagcgggaccggaattaccgcgaccgcatccataacacctatgggaaggcgtttgcgctgcaagacaaggccaagcactacgagcagaaagccgcatccgtgggcactggcggcatttccagcgacgaccccgacgccatcgagaagctgcgcgccgaactggcgaacatggaggcagcacaggagcgcatgaaggcggcaaacaaggctattcgcaccaataaaaccgccgaaacgcaggtagcggcattggtcgccctcgggtttagcgagaagcaggccgcgcaactcttggaaaaggacttttgcgggcgtattggcttccccgactacgcgctaaccaacaacaacgggaacatgcgccgggtcaaaggccgcattgccgagcttgagaagcgccggcaacgggcggacgtggagcgcaccggccagggcttcacctaccgcgaggacaccgaagaaaaccgcgtgatgtttgttttcgacggtaagccggacgaagcgacgcgccaaatcttgcgctcgcatgggttccggttcagcccaagccgcgacggtaagccgtgggttcggcaactgaataacgccggaatctggaacggacagcgggttttcgaggcgctaaatgcggctcgaaatggtgacaacaactag

SEQ ID NO: 504120 - DNA, 477 bp, Stenotrophomonas maltophilia
atgaagactttcgcgcgagccgctgcgctcgccctcattttcgcggccagctcggcctatgctgacatcgccggccgcgttgtcggcgtcatcgacggcgacacgctcgacgtgctggtagacaagcgccccgtgcgcgtgcgccttgcacagatcgacgcgcccgagaagcggcaggcattcggaacccgcgcccgtcaggcgctttcgtccctcacctttcgccaggacgtgaccgtgaccgaggccggccccgaccgttacggccgcaccgtcgggaccgtctacgtcggcgcggtcaacgtcaacaacgagcttgtgcgccagggcatggcctgggcgtatcgccgctatgtcaccgatccggccgtgatccagatcgaggccgaggcccgcagcgagaggcgcggtctttgggccgatccttcgcccgtcccgccctgggaatttcgccgggcaggcaccgccacgcagtaa

SEQ ID NO: 504121 - DNA, 438 bp, Stenotrophomonas maltophilia
atgaatattgctgaacgtctcgactcttggagcacgccgataactttcataggtggcgctctcggccttgtgtgcatcgtcgtgttcggttccttgaaccacacgaccatcaaaacgtcggtgccggccggcaccttcgtttcctcgcagttctaccccggccaatcctcgccgtcctatgtcgtcgcctcgccgcaaggcggcttgggcattgccgcccctatcggtggcgacactcccgaccgaactttcgtccggacagacaaagggcaattcatcgtgcgaggcgcttttctcgcagccgaaggccaagcgctcgaactgcgcacagccattgacaagacaaagtacctttgcccggccgatgacaacgacggttgccatgccatcgaaccccgcgacagcatcgagacggcgaagcgcgccggccagccatga

SEQ ID NO: 504122 - DNA, 1434 bp, Stenotrophomonas maltophilia
atgaccagacaacaatctaccacacgcggccgaacacgcagcaaaaaaaccgacgccgacgtgttcgacgaagccggctaccgtgacgaactggtgaagatcggcatcgaccttgaatcggcaacgatggttgccgcgaagaccgcccaggcgcaccgcgacaacgccgaagccaagcgccggcttgcagtgcccaccgtgggcaacatcatcggcaacgccgacgacgtgaccgcgcaactcagggcgaagggcgaagccacggccaaggccgaggcgcagcgcacccaacgcaagaagcaggaggcacaacggctttcagccgtcggcgaccttctggcgaaggacttccccttgctcgcaagggttcagtccgaggcccgcgcgagggccgaccagatggacggccggccgactggcacagccaagccctaccgggctttcaagtcgccggccaaagacgttacgccgccggccgagaaaccggccgccgcaaagcgccgcatcgaaacgcccatcaaggccgttttcgattaccgctatgccgagctacccgagcgcgtgcgcgacctgatcgaagcgcaccttgccatcgaggccgaggacgcgaaaagcgccggcacgctcggtttcatgacccgcgcgctcgccattgcgacgctgcctcatcgccggctcgccgaagaccgcttcgtgcggaagaacggcgatttcaccttgaccatgctcaccgcgcacccggaggggttgccttacggcaccctgccccggctgctgctgacctgggttgcgaccgaagccgttcagaagaaagagcgcgtcttgagcctgggcgacacgctggcgtcctacttgaacgaactcgggctacacagcacgggcggcaagcgcggcgacatcacccgcttgaagcacgccatgaccacgcttttcagcgcgatcatttcgtgccgctacgagggtaaggattcctgggcgctgcaaaacgtgctgctggccgataaggtcgaatggtggcagccgcaggccgaggaagaagccggcacttggcaatcgcgcctacagctttcggagccgttctttaaggagtgcatcgagcaccccttgccggtggacatgcgcgcgatgcgcgtacttcgtcaatcgccgttggcgctcgacatttatgtgtggctcacgcaccgcatgagctacctgtcaaagcgcacgaccatcccatgggtttcgttgtccggccagttcggcgcgggctacgccgtcaacgaccagggcttgcgcgacttcaagcgcgctttcctgcgcgagttgaaaaacgtcgtcgccatctatcccgaagcgaagttgtcggagtcgcgcaacgggcttgtgctgtacccaagccctacgcacgtcttgcccgacaccacgcctaaacaaccgtcgcttcccttctaa

SEQ ID NO: 504123 - DNA, 993 bp, Stenotrophomonas maltophilia
atgaatcagcccaagagcggtaagccgctttcggctgaacagcgccaagcgctcgaagcgacgcacacatggcagcgcgtcgttgaactgcgccttgacccggtgcgcggcaacttcgacgccgcacacctgaaagaagtcaaccgccgcatatttcaagaccttcccggcctgggcttcgatgatgtcacgccgggcgagtatcgcccggccgtggccgccggcaatgactggatcaagagccgcagccttgagacagtcgcagcgccgtcgaacgtcgcctactcgccgatggacaaggcggcgcaagcccgccttgatgaagtgttgaagggcgcgaatccggccgagctatcgaagctcaagacggccgagttcaccaaggctatcggcaaactctatgccgaagtcgattacatccacccattcagtgacggcaacagccgcaccttgcgcgagttcacccgcgaacttgccgaggcatccggctacacgctcgattgggatcggttcggcaagtcgccgggcgggcgcgatgttctctacatcgcccgcgacctcagcgtgaacgaactggcgttgcctcatatccagcacgccggcacgaagcgcgatgtcgtgttgagcatggaccagtttgaaagcaaccgcgctttgccggacctgctgcgcgatgcgatccggccgagccgcgctatcgccttcgagcagatgcccgaggccgacgccatcgagctacaccccgaattgcgcgaagcattcaagaccatgagcacggccgcgcagtatttcgaggcgaagatgccggacgatgccgccgcgcagcgcaatgcgctgctggccgtgcgcacgcacgttcaggccaaactagaccagggcgagacgaaagattttcgtcagtcgccgagtgaaaggcagaagggacacagcacgccgagcaagcaggccgaccgcacgcgggccggccagcaaggaccggagcatgagcgctag

SEQ ID NO: 504124 - DNA, 342 bp, Stenotrophomonas maltophilia
atgagcaaagaagtaactatgacgatccgggtcgagccggacttgcgttcgagcttttcggaagcggccgagcttgagcaccgtcccgccgcccaggtgttgcgcgatttcatgcgcgagtatgtcgagcggtcccgttcgcgtgccccggcccgtcccctcatcagtgcggccgagcgcaagcgccgcgaagacgccgtgaactatggccgttcttcggtcggcctggaaggcttcaaactcagcacggccgacgagaagcacgcgcagcgcttcatcaacggcgaaatcgacctgcccgagttcgtgaaggtgcgcaatgaatcagcccaagagcggtaa

SEQ ID NO: 504125 - DNA, 408 bp, Stenotrophomonas maltophilia
atggcaaaccggattccgctcgaccccaagctgccgaagttgttcgaccagacgccgaacgaacagcgcagcaaggcccaattagacgcatggtgggatcaccctttcggggtgacgatggccgacggccgtatcgaggttcgttgcctcaatggcggggcgtgggatcggtctacgcatctaggcgtggctgacgactacgacgcggcctgcgtactggccgaagccaagcaagccgcttggctgcgcttccgcgaaaggcccgtcggaagcccccaggacgggaaattcttgctcctgaaaatgccgcaacgaccagacgaagacatggtgacagtgggcacgttcgacacggccgaggcggcgaacgaattcttgcgcgagaactaccccgagacgccacgatga

SEQ ID NO: 504126 - DNA, 636 bp, Stenotrophomonas maltophilia
atgaaggtagcccgcatctatatgcgcgtcagtacggacggccaggacctggagcggcaagaaagccttgtggccggggcgcgggatgccggctactacgtggccggcgtctaccgagaaaaagcgtccggcgcgcgggctgatcggccggaactgctgcgcatgatttcggaccttcaacccggcgaagtcgtcgtagcggaaaagatcgaccgcatatcgcgcctgccgctggccgaggccgaaaagctcgtcgccgcgatccgcgacaagggcgcgcggctttcggtccccggcgtggtggacctgtccgaactcgcggccgaagcgaagggcgttgcaaaggtcgtgctcgaatccgttcaagacatgctgctgcgcgtcgccttgcagattgcccgcgatgactacgaagaccggcgggaacgccagcgccagggcgtcgaactggcgaaggcggccggccgctacactggccggcgcgaagacaccggcacgcatgaacgcatcatcgccttgcgcacggccggcaagagcatcgccgacactgcgcggcttgcgcaatgcagtccgagccaagtcaagcgcgtatgggcattagcgaaggcagacggccgcgttccggccgacgcctga

SEQ ID NO: 504127 - DNA, 474 bp, Stenotrophomonas maltophilia
atgaacgtcaggaaggcggcccgcaacggtgtcgccggcctgatcgcggccgggctggtgctcgcgtttgttgtcggccgacagcagacgcgggcagcaacgccgacagaggtttgcaccttgcatttttccggcggcgtcacgctggccgatgtgcccgtggcgaagacccaggagcaacaagcgcggggcctgatgcaccgcgacgatgtagggccgggtatgctcttttcctggccggatgcagccgagcgcgttttctggatgcacaacaccccatcgccgctaagcatcggtttctttgatgcggccggccaactgttcgccatcaaagacatgcagccgaacagcgacgaataccatttttcaggccagcccgcgcaagacgccttggaactggcgcaaggccaattccaggcgcgcggcctcgccgtcggcacccgccttgtcagccgcgattgccgtccacgctga

SEQ ID NO: 504128 - DNA, 1152 bp, Stenotrophomonas maltophilia
atgcttgacctgtccgcactggaagaaaagccgatccccgtcggcgcagaggcacagcccaccggcaagccgttggaactgccgcttgacgacatcgaggaagacgagaaccagccgcgcaaggagttctccgaggaaaagatgcaggaaatggaggacagcattaagttgcgcggcgtccgtcagcctgtttccgtgcgccctcacccggacaagcccggcaagtggattctcaatttcggcgctcggcgctatcgcggttccaagcgagccggcaagaccacgattccggcattcgtggacgagacgagcgacgatttcgatcaggtgatcgagaacgagaaccgcgacaacctcaagccgatggagcttgccttgttcatcaagggcaagctcgaccagggcgtgaaaaaggcggaaatcgcccgccgactgacccgcccggccagcaccattaccgaactgctggccttgatcgaggccccggcctgcatcgaagaagcctaccgctcgggccgctgcacttcgccgaaaacgctctatgaactgcgcgccctgcacgacaagttcgccgagcaggtcgaagcgtggtgcgagacggccgaggaaatcacccgcaagggtgttgccgacctgggcgaccagttgaagggcaagaagaagccgccgcaggacaacgacaagggcggcagcgaaggcggccagaatgccggagccgataacggcgcatcgaccggcggcccggaaagtcttagtcatgacgaaggaaatcgcagcggcggcggttccttggatgcgggcgacggagccggccgcgagcctcgcaccgacggcgagcagggcaccggcagcgccgacaccaagggcgatagcccgaagggcaacggcaaggccgagggcgaagacggccacgacaacatcgaccggggcgaactgacaagctggccccgtggtaaggcagtgtcggacccggacagcatgaaaaagccgctgttgatcgtggaacacgaaggccgggcggcggcggtcctgctgaaccgccgaccgtccaccgctggcctgatccgcatccggtacgaagacggcggcggcgatgccgaagtcgatgcaggcacgttgaaaatcaacctgctgaccgaggccgagaaatga

SEQ ID NO: 504129 - DNA, 798 bp, Stenotrophomonas maltophilia
atgaaaactcttgtacttgcgaaccagaaaggcggcgtcggcaagtctgccgtcgcggtccagttcgcctacttcctcgcgcttgtgctcaataagcgcgttctcgttatcgacttcgaccatcagcgcaacacgacgaaggcaatccgcacgggcggactggcgaccgtctcggccatcaccagcagcaccattttgaagaccaaaaccagcggcatcgagcacgctgattttgtcttggtcgcgggcgaccccgagcttatcaagatggaaaagcaggcggccgagcacaacgccttcgccacgaacctttacacgttcctggcatccgtcgccgaccaattcgacgtgtgcgtgatcgacacgaacccgaacccggacattcggcaactggcgtcccttgtcgtgagcgatttcgtgctgtccccgttgcagttgaaccaagaggcaatcgacggcatcggcgacctgctgaaccacgagaacatcggcattcgcaagatacaagccaccctcaacaagaagctgcaacttatcggcatcctgccgaacatcgtagagccgacgcccttccagcgcgataacttccgcgacttgtccaaggcgttcgcaaagctgctgatcccgctcgaaaacggatttgcagccgtcaagaagacgacggcaatccccgaagctcaggcggccggcctgcccgtctggaagctcggcaagacgagcgcccgcgacgcatggagccagatgcgcccggttttcgagaagatcgccaccaccatgggagttgaacaacatgcttga

SEQ ID NO: 504130 - DNA, 396 bp, Stenotrophomonas maltophilia
atggcgtcccctaccccaaggatggacgccgcgcagttcgaccgcgttgcgtccaaatgcagatggtccgagcgttccttgggcgttgcgcgtgctttgttggttgacggtgtgccgctgcccgatgcggcggcggcgcacgatatgtcagtcaaacaagcgcgggtgcttctggcccgctttgccgccaaggcggaaagcgagcgccttgaagcattcatgcagcgcgagaaacccaagctcgctaccacagcactagagccatattccagcgaggtccgcacccttcgggacaagggttacacgattgaacagatcgtggcgttcttcaaggaaaacggcgtgaagacatcaccgacaaccgttcggaattttttaaggagcattcgggcatga

SEQ ID NO: 504131 - DNA, 357 bp, Stenotrophomonas maltophilia
atgcagaaaaacgtcttcgtcggcaaccttgccaagaccccgacgattaccgggaccggcgaccgcgccgtggcccgctttaccctgatcgccaacgagtacgccggcaaggaccgcgaaaccggcgaggcccgcgagcgctcggtgtcgatccagttcaccgcgttccgtggcaaggccgaatccatcgccaagcacgcgatgcggggcgaccagttgattgtcgattaccgcgtcgaaaacaacgactacgagaaggacggcgaaaccgtctacggcttcaacttcatcgttgaagacttccagttcggtgcgccgggcaaagaaaaacgagagcaattcaaggcgagcgtgtga

SEQ ID NO: 504132 - DNA, 1245 bp, Stenotrophomonas maltophilia
atgagcgcaatcaccatccacaccgacaacagcacgaacagcgcgggctttccccccgcaccccccgaggctcaccaaagagcagttgtgcgacttctggaaaatggcaccgctcccgagcatgtcgctacgggcgttgacgaccgcgagttgagccagattgtcgaggaattcaacgcagcgcaggccgtcatgatggagggcgatcaccccgtatccaacgtgttccagccgcctgcaaaaagcgacgtggtgcgcttgaacgaaaaggcacgggtctaccacaaactgcacggatggatgaccccggccgaggccaaggaacgcattagcgagtggaagaagcacgccattgcgcaaggcacgaacgccgcgatttgcagcgagaacagccaaaaggttgtgttgtcgctattcgacctgtcgggcgagtggtccaagccttgggaggaagccggctaccaagtctatcgcttcgacattcaggccgatgccgaagtgggagacgtgaacaacttttcggttgatttcttcggggattggttcggcgattttgacgggctggacatctatgcagtgctggccgcgtgcccttgcacggacttcgcggtaagcggcgcacggcatttcgcagccaaggacgccgacggccgcacgattgcgagcgtgaatctggtccaccagaccttgcgcgtaatcgagtatttcaagccgtgtttgtgggcaatcgaaaaccctgtcggccgtatcgaagcgctatgcggccttccccaatggcggctgtcgttcgacccgaaccacttgggcgacccgtacaccaagaaaacgctcatctggggccgcttcaatgctgacttgccgatagcgccggtagagcctaccgagggatcgaagatgcaccgcctctatggcggcaagagcttggcgacgaagaacgcccgcagcgtgacaccggaaggcttcgcctacggatttttcatggcgaacaacgcgcacgaccatcctgcgatggccgtagcaaacaagtatgaccggctggaccgcgacgcgatccgcgatgccatcgacgccggcatcactcccgagcacatcgacgcggccgtggaggatgcgtattacatggacatggacgacgacgcggccaatgcagccatccgcgaaatgacccctgccagccatcgccgcgccccaagcgttgccatggtgcgagcgccagaagcccaacagatggcattcgcttggtga

SEQ ID NO: 504133 - DNA, 309 bp, Stenotrophomonas maltophilia
atgaattgggcaatgggtgttttttggggggccgtgatcgccgcgagttacctactcgcagcaatggcagcggtcggcgtcgttagaacgctatgggtcggcctcgaaagtttggccttgcggccgactgttcgggccttagcggcgacggtaggctgtttcgtgctcgcctatcttttccgccacacggtggccggcctatcaccggagacgcgcgaaagcgcccaggtgatggcctatatctggctccccgtgctggcatggatggcaatagcgcccttccttcggccgaggcccccgaaaccgtga

SEQ ID NO: 504134 - DNA, 321 bp, Stenotrophomonas maltophilia
atgcagacagcaccaccgaagaagcgcagcaaaatcaagctcgccggcctaatcctgttcgccctcggcggatggggcgcggcggtcattacgggcatgggcctgggcgcggccaagaatcaggccgtcaaggaccagcaggaagcgcaggtatggaaggccaaggccggcaaggcgtacaccgagcttttgcttgccaaagccggcaaggccgaacaaatcaccatcccggccggctcgctgttggaatgcgtgagcaccgacgataacccgccgaaagttgattgcggcggcttcatcctgccgccggccgactactaa

SEQ ID NO: 504135 - DNA, 669 bp, Stenotrophomonas maltophilia
atgttcattcacccccgccaacccgtggccttcttcgatgcccgcttgctcgacatcgttgccgatcccgagcagcacggcagcgaccgcctgttgttcgagtaccagggcaacacgttcgagaagccgacattcgccggcagcgccgagcgtgccgccaaggccaaggccgaaggcagcaagccgctggccgaggtcggccagatcggcgtcatcatgaacgccgaccccggtagcgacttccccatgtatcgctttcagccatacatggaccagagcttgcgccgggccttcgagcttgacgtgttcgagcacgtcgcgcccgtcggctcgcccaggtacaacgccgagcggatcggctggcgcaatgccgcgtgcattgatggtttcttggccccggccggcatcatccccggcgagaacggccgtttcatcgaagacacgaccgaaggcgtcgaactggacgtgccgcgcgagttcttcgagctttgcgcgcagttcaagcggacgcccgaggaagtcttgcgcggcttcatcgccgacgcggccggtctgatgaactattaccgcgaaccgcgcgccgatggatacagcagcaacggcagcgacgagcgcgatatggcctacagctacatcgaacgcgcctacggcatgttccgggaggactga

SEQ ID NO: 504136 - DNA, 300 bp, Stenotrophomonas maltophilia
atggatatgtcacacggcttcatcccccaagcgctggacgcggcagtgtccgcgcttgatgccctcgcctcgggcgaaggcgtgcgccacgatgacctaatcgcgggcgctatcgcaatcgaaatgctggccgcccaagccgggcaaccgcatcaccgccgcaccggcatggatgcagccgtgcgcgggcttcgcatcctggcgacgcgcgcaagcgtctcagggagccaccacggccggcgcgccgctgtcagcttcgccgccatcgtgcgcgatgtgcgccgggttttcattcactaa

SEQ ID NO: 504137 - DNA, 366 bp, Stenotrophomonas maltophilia
gtgaagctctccgctgaactgcccgcgctgattgacgccctggaagtcgaaattcaaaccgttacgcagcgtatggccgcgctcaagaaagccggcctcatttacgcttcggaacactggcggaaggacgccgagggcaacctgaaatatttctatctgctgtatccgcagcagcccggcgagccgcgcaagcgcgagtatgtcggatgcgatgcggatcgcatcgaggaagcccgcgcgggcatcgcacgggccaaggaatacgacgaatgcggcgcggtcctggcgggcctcaatagccgcgtgcatcacgtcattcaggcgatgcaagacgctcgccgctaccttaccggcaagcgctggtaa

SEQ ID NO: 504138 - DNA, 402 bp, Stenotrophomonas maltophilia; identical to SEQ ID NO: 504116

SEQ ID NO: 504139 - DNA, 468 bp, Stenotrophomonas maltophilia; identical to SEQ ID NO: 504117

SEQ ID NO: 504140 - DNA, 411 bp, Stenotrophomonas maltophilia
atgactgccacacactacccgtacctgttcgccaccctcggcgaggccgccaacgaactgcccgaggccatcgcccgtgcgctcgaaaccacactcagtgccacccaaggcagtaccgcaccttcagccaccacgctgctggcatgcctgcagcgcatccgccaggtggacgccgccgacggccaaccctggccaaagaagggccacacgtcgggtcaccggatggccatggcacgcgcggaccgcgccaatgccgggctgaccgtgttgctggaactgctgcatgcgagcgaacggacgcgtgtggatggcgatgaagatcaacagattggagaggacgtgcgcgaaggcttgcttctggcgtgccgagggctgtctcaatatgtggatgtgcagttgcactgcacgtga

SEQ ID NO: 504141 - DNA, 468 bp, Stenotrophomonas maltophilia
gtggcagagaaaaagaacgtgttcatcagccatgtccacaaggacgatcacgggctccagaagctaaaggatctgttggctccgaaagggatggaaatcagggattcctccatccatacaggaaagttcaacaatgctactgatgagcactacataaagacgcagatccttgcccctgccatcagctgggctggagtgttcatttgctacgtttccccccagaccaagaacagcgactgggtgaactgggaaatcgagtatgcggccaaacaaggcaagcgtattgttggtgtttgggagcatggagagaaggaatgcgacctcccggatgctctgaaagagtatgccgacgccttggttgggtggaacggcgatgcaatcatagacgcgatcaatgggaaggattcgtgggaaaagcctgacggtggcgcctgcggcccggttccactcaagcggcatccctgctga

SEQ ID NO: 504142 - DNA, 627 bp, Stenotrophomonas maltophilia
atggctcgcatccactcctatgtggtgcgatacgacagtggtttcgcacccaatcccttctatggctactgcacgcttgcgacctgcaaacccaatattcgccgatccgctaacatcggtgattgggtggtcggcagtggcagcaatgatagaactgtccgacgtggcgggcatctcgtgtacgcgatgcgcgtcaccgaggcgatgacatttgacgactatggcgcagacccacggtttgagcctaagaagccgtaccgcaatgggagccggaagcaaagttgcggggacagtatctacttcagggccgcgcctggagccgcttggcagcagcgagactcatttcattcccgctccgatggcacgctcaactctgaccatgtcgcccgcgatacgggcgtcaacagggttctgattagcaatgactttgtgtacttcgggggcgaggggccggagttccccaaggaactgaaggaccagcaaaaccgacctctatgcaaaacagggataggtctaaccacctttgacgatgcgcaactgatcgcgcaccttgagcaatggattcgcagctttgacgtgagcggttatcagggcgccccattcgaatggctgactcttcgcaggtga

SEQ ID NO: 504143 - DNA, 1137 bp, Stenotrophomonas maltophilia
atgaaaaaggaaggctccctcttactctcggattacgctgcggagattgcagccacggacgtactcaacccgaatgacttcaatcctgtcctccaaggtctatacggagaagtcggcggaataatggctacgaccaagaaaagtgttcgagagagaacggcttacccgggtttcaagaaggcggcagaagaagagtttggcgacaccctttggtatttggccgcaatctgcaggcgcctgcagattcctcttgaagagatcttcgcggaagctgcgaaccacggaaacttcaagaatgtgggcgctgccagtgacatcaccgaaggtgcgttggcgtatatcgctgtgcctgtcgccgcgactgcttcgttggatgccacgttggtacggttggggcaatcagcggcggccctgctggggagcactcctgcacgcgctgatttgattgctttcgcacggacctatctggatgcaatccatgcggccgaacttgcgttttcggaggtggctcgcggcaatctccggaaagctcgcggtgcgttcctggagccgcaagcggatgacttggccggccttgatttcgacagcgagtttggaattgaggaacagctacccagggacttcagaatccgggtcaatcagcgaggcagcggcaagagttatctccaatggaagggtgtattcatcggagacccactgaccgacaacattgccgatcgcgatggctaccggttccatgatgttttccattttgcctatgtagccatcttgcattggtcgccggtgatacgggcattgatcaagcacaagcgaaagagcaatccgaaatacgatgaagagcaggacagcggccgggccatcgtcgttgaggaaggacttacagcctggattttctccagggccaaggagttgaatttcttcgagaaccaggaaaaggtttcacttgggattcttaagaccattggcgagttcgtgagcggttacgaagtggagaagtgtccgctgaagctctgggagaaggccatcctggatggctatgctgtctttcgccagctcaaggcaaatcagggtggctggatcattggaaatcgagaacaacgcaccatcaaatacatgccacttgagtctgaaaaatga

SEQ ID NO: 504144 - DNA, 663 bp, Stenotrophomonas maltophilia
atgaagatccacccattcgttgatgcagttgcttcgctgcagttcgaagactgcttcaatccgtattcggatcgttgtgaagttcatgatcgacgcgacgcaccgcgtcgccgtaccgccgcgctgtccgccatgttgcgtcgtgcaaccgaggaacccgtagacgcgatatggatcggacgagacctcggataccgcggagggcgccgcactgggttagccctgaccgacgacgttcacattagccagcacgccaagcgttggaatctcgaccaagtcgccgagcgtccgacgataggcagtgccgtggccgaacgaaccgccgcggtcatatggggcatgctggagcacattgatgctcgcatcttcctgtggaacgtcttccctcttcatccgcatgaatcaggagatcctttcaccaaccggcagcacaacgcgcgtgagaggcgagctggcgaagaactgctccaacagctcattgtcttgctgcgcccgtctcgcatcgtcgccatcggcaacgatgctgccgctgcggcccagcgcatcacagattccgtacccgtggtttgcgtgaggcatcctagctacggggggcagacgcagttccagaagcaaatctcggaactctatgggcaccccatgagcgccgggtcattgttttga

SEQ ID NO: 504145 - DNA, 486 bp, Stenotrophomonas maltophilia
atggcacggaaagtcttctatagctttcactatcaacgcgacagttggcgcgcctccaagatacggaatattggtgttgtggagggcaaccagccagcaagcgataacaagtgggaagaggtgaaacgaggcggcgaggccgcaatcaagcgctggattgacgatcaactgcaagggcggacatgcaccattgttctggtcggcgccgaaacggcgaatcgccggtggattcggtatgaagttgagcagtcatggaatgctggaaaggggctcttggggatacgagtccacaagctactggaccacaaccagcaaccatcagttgccggggtcaatccgttcgactcatttaccttgaacgacggtagaaagctatccaccgtcgtccgcatctacgatccaccgggggccaccagcagcgcggcctacaaccacatcagtgacaacttgtcgggttggattgaagcggcgatcgctgctcgataa

SEQ ID NO: 504146 - DNA, 588 bp, Stenotrophomonas maltophilia
gtgagcgcaatcttcctttcagccagtgtcccacttgtcggccgcggctcgtatcacgagaccgccaatccatttctcatccagtgcgctgtgagggaactggtcatagccgtcatccgtcagcacaagatcgtgtggggaggccatcccgctatcacgcccatgatttggagcatctgcgaggatttgggggttgattattctggggccgtggttctgtatcaaagcacgttcttcaaggatcgttacccggaagaaaacgaccgttttcacaatgtggtattcaccaacgcagttgccggtgacagagatgcgagcctgctgctaatgcgggaagaaatgctatcgcgcgatgatctcgttgccgctgttttcatcggcggcatggaaggagtggaagccgagcatgaactcttcaggcaatttcatccggtcgccaaagttctgcccgtgccgtcgcccggtggggcggccttgaacttggcaaaagatcaaggttatttcgccgacgcggatcttggtgatgtggactttgcgcgactttttcacacgcatctcgcgttgaacactcaaggcgtagggggctga

SEQ ID NO: 504147 - DNA, 1143 bp, Stenotrophomonas maltophilia
atgcccgccctttatcaacttgctctgcttggcgcaccaactgatgctcaggtttccgagcttgaagaagtcatcggaaaggctgtgggtatgttcaatttgcgattggggcatgaggtcggatgggaggttcgtcccgaagagttcaacccagatcaacaacggtcgtctgctgcggtatttttcggtggtgagaacccgcctctcgccaacgtagcaaagctgctggaacgaggcatccctctgctgccggtggccaccgatgtcaatcgagtcagtgcagagatcccgaccttgctgcagccgctcaattgcttggcgtacaccgctggcgggtcgcaacgtgtcgcaactgctttgctggagtgtgccgggttacttcctcgacagcgccgggtattcgtaagctatcgccggggcgaagctagggaggctgccttacagttgttcgatgcactgtctgctcggctcttcgatgtgtttctcgatacacatggcattccgcctgcggaagatttccagccaatgctgtggcaccggctttgcgactcggatgccctgctcatgctcgacacgcctggctactttgaaagccgctggacgagcgcagagttcggacgcgcgctggcgaaaggtattagcgtcctacgggttggttggccagactgcacgccatctgcgcgaacagccacagccagtcgcgcagagttattgcccgaagaagtggatgcagccacaggacgcctagcggacagcgctgtggagcgaatctgtcttcagcttgaagaagttcgcagccaaagccatgcggtccgttccgtcaatctagtgagcaatttgcgtaacgcaattcaaacgattggcggacaacttgtcggagttggacctaacaaggcggtctatatccagctaccggatggccggaatgtcgttgtctacccaacggttggtgtgcccacgtcgacaacgttgcatgacgcatccaccaattcgccggatcagtcggttgccgtcgtttacgatcatgttggcttgcatccccggtggctggggcatttggactggctgggccagcatatccactccgcacggtgggtcaaagccagcgaggctgggtggcaatttgcagactgggaggcctga

SEQ ID NO: 504148 - DNA, 507 bp, Stenotrophomonas maltophilia
atgtcgcagctttccctctcttccgatgcctcgctgctggtgcgtgacggccatggccgctatctgccggcgtcggccgaccagattctggaggccgcgcgtcgggtcatcgaccagaagatgcagcgtggtaccgagttcagttcgccggcagtggtcaaggagtatctgcgcaccaaactcgccggcttcgagcatgaggtcttcgcaatcctgttcctcgacacgcgccatcggctgatcgagtacgtcgagatgttccgcggcaccatcgaccaggcatcggtgtatccgcgcgaggtggtcaaggaggcgctgcagcacaatgcggcggcggtgatcttcgcgcacaaccatccgagcgggaatctcgagccgagcgccgccgacaggacgctgacccagcggctcaaggaggcgctggcgctggtcgaggtgcgcacgctggatcatgtcattgtcgctggcgaccgggcgacggcatttgccgaactcggttggctgtga

SEQ ID NO: 504149 - DNA, 810 bp, Stenotrophomonas maltophilia
atgagttcaccccagccaacgaacgcgcagcaaatctgcgagaacatcctcatcgagggaaagcgctacaacatcgagcacgacatactgcccagcgagaatgccgtcgccgaccgtctgctcgcccgtggcgtcgagctgaaggacgcctatggcgagctgtacgagaagctgcaccggcatcctcccgcactcaaggtcttcttggacctcctgctgagcacggcggcgttctggagtccggagaagatcgccgaggcgcgcgtcgaacgggacgaactggccggcgtcaaccggcagatcgcgcggaaggccgaagaattggcggagctgctggagcgccgcaccgatctgaacaacacctccggcttcagcagcgaaacgcagtaccacgtctgcgacgtgatcgaagcggcatccgagcgcaactacctgttcaactcctgggtcaagaatcgcctggatgcccttcgcggccagttcgacctgaaatactggccctcgctggatcagttcgttcgagagctggccgccgacgcggagagcgccagcatggagcccacggatcctttgaccgcagcggccaccgtggcagcccgcccgtctcgggccgacttcttcaaggcactgtttgccgccatcgaagagaacggcgcacgcaactacgggcagctacccaaggacttcaaactcaccgacggcgcgctggcgtcgttggcgaactgcgcattggacttggagcccgatgacttggccgacagtacctacgtgaaacggcttcgccagcgcgaacgcaacagcggcaggtga

SEQ ID NO: 504150 - DNA, 825 bp, Stenotrophomonas maltophilia
atgcaacttgcatcccgtttcgcttcccgttccccggtgctgcgctcggaacgtcccttgtcggatgaccaaatccgcgccgtggccccgtccatcttcgcggaggccccgcacgaaagccgctcggagcggtacagctacatccccacggccgccttgctgaccgaactgcgcagggagggttttcaacccttcatggtgtgccagacccgagtgcggcaagacgaccgccgcgactacaccaagcacatgattcggctgcgccacgccagccaggtcaacggcgcggaggccaacgaaatcatcctgttgaactcccacgacgggagcagcagctatcagatgctcgccggcatgttccgcttcgtgtgccagaacggactggtctgcggcgacaccgtggccgacgtgcgcgtgccccataagggcgacattaccggccacgtcatcggaggcgcctatgacgtcctgcatggctttggacgggcgcaggcatcccgcgatgccatgcaggccatcgcgctggacaacggcgaggccgaagtcttcgcccgagccgcgctggcgttgaagtacgacgaggacaagcccgcgcccatcacggaatcgcaaatcctgatgccgcgccgtcacgacgacagccgccgcgacctgtggagcgtgttcaaccgcacgcaggaaaacctcatcaaaggcggcctgtccgcccgcgcggccaacggtcgccgccagaccacccgacccgtgcaaggcatcgacaacggcatccgcctcaatcgcgccttgtggctgctggccgacggcctgcgccaattgaaagcctga

SEQ ID NO: 504151 - DNA, 2037 bp, Stenotrophomonas maltophilia
atgaacgccattacccaaaccgaagcccacgccaccgccgcgctggaagtggccgacccggccaagaacctgattctggttccgctctcgcggctgctggcgcgccgctccaagcgcaacgtgcgcacgaccccgcgcccgtccatccccgaactggccgcgagcatttcccgtgttggcctgctacaaaacctcatcgtcatcctcgccgccgatggcgagcagtacgaagtcgtcgcgggcgaccgccgcctgaccgccttgaagctgctggcgaagaagaagcgcatccctgccgacttcgaggtgccgtgcctgctggtggccgacgcttccgcccgcaccgtgagcctagccgagaacgtccagcgcgagaacatgcaccccgccgaccagttcgcagccttcgccgcgctggtcaaggaaggccgccccatcgaggacattgccgccgacttcggcgtgtccccgctggtggtacagcggcgcttgaagctggccaacgtctcgccgcgtctgctggccgactatcgggccgggagcgtgacgctggaacagttgatggccttggccgtcaccgacgaccacgccgcacaggaagccgcgttctacgaggcgccgcagtggcagcgcagcccgtccacgctgcgcgaacgcctgaccgaacgcgaaaccgacgccacgcacccgctggcgcgcttcgtcgggctggacgcctacacggcggcaggcggcggcatccgccgcgacctgttcgccgaaggcgacgccggaacctacctgaccgacgccgcgctgctggaatcgctggggcgcggcaagctggacgcgctggccgagggcgtgcgcgccgagggctgggcgtgggtggaagccgtgccgcacttgagccatgccgagcggcaggcgttccagaacgccccgcgccagcgccgcgaaccgaccgcccgcgacgcccgccgtatcgcctcgctgcaaacccgcctcgacaaaatcgacgccgaattggaagacgcctacgacgccgagaacgaggacaaggccgaggcgctggagtcgcgccgcgaacaggtggccgaggaactgcaagacgcggaagccgccttgcaggactacaccccggacgtgcgcgccgtggccggcgccatcgtcaccctcgaccgcagcggcgaggccgtgattcatcgcgggttgctgcgcgaagcggaagcgaaggcactgcgcacgctggaaaagctacggcagggtttcacagcaggcgaaggcgcgaacgacgaggaaggcgacgacgccgacgaagcacccaaggccgcttgcctgtccgaccggctggcgcagcggttgagcgcgcaccgcacggcagcgctgcaagtcgaagtcgctcggcatccgcacgtcgcactggccgcgctggtgcatgggatggtgcaaaccgtcctgcaggacggcttcggccacgacttgccactgggcgtacgcctgaccgtgcaagaccggccggaaggcttggccccggactggccggaatcacctgccgccgtggcgttgcgtgacttgcagcaggtcgcgggcgaggcattgccgcaggacagcaccgaactgttcgccgcgctgctggcgaagccgcaggacgagctggtgcggctgctggccgtatgcatcgcggccacggtggacgtggtgacgccccgcgctgcgcaacgccagcccggcgcggaactggcgcaggccgtggggctggacatggcggcatggtggaaaccgaccgccgagagctatttccggcacatcccgaaggcggcgattctggaagccgcgggacagttcgcaccggagcacgtcacccggctggcgaaattgaagaaggccgacatcgccagcgaggccgaacggctggcggacgggacggactggatgcctgccgtgttccaggccgacctcgacacgaaaccggaaggcgttccggaggcagcggacgaaccggatgcgctggaagatgccgccggcgaggtggaagcccacacgctggccgcgtga

SEQ ID NO: 504152 - DNA, 753 bp, Stenotrophomonas maltophilia
atgtctgcatctacttactttgtttccgaagccgccgtccgcaacctcaaacagcgggcagagcgtcgcgtgagcggcgtccgttccgcgcacatgagcgaggtcgtggccgccgcgctcgggttcagaacccatgcggcactgcgcgctgcactcaacggtcgtgccaccactgaggccagcaagccgagcaatgcgtgtgcggtacagcggctgcggcaactgggctacaacccgcccgacgatctgcacctgctgccggagttggatcgttcctactcgccgttcaagacctatccgttgcgtaagcaacgcggagtgcgctggactggttggcgcaacctgatggttgcggcgatcaacgctggcctggagcagcgtctgttcggactgtcgccgggcgaggactggtgggcaggcgccgatccgaagaacaacggcggtgtgcgcgggctgtaccgcttcacttatgacggcgacttgccggcgaccgccgccgttaccgcgatcagcggcgatgagctgtcgatccacgtgctgctcgacccgcgcaatgcgcagatcgaggcggactattgcggcggcatcgaggacggtgcggcgttcgctcatggctggctggaacgccggctcggtgcgtggatacaggatggtggcgaggacttctcgtgcaagcgcgccgtgcaggcgcgcgtcgccgcggtgacgatcgagccgcacggctataccgaccagggtagcttcatcctgtag

SEQ ID NO: 504153 - DNA, 3270 bp, Stenotrophomonas maltophilia
atggagtcagagaacatcatccgctattggcatgcagtcgaattgctgcagccgcaatcggcccccaagatcaaaaagcgcagcagcgcctatggagcgttccttcacgatacgcccagcacgcgccccatccctccctgggcacccgggagcattgtcagcaagcaggcgcttcctgataagcgcgaatggagccacacgctctatgctcacctgtacgacagccggctcgtcgccgccgcgctcaaagaactgtacggcgctgaccagggctaccgtgagccgcagcatcgcgagtcggcgctgttcgccgcgaagttcacgatggccgggcaactggtggaaaacagtttcgtgctctccagcgaggcctggttcctcgggcgggcactggcgggacaggactggacgcgcggattcgaggacgatcaacgggccgccgccgagcaggcgcaaacgcaactccagggccatgtgtccggcgatgcactgcgggacttcaccctgtgggtgctgcagttcctcggcgtggcggacttctttgcagccgtgggtcgcccgccgctgcgattccgctcccaacctgtcaaacccgacaaacccacgtcggaagacgatccgctcaacagcttcctgctcgaagacttggccaccgtcgccgatagcctcggcaagggtgtgacgagcgaagcgttgaaccagtacctgcgccgacacgatccgcgacagcgcctgcacatcgacgccgacgtcgcttcgctgtcgctgatcgagcgactgatgccgcaggcctatgccgacagttgctggccttccgaacggcatcttgggcttgtgcattcccagcagctagccgtgaacaccgtcctgtccacgcttggcgacggacaggggctgctgggggtcaatggtccgccgggcacgggcaagacgaccctgttgcgcgacttgattgccgccatcatcaccggccgggccgacgtgcttgccacgctacgccgggcatccgacggcttcgccggcaatgcgcgcgaagccagcaacgatggcggcaaggagcaggtagcctacaagctcaatccttcgctgtacggcttcgagatcgtggtcgcttcgtccaacaacggcgccgtggagaacgtcaccctcgaactgccccagcgcgacaaaatcgacgagagctggttgcccgaagccgagcacttcgccgacctgggcgagctgatcaccgacaagccggcctggggattgatctccggtgcgctgggcagcaaggctcggcgcaccaagttcgtggagcggtacttctacgggcagcgcccgtttggcggaccggaccgtgcggacggtaacggggaagtcagcgacgaggccgagactgacgatgagaatgtcgccaaggccctgtttgccggtccgaccactgtggccaacaccgatggcgagcaagcgcttccgcagcagcagaagaaagcgccggaaggcctgatgacatggctcggcaggcacagccaactcaacaaggagcgcacgtcggaacaacgccaagccctgtggcagcaggccgttgccgagtaccaggaagccaaggcgcaggttcgcacggcttgcgccgatgcctatcgcatccgcgcactgatccagaccctgctaacggtcaggaagaagttagccgaggcgaccgccgccgtgcaggcgctcgaacagcacctggcgcacacggcggaacagcaggcgcgcctggacgccgaggaaggccgccccgccaacgcggcattcaaacatgcgctggaggcgctcacacagcaccaggcgagcaggccggggttctgggcgaacctgcgcagcctgtggggagcgtcacgcgcatggaagacagtgctgaagctgctgcaagaccagcgcgaccacgcgaaggccgagttcgatcgcgtcgcacggctcgccaagcagttcgaggcctccagccagcagctagagcggcagatcaccggtgcgcggcagacgttgcagcaatggcatgcggaagatcaatccctgacgcaacaagccagcgacttggccagcgcctgccgggccgaccacctgttggcttggctgcgcggcggcgtcatcggtcacggcgatgccatcgaactggccgagccctggcacatcgagggctggcgacaggcccgtgcgcgcgtcttcatccaggcactgaagctgcatcggacgttctttgagctggaggccgcacggatgcgctccaacctgttcctgatcaacgcactgttgaccggcccgcgcttgcaggggctctcacgcgatgcgatccgctcggcttgggcctcgctgttcatggtcgtgccggtactcagcagcaccttcgcctcgttcgcacgttcgttcagctcattgggtgcgggggagatcggctggctgctggtggatgaagccggacaggcgcccccgcaagcggcggtgggtgcgctgtggcgcgcccggcgcgcgctgctcgtgggcgaccccctgcaactcaagcccattgtcaccgtgtccgacgcggtgctggaacatatgcgcacgcgctaccgcgtcgatgcgcattggctccccaacagacagtccgcgcagaccttggcggaccaggctacggcgtggggtcgcctggcgggaccgaccgacagcaagacgtgggtggggttgcccttggtcgtgcatcggcgctgcgacaagccgatgcacgggctggccaaccgcatcgcctacgacggcgccatggtgtacggcaccatcgcaccgcgcgccgacaaggaaacgcgcgcccgtctcccgacgggatggatccacgccagagggacatccgacgggaactgggtgccggccgaaggcgaggccctgcgcgcgcttctcgccctgctgcgagaggatggcgtggatgcggccgacatctcggtcatcacgcccttcaaggcggtccaggaaaacctcaaacgcctgctcggcaacacgatggtttccggaaccatccataccatgcagggcaaggaagcaccggtcgtcatcatggtgctgggcggcaataccgaaggttccggcgcacgcgattgggcggtctcggagcccaacctgttgaacgtggcggcgacgcgggccaagcgacgcttctacgtgatcggcgaccggaacgactggcagaaccgcgctctgttttgcgatgtcatggacctcttgccgctccagcgtcttccagagtgcgaggcggtgttgacgacacaatctcagtaa

SEQ ID NO: 504154 - DNA, 621 bp, Stenotrophomonas maltophilia
atgggcgggccgcatcgcgcagcggccgcaacgcagtggaggacctggaagcgcaaagaatttgctgcgcgaggaagccgcgcagcggcggggaaattgtttgcgctggaaggttgcggccatgaagcccaaggcgtagccgtgccctcgccaggattcacgacaagccaaggacgcacgggccgccatgtcccgaatggagacttggccgactcggcatcccgcacgacagcttcatcggcttgcgccctgaagcggacaaggccaacaccccaacgacagacgagaacgctccttgccgcagcgtttggcaacctgtttgaggcgcggcgtggaagctccataggcgaggtcgggcggcgtgtcggtgaaccgtccttcgtgacgtgcaggcgacgaaccgccagcgtcgaggacgacacgctttcgcgcaacctgccgcagcaagccacagcatatccgccacgccctgcccgttgcggcgggcgctggtctaaccgatccggcgatgccggttcggcggtattcgaggggcgccaagctgtgcgcggtggggatgggctttatgccgaccccctggatgcaagcgaagcgcgtagagccacaggcgcgaaggcgtga

SEQ ID NO: 504155 - DNA, 315 bp, Stenotrophomonas maltophilia
atggccaacatcggcaccttcaccgcagacaaagacggcttcaccggcgcgctccgcaccctgacgctcaacgtcaaggtcaagctggttcccaacgacaagggcggcaacgagaacgcccccgacttccgcctccaggcggccagccacgacatcggcgcggcgtggaagaagaccagtgaggccgggcgggactacctgtcggtgaccctcgacgatccttcgttcccggcgacggtctatgcccgcctgatcgaaggcgaggacggcacgcacgacctgatctggtcacgcagcaagccgcaggcggcgtga

SEQ ID NO: 504156 - DNA, 291 bp, Stenotrophomonas maltophilia
atgcagaagcgctccgtccagcccggccgaccggccggcgtcaccaccttcgatgccgagttggccaaggccttcggcgcggcggtgcgtgcgcttcgttcggagcgcgggattgcgcaggaatcactggcgaacctggccggcatcgagcgctcccacatgggcaaggtggagcgcggtgagcacatgccgacgctggcgatcatcttcaagatcgccggcgcgctcgggtgcagcacggcaaccctcatggccgcgacggaagctcagctcgcggcaccggcgacgtag

SEQ ID NO: 504157 - DNA, 351 bp, Stenotrophomonas maltophilia
atgacgcatccgctcaccacggccgaggagcgcgcgcaactgcttgccaacggcgcggcgcgtgcggccggccagagcatcgacccgctgccggtggtgcggctgttcacgccggatgcgcacgcgacctggctgctggccgcgctcgacccagccgatggcgataccgcctatggcttgatcgacctcggccttgggatgccggcgctggggacggtcaaactgtccgacctggcggccatcgtcgggccgcagcagcggcccgtcctgcgtgacctgtacttccaggcgactcggccgctatcggagtacgtccggctggcgcagcgcgatggctcgatccccgactaa

SEQ ID NO: 504158 - DNA, 756 bp, Stenotrophomonas maltophilia; identical to SEQ ID NO: 342478

SEQ ID NO: 504159 - DNA, 369 bp, Stenotrophomonas maltophilia
gtggtcgctggcatccttgtggccggcttgctgggctggctcctgtaccgcacgcccggtgcgccggcaccgcgcacagagcccggggtcgcgcaggcgaatccggccggcccaccctggcgccacggcccagccgatgcgcgcttcacgctgacgctgtacgccgacctggagtgtccgttctgcaaggcctactacccgaccctgaaggcctggatcgatgcccatcccgaggccagcctgcggtggcatcacctgccgctggcgatgcacgatccccaggcgagtcggctggctcgcgtggccgagtgcgcaggcgaagcgcaaggccacgaggcctttttcggtgccatcgcatggctctactaa

SEQ ID NO: 504160 - DNA, 198 bp, Stenotrophomonas maltophilia
atgcgcagcggcatcaacgccacgcccaccgtgcggctggacgacggcctgacgggcaaatcgctgctgctgcacggtccggtcgagggcgatgcgctgctgtcggcgctcgatcttgtctccagcgtgccatcgcgccctgcggagcgccctcgtgccgttgatgcgaccggcgaagagaccgacgcaccacggtaa

SEQ ID NO: 504161 - DNA, 600 bp, Stenotrophomonas maltophilia
atgctcgccagcaatacagaatcgccccccgtcgcccagccaggaggcgccagcacctttctcgaagaaaaagcctttcgcgcacgcacggtactcgtgttcgggaccgtgacggatgcgctggcctcggagaccgtccgcaagctcctggcactggatgcggaatccagtgcgccgatcaccatgatcatctcctcgccgggaggccacctcgaatcgggcgatgcgatccatgatgtcgtgcgcttcgtttcctcgcccgtcaacatggtgggcacggggtgggtcggcagcgcggccacccatctctacctgggggcgccacgcgagcggcgcttctgcctgccacagacgcgtttcctgatccaccagccgagcggcggggccggcggacccgcaagcgacatcgcgatccaggccaaggaaatcatcaaggcccgggagcgcattgcccaggtcattgcccgagagaccggacagcccctcgaacgcgtactgaaggacatcgagcgcgacctgtggatgccggccgaggaagcggtttcctacgggctcgtgtcgcgcatcgtccagcgccgcgaggaactcatggccgcgtga

SEQ ID NO: 504162 - DNA, 621 bp, Stenotrophomonas maltophilia
atgctcaagatcctcggaaagcgatcctccatcaatgtccgcaaggtcctgtgggcatgtgccgagcttggcctgccgttccagcaggaagactggggcagcggctttcgtgacgtgaccgaggacgccttcagggcgctcaatccgaacgcgatggtgcccgtgctgatcgacggcgacttcgtgctgtgggagtcgaacacgatcctgcgctacctcgccaatcgccatggcggtgcagcgctgtacccccaggacgccatggcgcgcgcccgcgtcgaccagtggctggactggcaggcgtccgacctcaaccgtgcgtggagctacgctttcatggcactggtcagacgctcgccggagcacgcggatgccgccgaggttcagcggtccctggaagcctggcaccggttcatgcgcgtgctggacggccggctggtggagacgggtcgctacgccgcgggcgacgcgttcagcctggcggacatcgccattggactgtccgtgcatcgctggtaccagacgccattcgaacaccctcgcctggaggcagtggccggctactacaggcgcatcgaacagcgcaatgcgttcatcacgcattgcatcggcgtgccgtga

SEQ ID NO: 504163 - DNA, 582 bp, Stenotrophomonas maltophilia
atgacctatgcgttcgtgacctccatcacgccgggccccaacaacaccatgctgctcgcgtcggggctcaaccatgggtttgtccgcagcgtgccgcacatcctcggcatcagcatcggctttgcggcgatggtgtttggcgtaggggcggggctcggacgcctgttcctcgcctatccctccctgtacaccaccttgcgcgtggtcggtgcggtctacctgctctggctcgcctggcaggtcgccacggcccagccgctgcaggagacctccgcgcccggccggccattcggcttctggaaggctgccgccttccaatgggtcaatcccaaagcatggatcatggccatcggggccattgccacctacgcacccgccgagggcggcgtgctggcggtgatcgtcatcgccgcgctctatgccctcgtcaatgcgccgagcgttgccgtctgggcggccttcggcacgacgctgcgtcgttggctgacggacaggcgccatttgcgcatcttcaacatcgcgatggccatcctgctcgtgctgtcgttgtatcccctgctgtccagccaggccacgcaatga

SEQ ID NO: 504164 - DNA, 693 bp, Stenotrophomonas maltophilia
atgacgcgatccccccatgcgagcgaccttctcctcgtgcatggcgcttggcacggcggctggtgctgggaacgcgtggccccactgctggctgcagcgggacggcgcgtggtgacaccgacgctgggcggcctggatggcacccctggacgcttcgggctgagccaccacgtcgacgacatcctggcccatgccgggaacctcggatcgatcacgctggtcggccacagctatgccggattcccggcttgcgccgccgcatcacgcctgggagaaaggatcgaccatctggtgctcctcgacgcgttccttcccgtcgacggagagaagttgctcgatcacgcccctcatctcatcgaccgctacgccagtgccatggccgccgatctggactggcggatccctcccttgcccgccgcgcagttcggcatctccccggccgaccaggcatgggtggacatgcgcctgaggggccagcccgcacagacttacttcgaatccatccgcctgcaaagcccgctgtccggctgccgcaggacctatgtccgttgcagccaggcgcccggtgagcttctcgcacgctccgtctcacgggccaggaacgacggctggaactgcctggaactggatgccccgcatgatgcgatgatcagccatccgcaggccttggccgatctactgctggacatgtaa

SEQ ID NO: 504165 - DNA, 354 bp, Stenotrophomonas maltophilia
atggaactgttgtcccatccactggtgctttgcgatccggaagcgtgcgcaggatgcagcaggcaaatcgacaggctcctgcgtgttgcggaacgcgaggtccagattgccgaacgggtggtgtcccatgacttgctgatggcgctggcggcagcaggctacggcctcgggatcacgacccgcccgcacctgtccctgtggcggcacccggacgtcgcttcgcgtccgctggccggtgaggtgccaccactgacgacatacctgctgcgcagggatgccgaggattcggagcaactgcgcagcttcgtcgaaaggttgcaacgacccaggaggcaggtacacggccaggagtag

SEQ ID NO: 504166 - DNA, 408 bp, Stenotrophomonas maltophilia
atgctgatgcgccatattcgatacttcatcgccgtggcggaggaactcagctttacgcgtgccgcggaacggcttcacatcgagcagtcgccgctgtcgcgttccattcgtcaactggaagatgacctgggcgtcaggctgttcgaacgcaacagccatggcacccggctcacatgggctggacaggtcttccttgacgaagcgcggcgcgtgctggcggccgccgagcaggcccgggccggcgcacgcgctgcggcaaccggataccggggcatcctgcgaatcgcgctgtccgatggaatttcgccgtcgcacctgagcgacctgctggctcgctgccgcgaggagtcgcccgaggtcgagatcagcctgttcgaggtaacgttcgcccagcagttgaaagactga

SEQ ID NO: 504167 - DNA, 726 bp, Stenotrophomonas maltophilia
gtgctggccgggcggcgacctggccagggcggcctgcccgaaccggacgccgtgcgagccgcaccgctggtggcgcgtgtgccgctgggcgatgtgaacaggatgatcctggcgcgcccggacgtgatgcaggccgagcgcttgctcgccgccggcgtcgaggatgtcggcgcggcgacggccgacctctacccgcgcatcgacctgggtggcttcctcggcttcttcgcgttgcgcgacggagatttcggcagcgctgcctcgcgtgccttccagatcgcgccaacggtgtcctggcccgcactgcggttgggcaatgcccgtgctcggctgcgcggggccgaggcgctgtccgacggcgcgatggcgcgatatgagcaggtgctcctgacagcacaacaggaggtcgagagcgcggtgacgcaagtggtcgaacagcagcgccaactggcgggactgctgcaagccgcacaacacgcccaggccgcgttcgacatcgccgacaggcgctaccgcgccggggccggaagctaccaggccgtgctggagaaccagcgcaccctgttccaactgcgtcggcagatagcgcagcaggaagtcgaatcccagatacacatcgtggccctgtacaaggcgttgggctggaacgtcccgggtcccaaggacgcggaaagcctgtcttccagcgccggccagcaggctgcgaggcaccgatcgggagcgtag

SEQ ID NO: 504168 - DNA, 981 bp, Stenotrophomonas maltophilia
atgtcaaatccaaccacgatcattgatgcattcctgaccaagggtgcccagctatttcgcgagcggcccttcgggccattgccatcaccggaagaagcactggacgagcttccgattccaacactggtctatctgcgatggttggcttcaacgggcgccttcatcgatcaggcggtgggatcgaccatcgcccggtcaaatttcccaatggaactcgtcgcaaacctgcaggcggcatttcatggtgagattcccggcaacgctctcagtgaggatgcactgggcttcactgtcgagtacttcagtccacgcgccacctacctctctgacttcttttcgttgttccctcaagacgccatgccttcgccggacgccatgtgggacaaacaggagcaggtgtacgcaattatcgactcccgtctgcagtcatggcgcaacggcgagcccatcgtccgggcggtcatccccaatgccgatcaacaaggacacgccgaaccggctacgccgctggacgctgacgtctggatcacgatgctcgcaacgctatcgaatgctgcggtcacccacgaaggtgaccgtgcatatgccaaccacttctgcaggccactgacgaaaccaccgtcagtagaagtcgtccttgcggtcatgagggaattccttcggaacccgccatatgacgcgtcgatcatgtgtgcagccgagaacttcctgtcggacattccgctctcccgctacatcaaagcctattccatcctcgcacctgaactgctggaccgttcttcagatgccgcgctcaatctgtttgattatccaggttgtgaactgacgccacgtcagatacggcagttcatcaaggaactcaggcggtgcaatcccggccgcgatgtggtcggagagctggcccagctggctattgagtgggattcggaggacgacgagacattttcaatcgtcatcgaagcagcgcagaagcaagggtag

SEQ ID NO: 504169 - DNA, 324 bp, Stenotrophomonas maltophilia
atgtctacggtaagtaagctgggcgaagttgaggtgactctgctcggcgcagtcgacgacgttctcgatgacaatgttgacgtagtcatcaggcttccccagggcgaggtaagaacatcaacgttcttcaccatgaagaatattgaggcgatcgttgccagatacagggcgagtggtgagtgcttgtcgggaagattcttctggtccaaagacatggtcatcgttgaagatcttcgaatggagaccattcgtgagatcgtccatgaactagtccgtagtggggagtatcgtcatgcgttcggtattgccaagcttgaggattga

SEQ ID NO: 504170 - DNA, 213 bp, Stenotrophomonas maltophilia
atgagactgctgcgctctttgaaccagcgtccagtcgggatagagctgtggaggcacaccgcgcgaggttacgacgtggatggtcttggcgggtggtacagcgtcattgacgacgagaaagaaaatttcgatgaggcagttgaatatctcagtaggggctcgtttggagacatggatagattcttcgtgcagtacgaagacatgaatggctga

SEQ ID NO: 504171 - DNA, 3720 bp, Stenotrophomonas maltophilia
atgctcaggtcggcggctgcggctacttcatcatcgttgcgggcattctgcccggagttcccggagcttccccccgaacccgagtatcacgcgtcgatctttgccggtcagagcgttcccacgacgatggtggtgggccagcgttacaacgtcagcgtatccatgcgcaacaccggtacgctggtgtggacggcggcgcagaacgtcaatctgggctcgcagaacccgggcgacaactggacatggggcttgcaccgtgttcccaccccgggcagcgtcggcgaagggcagaccgccacctacaatttcacggtcaccgcaccgcggaatgcgggccgctacaacttccagtggcgcatggtgcaggacggggtgacctggtttggcccaagctccagcaacgtgcaggtcaacgtcgtcggatcgaccatccgcggcaatatcgatggcatcaccaacgggcagatcaccggctgggcctgctccagcggcatcaatgatccgatcgacgtccatgtgtacctgggcggcgctgcgggtgccgacggtgcggtcatggtgggtggctaccgcgccggcagcgtgagcgaacctggcgtcgccaccgcctgcggagcagcgggcggcgcctatcgtttctatattccgatccagggggactggacggtcagccatgccaacaagcccatctacatccatggaatctcaccggtgggcgcgcccaacctgaccattggtggttcgggcaacttccgaattccctacaacacgcctccgtcggtcgcgttcaccgcgcctgcggccggtgtcgtggtggcggagggcgggtccacgctgatctcggccaatgcgtccgatcccgatgacggcgtatcgcaggtgacattcctggtcgacggcaatgcccgggcaaccagtggtgcaccctatcaatggacctacagcgatattcccgagggaccgcacacgctccaggtgcaggcccgcgatacccgcggcgcggtgaccaccacgccagcccggacgatctatggttcacgcgtgattggagacaccggcgtggccaacggtgccatctttggttgggcatgcgcaacgcacttcaacggttcgattccggttcacctctatcttggaggtccgtatggaacgggtgtgggctatggcatcgccaccgcaaacctgggtagcgagcctgccatcaacaatcaatgcaagggtggtggtggcgcgtaccgtttcagcattccgatcaccgacgcaatggtgcgcgatcacggtggcaagaagatctatctgcatggcatatcgccggtcggcggcggcaacaatgtgctggcaaacggcggtaccttcagcgtgccggtcaacagcccaccgacgatatcgctggtatcacctggcaacgtgcaggtggaaagtccgggagagatccggctggttgccaacgccagcgatcccgacgatgccgtggcgcaggtcgctttctatcgcgatgggaatcaggtcgcagtggttggcgccgcaccctacgagttcacggtttccggcctgggtgcagggagctacagattccatgcggtggccactgatcgacgcggcgcaaccgcgatatcgaacacgcatacggtgtcggtcgtccgcgggcagtcgccccgtgcggttacgcggacctatgtctacgatggcaaccagcggctgtgcaagaccatcgagccggaaactggcgctaccgtggtggactacgatgccgcgggtaacattgcgtggacggcgtccgggcttgatctgaccgacaccggtgcctgcaaccgcgccgaggcctcggcttcggggcgccgtgtggatcgtgcctacgacgcactcaatcgtgttgtgcggatacgcttccctgatcgcaacggcgaccaggacttgagctatcgcaacagtggcgaagtacagagcgtcaccacctggaacgaccagggcaggcagaccatcgtcaactccttccagtacaacaagcgcaacctgttggtgggcgaaagcgcggccagcaccggacgcccaacctggtcgatggggtacggttacgacgcgcagggcgcgctggccagcgtggtctatccgggcggtctgacagtcagctacgccaacaatgcccaggggcagccgctaagtgtctccgcgggcggtgtcagctacgcctccggtgtgcgttaccacccgaccgggtcggtgcagtccttcagctatggcaacggtattgtccatgcgacgcagttgaacgcgcggcaacttccgtatcagcagaccgacgcgggcgccatgtcctatcgctacagctacgatgcgatcggcaacgtcacggggattgcagatctgcagcaaggtgccggcttcgatcgcacgttgcagtacgatgctggccagcggttggttgctgccggttcggccagcttcggcggtgatcactggcatcggtacagttacgacgcgcgcgacaacctgctgtccgcctcactgggcggcgtcaaggactaccgctactggtacgacgagcgcaatcgccttgccaacatcctcaatgcggatggcgcgacgatcatcgggctgtcctatgacgcccagggcaatctgcgaagcaagaatggtcgggtccacgaattcgatctcggcaaccgcttacgcaccatccagggcctggaaagttaccagtacgatgccgccggccgtcggacggtgacctccgatggtagcggtgatcggctgcgctcgttctatggacagggtggacagctgttgtatgagcagcgacgtgacggcggggcggcggagttcatcatgctgggcagccgcctgttggccaagcgccagggtggcgtggtcacttatcagcacgtggattcgctcggaagcccggtggcaaccagcaatgcggcagggcaggtgaccgagcggacacagtacgagccctacggccagtccatcggcaaggccatcgatggcgtgggatacaccggccatgtctccgatgccgcgtccgggctcgtatacatgcagcagcgctactacgatccgcagatcgggcggttcctgtcggttgatccggtcacggtctatagcagccccgtgggtgcgttcaaccgctatcggtatgccgacaacagcccctacaattttatcgatcccgatggccggcaggccttcgggcatcaacgaagtgaggacattccctggtgggatgtcaccggacgcgtcggtaattggttcgcagaaacaagagatctcagtgcgcaggttggattcactggcgaccccattgcccaggacgcgcttgtcgaccagtacagggcggccggcgatgcaattgtggcagtgcagatggcggcattgccggagttctcaggcgccgcacgagctgaagcagtggtctccaggcatgcggcagttggggctgataagatcgcccagaaattctttgagcgggcaactaccgccaggcgtattgcccttcaaacggacaagttccattccttcccgtctgcggtggacgcgtatgctgccagatttgggcaagtaaaaactgtccaggactctcgtggcaaagcagttcaaatgctgacggttcgtggtgaaatggaaggaagcaagggcactgtcaagggtacgtttgagtacatcaagaactccaataatgagatctaccacagattgttcaggcctgatggaaaataa

SEQ ID NO: 504172 - DNA, 1026 bp, Stenotrophomonas maltophilia
atgcataatcgatcgtcacgtcgccggaagctcgtgcttcttctggcatgcatcaccgggccggcagtggctcagcagtactcgcgcaccgagcagatcacctattacgacagcaccagtgcatgggtactgggccaggttgccacgcgcaccatcaatggcgtcgtcaccgagtcgaccacttacgacaccggcacggcccttccagcaacgcgcagcgagtttggcatcctcaagaccaggctttcctacaacggtgacggcacgctggccagcagcgtcgacggtgccggcaataccacgcgctacggaagctggaagcgcggcataccgcagtcgatcaaacgccccgacggtaccacccagatcgccgcagtcagcgaccagggctggatcacccagattaccgacgagaacggcagcatcaccacctacggctacgacagcatgggccggatcaaccgggtcacgcctccggctggcgatacggtcaactggactccgacgacccggatcttcgagtccgttagcggcgaagagcatggcattgcagcaggccattggcggcagactgaaaccaccggcaatgcggtcactgtgacctactatgacgccctgtggcgaccgcttaccgtttggcagtacgacgctgcacgtgtggccgaaagccagaagtacacccgcttcgcctatgacagccagggccgtaaagtatttgcctcctacccttcagctgctgccaacccgagtacgggcgtgtggagcgagtacgacgcgcttggtcggttgacggcgtccagccaggacagcgagcagggcctgctgatcaccaccacggcctatggggccgattcttctggagcgttcaccctggtgacacaaccaggaggtcttcagacccgcacgtggtaccagatgtttgcagagcccaactacgaagcccccgtaaaaatacgcaaggcggatggaaccattacgaccattgcccgggatgttttcgggaaaccggtctcaatcagccgctga

SEQ ID NO: 504173 - DNA, 1758 bp, Stenotrophomonas maltophilia
atggaacatacaagggaaactgccaggtggctgacggtgatcttatcgctggggctcgcattggaggccagtgcaggcaaccagctctccgtggccgatgactatcccgcgcggctgcgcgcgagttcaacggtgcaatcgctttccgccgaagacgctttcggcgacaagctgggcctgtatacgggctcactggagttcctgcagacagacctggtactgccgggaggccccggcctggacatcgaagtgagccggaagctgactgtgggatcgcagggcggtacgcgcttcttctcagactgggacctggccattccctccgtacacggtgttttcagcgagcagggcggatggaactccggacttgacggccgcaacctcaatcgttgctccaagtatgcctggcccgctgttgagatcgtccagggggagtcaccatcgcggccgagacccgagcgccaggtgatgcccgaggatttctggcatggcacattcctttacctgccaggtgtaggcgaagaggagatcctgaaagtccaggagaacgcccggcttcgcccaggcaacggcggtacgtacccgctgaccacaaagtcgggcgcggccatccgctgcatcgcgatcaagggcggtgccgaggaaggattcgaggtactaaccccggcaggtatcacctaccagtttgccttcatggtgaagcggttcgagcttccaatcgtgacgtacggcccacagcctggcggaaacagcaacttgacgccaacgcgctacgtactgcagcgcgccgaccatcgccttttcccggtgaccgcccgcgaccgttttggaaacgccctcaattatgagtgggacgcaccgagcggccagctgcgccgtatttcctccaccgacggaagatctgtcgagttctcctacaacggcacgcgcatttcccaggtccgtgctgctgggagaacctggacctatgactaccccgcaggcgtactgacgacggtaaccctgcctgacaactcttattggtccttcacacctggcttgaccatgtcgttcgaggcagcaggaaacgtgccggcgttgcgtgcattctgcaacaatccgggcgttccaacttacagctcagtcgcttcaatgcagcaccccagtggagcggttgccaccttcacgatcacgccaacgctgcatgggcgctcgtatggatactacagttgcagcgcccagcccaatacggcgttgatacgggagacaatggagaccttcccagcccgctactacgcctggtccctcaccaagaaagtggtcagcggcccaggactgccagcaccctacgaatggacctacaactatggtccagacaatggttgttacgtaagtggtctggctgccaacgacccgatgacctgcaaaccgaattcgccaatggagaagcaggtcgtggttgtggagccctctggcgcaacggtgcgacacgttttcagcaacaaggcagatcattcggaagggtatcccctgcgcgtcgaacgccccggcagtgtgcagaccaccagctacgagttcggcgatccaggccagttcccgttgtatgctggaatcagcatcatgccagcagcaggcaggggctggtatctgtccaggatcaatcccctgcgcgagcgttcgacacttcaggatggggtgaaaagcagttggagggtgaatgccttcgacaccatggcgcgccccacaagcatcactgaatcgagcgccgtccagccctga

SEQ ID NO: 504174 - DNA, 4008 bp, Stenotrophomonas maltophilia
atgtacgctgaaaaactgcgcatggccgcggcggtgctgctgggcttcgtgctcatcctcatctgccaggtggcccatgcccaagcatggattgaactcaccgggccggcccagacatcctacactgcgcctgcaacctatcagttgcagctcaagagtggcgtcagaggcaccggccccaaggccgagtacctgtcgggcatacagctcttgcgtaacggccaggtgatctcgcggcttccgaacgggacgtacaccgaaaacgggatctcgcctggaagctatcagtatgtctacagggctcttgccgtacgcaatgtcaatggtgatgagttcacgcgagagctgacgtcgcctgtcatcacgatcacggtggccgcgccaccggcccccttcgacggtgcggagtatgtttccgcgagctggccgaggtcagccgacaggggcacgccgttcagcggtgctgtcacgttccggaacaccggaaacacgacgtggagagcgggagatggctaccgcttgggtcaagccgaacgctatgtttccagtgctgtgagactagggatcgccgacgtcgccgttccccacgacgtgggccccggtgggacggttacctttgccttcaacggcgcggcggccaatgagaatggaccgagcaccctccaatggcagatgaaccgcaatggtgttcgctttggtagcaccagcagcgagcagacctttgagacgaccggaaggctcaatcgcggcgtcatgtatgagcaagaagtcccgaccagcatggaggcagggcggacctatcgcgtcaagctgaagttcgtcaatacgggcaataccacgtggtcggcgtctgcgggctatgcattgggctcctggaatcccaatgacaatgtccggtggggcacggcgcgggtcccaatgccgaatgacgtcagtccacagctgcctgcgttctttgaattcgatgtggtagctccttcattgccgggcgtctacagcttccaatggcgattgctggaagagggcaaagagtggtttggtcgggaaagtgacaatgtccaggtcaccgtcaacgggccgccgtccaaggtaatcggcaatatcgatggcgtcaccagcgacggtcagatccgagggtgggcgtgttcgacgggcattgattcgtcgatcgacattcatgtctacaccggtggagccgccggcagtggcgggacgatcttcctgaccggtaaggccgatttggcgagtgagccggccgtggctacgtcctgcaaggccggaggcaatcatcgcttctcgcttccaatgagcaatgagcagcgccgccagcgggctgggcaaccgatctatgtccatggaatttcccccgttggacaacccaacaacaccattggcggttccggtgcgttcgtcgttcccgcagcgcccagtggcactctgtctgtgtcccctgcgatgtgccagattgcagctggtgcgcagacctgcaacgtcaccctgacctggtcggccacggactcccgtgcagaactcaagcgtgatggcggttctgtggtcggcagcggagcgagcggttccatcgtggtgccgattggcgccggcacgaatcgattcacgctttcggttgcgggtgatgcgattgcccaggcggcggccaccgccaaagccgctcctaccttgccagtcaatccagacaatccggccccgaccgtggcccggcgatacatctacgacgacaaccttcggttgtgcaaggtcatcgagccagaaaccggggcgaccgtgtttggctacgatgcggccggcaatcttgcctggagtgcgagcgggctggagttgcccagcttgaccgaatgcaaccgtgaggcgccgcagattgcagcgcgccgcgtttcacgcaactacgatgccagcaatcgcctgcagacggtggtctatcccgatggtctgggtgatcagcagcttgagtacacacctacgggccagctgaagactgagagggtcttcaatcaggaccgtgtgccagtggtgaccacccgtacctacaactctctcgggtcggtggtcagtcagagccgtgtcataggcagcgcgagcgcccgaacgctggcatttggctatgaccacatgggtcagcatgttcgtacggactaccctgatggctactccgtccagcaatccttgaatgctctgggccagcccgtgcggctacaggatggcactggcgccgtactcgccagcaacatctcctacttccccagtggtgaaaccgccgcgctgacctacggcaatggcatcgtacgtggcgtaaccgagaatgcgcgacagttgaccagccgcatcgttgacagtggcatggtcgatctgaactacagctatgacgcgacgggaaacatcagccagatcagcgatgccgtacgcggcgactcctggaagatcagcttgggctacgatcgcctcgatcgattgattcaggcccgcgcgccggcatttggtgggaatgggcagtacacgttcggctatgacacgttggacaacatcgtctcgatgcgattgccagggaagcgggagcgcacgttccattacgacacccgcaatcgcctggaactgctgcgggacccaagcggtaacggcgtctctggcttctcctacgacgtggcaggcaatctggcggtacgtaacggccagacgttcacctacgacatgggtggccagctccgttccgccggagatgtgcagaaatacttctacgacggagccggactgcgtgcttacgcaacagcatcaacgtcggcaccgacatcagaagcttcacccatgttgggcaagacgcccatcacggctagccacaactgggaggtatccattccagagcgcggtggcggtgaacttggcttcttggcgattgatctggatcgctcctggcagtacctcgtgggtggggagctgatcgagtccacccaaggtggggaaacgtccgactacatctacctcggcaagagactgctggctattcgcaccagctctgccacgggcgcaacgctcacctatcttcatcacgatgcactcaatacgctggtggcaacgagcagggctaatggagaggtgctgacgcgtcacttctggtcaccgtatggcgaggcagacgcggcgcctgctgcgaagattccaggctactcaggccatcttgcagaccccgacacgggactggtctacatggggcggcgctactacgacccacaactggcgaggttcatttctcccgatccgttagctgctagcacctccggagggccaaatttcaatcgctatcggtacgccagcaacaacccattccgattctctgatcccacgggcgcgtgtgatcaggcaaccgggtcacatatgtgcaatggcagctggttcgccggggcaaacctgaccggtgcgccgtcgccgacacctggcggagtgccacagcacgatcccaacgcccccgcgcctgcggagaccgtcaaggctacaggcctgggcgccattgaggagtatttttctgaacggaatttcttcatcggacaggggagcttgaccgatttcgatgccgtgtcggaggcgatcgtcgttccgttgatgaactctccaacgggatcaacggctgctggtggcctcaagctcgcctccatcatggtagtgctgcgtgggggcaatgcagcgagaggctttgggaatctctcgcgtgcgggtgagtttggcattgcatcctacaactctctgaagagaatggtgggtacagggtctgggttacaagttcaccatcttattgagaagcggtttgcaggtgttatgcaagtgaaggagggtgaaatgctttcggttgtggtgactagaacggagcatcaggtctttaccaaccagtggcgatcgatgtttccgtatggcaggccgccaccgagccaagcccagataatggacgccgcaaggtcaatttatgccaatcatcccgccatccttaaatctttgggactctga

SEQ ID NO: 504175 - DNA, 1509 bp, Stenotrophomonas maltophilia
atgagcctggcactggtccacagccgcgcccgcgcaggggtcgatgccccgctggtgcgggtggaagtgcatctctctggcggcctgcctgtcacccagatcgtgggcctggccgaaaccagcgtgcgcgaatcccgcgagcgcgtgcgtgccgccctgctctgcgcacgcttcgactttccacagcggcgcatcacgttgaatctggcgcccgccgacctgccaaaggaaggcgggcgctacgacctggcgattgccttgggcattcttgcggccagcggccaggtcgatccacagtcgctgcttcaatacgagtttctgggcgagctggggctgaccggcgagctgcggccggtggccggtgcactgccggccgcgattgccgccgctgaagccggtcgcatcctggtggtaccgccagggaatgccgcagaggcagctttggccgagcacgccgatgtgcgtgtagcgcgtacgctgctggagtgctgcgccgggttgggcaatccgcgcctattgccgcccgtggaacgcgtggacacgacaccgttgccactacccgatctggccgacgtgcgcgggcaggcgcatgcacgacgcgcattggaagtggctgccgccggtgggcaccatctgttgttgatcggcagtcctggctgcggcaagacactgctggcttcgcgcctgcccagccttttgccggataccgaagaaactgaggcgctgcagctggccgcgattgcatcggtgagtggcgaaggactggacccgcgacggtggcggcagcggccctttcgggcaccgcatcacagtgccagtgcggcggcgctggtgggtgggggcaacccgccctgccccggtgagatatcactggcccaccatggagtcctcttccttgacgagcttccagagtggaaccgcagcgcactggaaaccctgcgcgagccactggagtccggccacatccgcatcgcccgcgcggcacgcagcgtgcagtaccccgcgcggttccaactggtggccgcgatgaatccctgcccgtgcggctgggccggtgatcgcagcaatcgttgcctgtgcagcgacgaacggatcaatcgctaccgcgcgcgggtgtctggcccgttgctggaccgcatcgatctgcatatcggcgtgacgcggatggacgcggtggagctgcgggagagtacgccgctgggtgagcccagtgctgcggtacgcgcacgggtggaagccgcccacgcccggcagcaggcgcgtggcgcgctcaatgcgcatctgccgccagcggcgctgcgggcgtgcacgaagctgagcgaggccgatcaggatctgttggagcaggccatcgagcgtctgcagctttcggcacgtgcgatgcaccggattctgcgggtggcgcgcacgattgctgatctggcgggttgcgaagtgatccagacagcgcatctggctgaggctattggttaccggcagttggaccggggaacggcgccgtcgccctga

SEQ ID NO: 504176 - DNA, 1395 bp, Stenotrophomonas maltophilia
atgcatcgtctgctggtgtcgtcgttgttgctgtgcctggcgcccgtgatggcaacggctgccccatctgcgtccgcaccagcagccgttgtccatccgtgtgaggacgcatcgtcctcgccagagctgcagggtagcctgtgtaccgtcgtgcaggtaccgctgcaccatgccgcagccgatgggccatcgatttccctgttcctgcgtcggattccggccgaggcgtccactacgcgccggggcgaggtctggctgctgtccggtgggccgggcgagtcgggtgcctcgctgtacccgctgatcgtgacctaccagaaggccttccccggctatgacctggtcatccccgatcatcgtggcaccggccgctcggcgcgcatctgcccggtgcaggaggcgccggacagcgccaacggtactggactggctggagccgagtgggggccgtgtattggcgccatgtatgcagacatggcgcgcaccaccgccttctccattaccgaagctgcgcaggatgtttcctggctgctgacgcggtaccgccgcgagggtgaggtcatcctgtacggcgtttcgtacggcacgcagctggcgttgcgtacgttgcaggtatctccggtgccgctggatgggatgatcctcgatggactggtgcctctcgaggacacgcaggcatgggacttgagcagacgcacggcactggtggatgcggtgggccggcaggtactgggcgccgaaggcatcgcccactaccagggcgtgctgcaggcatcggaaacagcctcgtggaaggctgctgtgcccggaggggatctgcgccgcttcctgggcgcattgttgaacttcccggcgctgcgcgaccgcattcctggcatcgtggacgatcttgcgcacgatgatgcgttctcgttgcgacaggctgtggcagatcacagcacggcactacgccagatggggcagggcggcaacaaccagccatcgctgccgttggtgatgttgattgcgacgtctgagaacaatgcacgtcccggattgagcaaggccgtggtcgacgcggaggccaaggacgcattgtttgtcagccccattccaggcctgctggtggacagccccgttccaacctacgcgaaggataccgcgttcggaaaacggcctgcggcgttgccgcgcacgctggtgatgcagggaacgcttgacccgaacacgtcctatgagggtgccagggatcacgcggaaaggttgtcgcgtgtgggatcggttcgattccacaccgtcgagcgcggcgcgcacctgctggcgtttaccgcgccgcagtgctttgcagcggccacggcggcgtttctgggccattctgacgtggcaggcgcgtgtactgagccgacgcagcgctga

SEQ ID NO: 504177 - DNA, 1038 bp, Stenotrophomonas maltophilia
atggatcttgcagatcgcctgcacggcgtgcaggtacgagcgccgtttcaagcagttggtaggccgctgttcagacacgttggctgtgccattcatgttgggtacgagaattcgattcgggccgctttggccggcgggtcgccagacgctgattggcaagagctgaccaggcttctggtggaacatttggcatctggcgagaagatggtgaaagccgttctgcttagctcggcgcagaagactgtgcttcgcgactggatccgtcagcgaactacaaagggggggccgcttgcgaccgcatttccaggcgtcgcgcccaaggccgatttggtgactcagcagcacagcgatccagccgaagtcggttggctagatctcgttgatggcgtcgcggccttatacacttcgtccaggatgtaccttcggcgcgttgaactagcgcagtcgaacctgaaagacggcgcggctgacggattcgaagttgtgtatgcgatgaagcgcgagttcgttcagacgtatgacgcgctttatttaccaaccgacggggactgggcgctcatctgcacagacttcccccgaggggtccccggcaattttgctgttccttcccaagccaacatcgcctaccagctgaggaaggctctcggcggatctattagctatgtgaatttttggccggctgtggaaggactatataagtcggccgagggcaagcttgttgactacggatttgtggtcgaaggcaaggccgtcaatcaccacgcagctcgcaggatctcagaatctttacgcgaggcgaagtacgataaagctggagcgaaggaagtcggggatgacctcgacgtcttcaaagtatcgatccagtggcaattcgcgcatccgggtcaacctaagactgtgcctgagatcacgctcccgggaacggcccaccacttggcgactgggaaggtccctgtgctcgaccatgtgattgtcaggaactgtctcacttccagcgacatgtcatctgtaatgtctaaggttcgccagttcctataa

SEQ ID NO: 504178 - DNA, 738 bp, Stenotrophomonas maltophilia
gtgactaatgtccaagatattctgagctatcagccacgcacagcggctgaccggcttcggcaccaagtcttcgtctggaaaattaagggcaatcccacctacgaagagtgggtcgacgtcgtcgaagaggcgctgtacgaagagcttcagttcatgtttaaccagcgccattcgctgcaggacatgcatgaggactctcttaccattctcatcgtacgggccttgagtaacttgggcttttatgcaaccagagagactaagggcggaaactgcgacctcgttgtgcagtttggtgatttcagctggctgggggaggcaaagatccacacgggcgctagcaagatctacggtggatacctgcagcttaaggggagatacggtagtggattggctgggcagagccgcggtggcgtcctaatgtactgctatgatcgggaggctcaggccaccctcgaagaatgggccaacgtgctgcgcaatgaactgccaaatgcgaatccggtgcctggccggttcccgctgacgcttcattccgacgatgtgatcccggcaacgggattgcccatgaaaatttgtcactacgcatttccgcttcagtaccagcctcttgaagacgtggtgaagctaagtcctgcaggaaaagcggccactcgagaagtgagaaaggctaggaaagcaagcgctgctcgtaagcctaaggctgtggccgctccatcggccccctccgatgatgcgtga

SEQ ID NO: 504179 - DNA, 1191 bp, Stenotrophomonas maltophilia
atgacaccacccggccggccaagaaaggccccgcccaacttgccatcccatatcgattacaacatggtcccaaagggcatctattgggacaggtccggtcgcggccgatggtacgtactcgaccgccatcccgatggcaggggcttcaaatctaagaccgtcgcgcaagcagacgcgcgcttatcggatctgcacataattgcggagcagcgctcgggcagcgcgacccgaggaagcatcgcttacgtaatcgacctctttgagacaagcctcaccttcagccatcttgccagttctacgcaacggcactaccgagactatgccgccgcaatcaaggtgtatcccttgaagaacggcgcgaagcttggcgacatggtgatagacaagctgaccccaggagcagttcgccgactcgtggatgttatcgcccaagggcgcccggcatcagaacccggagagaagcccgtgcctggctacccaacgaaggccaaccactggctgcgctacctgcgccgggtctttggatgggggcgggagcacgaccatacacagaccaatccggctgctggcgtgaagcaagtcaaagagaagcgagaacaccggatgcccgatctcgaggtgttccgtcgggtccaagcgtatgcggaggcatgcgggaatctcggacctcgggaaaaaggggcgctacccagttacctctgggctgccatggagctggcttaccaggcacggctgcgtggcattgaggtactaactctgaccgacgctcatgacctcgattccgggttgaagacaaatcgacgtaaaggtagccgagacaacattgttcgaaaaggcgagcaactggcccgcgcgatccacacactacaagaacgccgccaacaaatctggtcgcgtcgcagcaggccaataccattgcgtgcggccgatcggtacttgtttgtcggcgaggatggagagccattgacaagatcgggctttcatactgcgtggcaacggatgatgcgcggtgcgattagccaaggactgctgagccaagagcagcgattcgcattgcacggactcaagcaccgaggcgtcacagatactaaaggggacaagaaaatcgccagcggtcacaaaaccgattcaatgcttcacgtctatgaccattctttacctcaagtctgcccgactgaggacccatcctag

SEQ ID NO: 504180 - DNA, 243 bp, Stenotrophomonas maltophilia
atgaagttcgaggtctatcgtgaaggcgggcgctctttgctcgcgcaggccgttggagactggcggtggcgactgcgtgctgataacggtcgtattatcgcgactagtggtgagggatatcagaacaaggctgattgcctccatggcatcgagttggtcacgtccgcttctgtggcgacaactgtctatgacgaaacgcaatcgcgaaatttgaccagatcgattctcggaacgtggacttaa

SEQ ID NO: 504181 - DNA, 864 bp, Stenotrophomonas maltophilia
atggctgagggctgcggcttccgcctcctaccgcttcacccggatttgcgcctgcacacagcagacccggccgtgaatccgattgccttgaaaggcacggtgcgagcgcatagatgccacgactcttcgaaattgtcgaggcgtctgacccctgctggactggtcaatgacagggcgtccacgctggttaaccacgccgagcaaaagacggcactcaagtccaaggctaaacctctagccagggaggtgagtcaaggtcgctgtcaggatgcgtgggaggcacggttactgcgcctcggccgggacctcttcgtcagtaggctttgcactggtggaggggacacaattgctgatgatcaatggaacgagtgtcgaagctacgtcaattgcctggcgcctcctggtctccgcttgggccgcatcctcaaagctgttcgttctactttgcacttccatgccggcccaaagcgcgaatgcgcaagtgaaagagatgatgaaatacaggatcaactgatctctctcgccaagacgactcaaactgacaccgataagcgcggagcgctcattcctcgccttcaggaagagataaaggccccacgacgccgctcccagaatgacaacggcgatgattggagccgccaatatcgccccgaagccaagcacgtcgtagacatcagcgaaaagaaactgccccgccgcaaaagacaaagcgattgggccagttacggtccagaaaggcgcaaaggacgacatcttggagtgccagccatcggcagggccgttcgaactcatggaatctgcttcttagccaagtctgaggaaggcccttccccgcaagcgacatttggagaaggggaccaatga

SEQ ID NO: 504182 - DNA, 240 bp, Stenotrophomonas maltophilia
atgagccgttctgttgtgatctacgggccgcatctgtgcggcaaaaacgccaacgcgcaggagctgcgcgaacacttcggcctgcaggccgtgattgaggactgggatggacacagcagctatccgctggatagcacgctcgtactgaccgagaaccccgacgccgtcgccgacagctcgtccaaggtgatgcatcacggctgggctatgcgcgaactgatcgcggagtcccgagcatga

SEQ ID NO: 504183 - DNA, 327 bp, Stenotrophomonas maltophilia
atgagcatgcagaccacgctgccggtggaacagcaattcgccaccggccatcagggcgagtcgctcgtcctgatggtgtgccagggctggctatgggccggtctttacaccgccgcaccgcgcgagtcgctcctgaaggtcgccgccagcgccagccggagcgtgggggtatcgcaccactccctcaccctcggcggcgtcacgttttccctcaaccgactggccgcacaggccgcgcaccgctggctcgaccgccagggcgtgcgtgttcggtcgatctcccccaccaaccgcgctacgcgccgcacgcgaggaatccccgcatga

SEQ ID NO: 504184 - DNA, 273 bp, Stenotrophomonas maltophilia
atggccgctccactgaagccgaaggaaaaagccgcgttgctcgcagcgcatggcgcttcggatcacacactccaccgtaccgccaacgggtttgcgccccgcaaccgacccgagaagctgttcacgcgccgcgtcatgaactggctggatgagcgcgtgctgatccggtacgacgacccgcagctgccgcgcaaggcgaccctgaccgatctcggcctcgctgccgcagaggccgagatcgccaaggcacgcgacctggcgctgacggcatga

SEQ ID NO: 504185 - DNA, 321 bp, Stenotrophomonas maltophilia
atgcgccagatcgctcgcccgctcccggactcggtgccgctgtgctggcccggtcatcgaccgcaaatcgtcgtgaccgaaggcgccccgacaggccatcgcctcggcaccccctgcccgccgcttctgcacatcgagtgccaccggtgtggcctcgccacccgtccggtgccgatggaaaaggccgcgttggccgagctgcgctggaccgatccgagccttgctcacctgcgcatcccgatctccctgctcgcccgacatcgcggcgaggtcctggccgagatcgctgcagcttcctcttccacgcccatcgccgcctga

SEQ ID NO: 504186 - DNA, 150 bp, Stenotrophomonas maltophilia
atgaaccggcgcctccgcctcgcttgggcagctgtcgcactggtggccgcggttgtcgtaccgctgcgcatcgctgagattcaccaggcgcacagcgaccgtgacgctgccaaggcgcgctgggccctcagcacctcggtgaggggctga

SEQ ID NO: 504187 - DNA, 225 bp, Stenotrophomonas maltophilia
atgtctcatcgctacgccgatccaagcccctgcctgctgccgcttttggccgtgaaggccctgcgggctgtggcagcacgcgatcacagcaccgctcgaaccctgtgggttcgcagcaagggcgaacacaaccgcaaccagctgcgccgctcccggcgcatgggcgtcgccagcctccgcttggaagcctgctcgcgtgacatgtcggccgaggtgcgggcatga

SEQ ID NO: 504188 - DNA, 294 bp, Stenotrophomonas maltophilia
atggaagtgtttttcagcacgctgggtgcgcttggtgtgtggctcgtggcgctggccgtgcttgcgttggccgtaatggggctgcttatgcccttggccgtgttcggtatcaaacctcttttgcgggtgctcattgaggagcagcgcaggaacaaccgattgctcgcgaggcaggtgctgcgggatcagggtattgagccggcggacgtggcaggagtcgccacgtccagagatgatggtgagccgcagacgctgcaggacttcattcgcgagcgtgacgggcggaagccgtaa

SEQ ID NO: 504189 - DNA, 201 bp, Stenotrophomonas maltophilia
atgctctgcgacgcattccagctcgcttggcttgtcgaccagcacctggtcctgagacagcgtcttagcgacctatcaacgacagagctgcgcgccttgctctgcgaaatggaagaagccagggaagccatcatggagggcttccccctcgaacaaaccgggctcatcaggaacatggccgcagttttgccacgcccttga

SEQ ID NO: 504190 - DNA, 534 bp, Stenotrophomonas maltophilia
atgttgatcggtgaaatcacacggggcctgatggaggcccacgggcttggcgtagaggctctggcagcccgtgtccgcgctgcgggcgcacccaatgtgaagtaccagcacatccagcagctactagacaccccgacacgccgccccaggtacatggtggagctggcgcgggcgttcggcatgtcggtcgagcagttcctaggctggaacaaagatgagccactgagtgcgctctcaacaccccgagccgtgcagtctcaaaccgtgcaactcgacgcccctacgcttgccgcgtcgtaccaacttgtccgcctggcctgtctcgctcttggatcgccgttcgatcccgaggatgccagcgacgcttcgattgtcatcttggctcacagctacttgaccgcccgtcaggagaagacagtcacgccggacaacgtggtcgactttaccgcgcacctgcggaagcgccagatttcaaagggggttgatcatgaaggaagcggcagcactggaagctctcgcgcaggcactcgctaa

SEQ ID NO: 504191 - DNA, 531 bp, Stenotrophomonas maltophilia
atgacctgccttcgctctgatcttcactggcgggacgccttgaacaatgcagtttcgtgcgcgccgggtggagtgcacgacgcggctgcccacatcagtaaacgccgtggcaagtccatcaccacggagacgttgcggaagaagcttcgtgggatcgagggtgagtccatctcgatggagatggccgagatcctcaccgagtacctgcagcgcttcgtcggtacccaggcgatggcaactgactgggtgtgctcgttggctgggcagtttggcttgatggtggattacgtgccagcgccgcccgcaggcggttggccggatgaactggctgcaatccaggcaaagctcctggagctgcacaagttgactggtcagctggctggcgctggcatcgacgccttggcggatcggcgactgaccgtacccgaggcagatcgcatccaagacctatcccgcgaggtacgcacgctttgcttccgtctggagcgcaacgcatgccgggctgctggtttgcagggagctgaggactga

SEQ ID NO: 504192 - DNA, 342 bp, Stenotrophomonas maltophilia
atggtcggcggcggcatcagcgacacggcaccctggtgggctgcagggagcgtggtggcgctttgggtgcttcgcgagacgtggacggcgttcctctcgcacaggaaggagcgcaccgagaccgacgccaacgtggatctcatcaagggcctgtccgatcgcgtctccttcctcgaccagagggtcactgcccaagacgagcgcctgcaagccgaaatgctgctccggctcagggcacaagaagaggccagcgcgctgcgcacgcgtgtacgtcagctcgaatcgacgctgcgtggccttggtgctgtcatcccccccgaagacccggtcgtgtccgcatga

SEQ ID NO: 504193 - DNA, 492 bp, Stenotrophomonas maltophilia
atgatccgcgccctcgtcatcgccatccttctgctgctgggcgtcattgtctggcagcgcggcacggtgtccatcgctcaccgtgcggccgacaaggccgcgtcgagccgtgacgccatggagggcgagcgcgacgccgcccgcgctgaggccgatgccgtgagcgaagccttgaaggtagagcgtgacagcgctaccgccgcgaacaccctggcgtccaagtatgaaaaggaaaggaacgatgcacagaatgcatctgatcgcctcgtcgctgatcttcgcgctggcaaccagcgcctgcaccagcgttggcaagcatccgtcgccaccgcagagctgtcctcggccgccgctgccgccagccagcctgatggtcgagccgacgaccgaatccaaagtgcgggccgagctgttggcgccgccgcccagtgcgacgctcaggtgaggggcttgcaagcctacgccgtgctctgcagtgggggtgcgaagtga

SEQ ID NO: 504194 - DNA, 345 bp, Stenotrophomonas maltophilia
gtgagtgaagtcggcttcctgcgtgacatggatgcaagtcttcatgccgccttcgcattggcgggtatggcctcaactggcacgctcatcgcaaagaagacgggtgtagtcagtcgtggtgtgcggatctacgtcgaccgcgatgtcgagacgattggcgatcttcgccagttcgtctccggccgtgtggagatcgcttacctacgctcggatgttgagccagaacagggcgaccacctggaggtgggagaggctggtcaaggtctgggcgtcgaagttttcgtcaacgcgaagaagctcagtgacgacggctcccgcagccgatggctggtggcccgtgcttga

SEQ ID NO: 504195 - DNA, 483 bp, Stenotrophomonas maltophilia
gtgcttgacgtgcctgagccgttgtcctggcagttggtggagttcctgcgcggtcgcgtgaagctcatccgtgcgagtgaaggcttccgcaccgatatcggcacgggtctgatcatcgttgacgacagcgaagtggatgagggttcggagagccccgcgacggtgatctccgtcaggcagttgtcgcgtagtggcgggggcagtgcccaggtcacctcggatgctgcgattaccatcgagttcgaagtcccacgttcgggcaacgttgctaacccgcggttacttgtacaccgagcgaggcatgacttgatccgcgcgctcacattcaacgtgaaagccctgccacgggggattacgagcttcgaaatccttgaaacccagttggcatccctggaagacgacgcagggcattccgccgttgtcgctcagatcaccgcgcgggctggtctgaccgagacctttgagcccgtccccaacccgtag

SEQ ID NO: 504196 - DNA, 801 bp, Stenotrophomonas maltophilia
atggcacagcccaaggtccgcaaattcgcaggcgatctgcgcttctgggagcacggcgcaaacggcgccaggattcccgtcatccccgagcccgccgacaagttcggcaatcagccactggaacagtcgtcgctgacgttcagctacgaggccggcgactcggtggagatcaagagcaagcgccgtgatgcgcgctatcagcagatcatccacaaggattccaaccccggcgtcaccagcgtttcgatcaccgcgttggaagtgccgccggccatcctggcccgcatgttgtacggcacgttggtggccacccaagtcgccgccggcaccgccaccgatgtttccgtgaccgtgggtagcgcggacacgccggtgaagctgccgcacaacttccttctggccgataccgagccgactttcaagaagggcgccgtcgacctggtcaagggcaccgattacaccctcgacccggcgcacggcctgctgattccgaagtccggcggccagttgcaagctggcaataccgtcgtggcgaactacaagtacgacgcatacctggaaaccgccattagcggtggcaccacgccgagcaaatccttccagatcctgggcgacatgcaggaccgcatcagcggcgacgagggcctgctgaccatcccgaacgtcgacctgaccgtggatggtgacgtggactggttcagtgatgaacccatccaggtgaccctgactggcccggtgatcttccaggccggcgagagcgacctgtacaccttcaagatcgcggcgcaggctgccggctga

SEQ ID NO: 504197 - DNA, 651 bp, Stenotrophomonas maltophilia
gtggcgtccaatcgcaacaacaacctgctcaagttttttgtcagcgggcgccgtgcgaaaggcctccacggcttgaccaaccttgctggcgacgttctcaaccgctacgacctgtcagtgcaaagggccttcatcggcctgcagcgacgggcaggccctgcgaccacgcaagaggtgcgagggtcctacaacatccgcgcagccgcgctgagggggaagtaccgcgtggagaccggtgagcgcggctactcgacgggcaagcgcggcagggacgacttcctttcgatttgggcgagcacgcggcaaatatcgcttctcgaatttggtggccgctgggctggcaggcgatcagtcggcgcaacggccagcatcggtctcggtgagtccagaacttatgacggagcgttcatcgccacaatcaagggccgaagggccattcgagtgcgaagttgggaccgcgcgacccagaagcgggcagggcgaggccctgttcggattcttcggggcccaagccctttcgagatgctctcaggcgctgacggaaacagccgggctctcgcagcgcgcagccgcctgatcgagcgttttcacaccacgtacctgactgaactgcgccgccagtggcgcgtcaatggaaagagcaatggctga

SEQ ID NO: 504198 - DNA, 3750 bp, Stenotrophomonas maltophilia
atggctgatcggctggaagaagcaatcagggtagtcattgaaacccagggtcgcgagggtgtggatgacctgcgctcggcgtttggcgagctgggtgatgtctcggtcgagacggcaggaaagacttctaagctgctcgattccctgactggcttgacgtcggcagcggcaaaggccgacgccttcgaggcgatgctggaccagttgggcgagctggagcgggagttcaatgccaaccagcgggcagcgcttgagctgagcctcagcatcggtgagatggagaagccgtcgcgtgaggtgttggcgtcacagcgcgatctgcgcaaggaaggggagcgcctgaagaaggcgctgaacgagcagtgggctgaagttagcaaggcagattcggagttggcggcgctgggggtcagcacagctgacctggccggcagccaacagcgcctgcggtccgaggctgcgcgcaccactgcggcgctgagcgcgcaggcaaaagcagtcagcgatgaagccaccgctaaccgccgtcgcacgcagcaattggcggaaggcgacgccgcgatgcgcaagcaagcggatacgacccgcgcagcgcagaaggcactggcggattaccgtgagcgtgcagacgacgccgctgctgggagtgcgaacctggccggggcaactgaaggcgcggcaggttggctgggtaagctgaagggccttgccgccggcgcgatcgcgttcgtcggcttgaaccgggtggttgacggcatcaagtcgatcatcaaggaaggtagtgacgcggagcaggaggtcaaccagctcgacgccgccattcaggcggctggccgtagcagtgagttcacagctgagaagctgctgcagcttggtaagcaactgcagaccggccttttcgatggtgggcaggtcaatagcgcgatggtgcgcatgctgtcctataccaacatcgtcggcgatcagttccccgccgcgatgcaggtcactattgaccaggcccaacgtcttggtttgtcactggagtcgtcggcggagatcgtaggcaaggcgctgcagacaccgtcgaaggcgatggagagtcttagcaagcagggcttcaccctgtccgacagccagaaggagttgatcaagaaccttgaggcaaccgggcgcgtcgcagaggcgcaaacgatcatcctcgaccttctcaccgagtcctatggtggcgcagcggcggcagccaaggtcggaacgatcgcgggtctctggaaggaggcgaccgatcgctttaaggactggaagcaggaagttgccgatcaaggggtgctggcatacttcaaggatcagctgaccacgcttctggcgactttggatcgtctggcgaaggatgggagccttacccgctgggccaagcagacctcgcaggccattattgggatggcggaggcggtcaagggggctacgcgatgggtggctgaccatgcgcgtgtgattggcctcatggctgcggcttacgcccagttcaaggtcgtaggcgcgctgcttcagctgaacgcgtggagggcggcgttgcttgcgactacgcgtgcgcagctggcaaacaacgccgcagtcgccgccggcagttctggcatcgggcgctttgggctgttgctccggggcctaccgaaggcggttccgatcgcggtatcagtgctggggctggaggccgccattggtggccttggcgtgctcaagactgttgcccaggacatctggaagcagcacgatcccgccctgaagcgagccggcgaggcgcagcgcgcttacatcagccaggttcgggactccgccttggagcttcgccgtcaggccatctcgttcattgagtatcgcgacgtggtggttaagaccgctgaggaagtcgctcgaatggggcaggctgaacgcgaagcctatgcccagcgcctggctggccttgagcagtacctgaccgcgcaggagggattcctgctgatgcagcaaaaggcgggcgttgctacggccgctcagttgcaggaacttggccttgtgacgcagcagctgctggctgtgtctacagggtatgcagggctctccaaggcagtgaacatcgctgcggatgccatgaagagtggtatcgggggtgcggcacagctggtggttgaacagcttcagggcgtgcagagcagtgcgcgcctcgccaccgattcgatcagcaagatgatggcggggctcaattttgctgatacgggtagtttggccgccgttggcacagcgctgggctatgtggcatcgcagggcgctgcggcggagcgcaatgttcgggatggactgctggaatcactgcggaagctctccggtgaggagttggcgagattccaggctgcatcccaggcggcatttgaggcgctgcctcaaagtgctgccaatgcagccgcagtactgcagacgacgttgcttgccgcgatggagaagctgggcgtctccgcgtccaggttgggtgtgcaattcaccggtgccggtcgggacgcgatcgcctcgttcggtgccgtaaccgagagcgctgttgccacaggcgttcagatcgaagaggcgttcaaggcagccctcgggaaggtcgccacactggacgaggcgaggaccttgggcgccctgctcgaagcagcgggaaagcagggcaagatcgggttcgacgcggcggcgcgttctgcagcggcactcaacgcccgcattcgcgacatccaggcatcggtgaaccccctggccgatgagttcgctcgcctcggcatccagtcgcaagaatcgttgaacaacacccgtgattcggcgaaggcagcgtttgaggcgatccaacgcggtgcctcgcaaggcaaagccagcatcgaagacgtgcgccgggccttcgaagcgtatgcgagcacagcacgtgcagcagtggccgacagcgacgattggcgtcgaggacaggtggaatcccagctccaggtgcaagggcagatcctgcagacgggtcagcacctgaaggacatgggaggcagcggccaatctgcaatgcaacaggttcaggccggggcacaggccggcacgcaggcggtagggcagctggctcaagagacatcgcaggctggcaatcagatggagaacctgggcaaccgagcggagcagtcggggcagcagatgggcaaagcgggccaagctgcgcagagcatggcgttcagcatcggagaggtttccgacgcagcgctcaaggccatgcgcaacttgagcgggccgaatccgctgcaacagttcgcgaacgccctgaacagagtcacggctcagcgtaagcagctggccgattacaagaaagagcttcagggattggctgagaccgaggacgagttcgcctcctcggccaagagccgtcttgagtatcagtatgactacctcgggaagcaggaggtggcggaggtcgcggcgctggaagcccaggtgcaaagaaagcgcgccgagcaggaccgtgcggccgccgatgcgatgcaggagcggcgcagggccgctcaggctgaggcagatgctcaggcgaagctcgatgcggggcggatacaggcaggcgtcgacaaggaacaagttctgatcattgactggaaagtgcccagcaaagaagtggtggccggggcgaccgcccaagagctccagcaggcccagaggatcgcgaatctggtgacgccgatggtgctgactgctgtccagaaaagccgatcggtttcggttagggggcggcgctga

SEQ ID NO: 504199 - DNA, 417 bp, Stenotrophomonas maltophilia
atgacccgcattctgctcgcggggattgagctgccggccgatctccagtggaccgatgaattcacggcatggagggtggggcagcaggttcgaaacagcctcaatggggcaatgatcgtgcaggagtcggcacggcaggccgggcgccccatcacgctgcagacaacccgtgacggcactgcgtacgtcggagtggttgcattgcccgtcgtccgcgcacttcaggccagtgagagcgaggcgcgcttgtcgcctctggagctggtcatgccggcccataacggcggcgaccgcgccttccaggttaggtggcgtcgtgtcgatggcccagctatcgaggtcgaacccactcgcttcgccgttcccgccctggattcggacctcttctcaatcactcttcgcctcatgacggtgtaa

SEQ ID NO: 504200 - DNA, 1002 bp, Stenotrophomonas maltophilia
atgagtctcgttccaactgtttatcgaagcaccgacccaggtgctccgctgctttccggtgttccgggcgcgctgatcgcgctcctcgatgccgtcctggtcgatggctatggcgtcggcgcgggaagaaaggacggcctggggtggaagaaggggttcggcggcgtaaacattcgcgcatatcagaactcgcaggtgtttggcactggctactttctgagggttgatgacactgcagcaagatcggcgttgctgcgtgggtactcgtccatgagcgacttgaacacgggggaagatgcgacaccctcgccgtcgctcaaagcgagtgggtcaatgtgggagaagtccaacgtagcgagcggcgcactccgtcattggatcgcgatcggtacggagcggttcttctacctgttcgttgacacgggcggtaactacgggacgcaagggtacgcaggcacgcatggtcactatgctggtgacatcacgtcgatgaagccgggagataggcatcacttcactgtttcatacaaggggagcgattccgaagggagtagctcggttggttatgggttcaaagcgcgaccatggaatgatttcggaagtgccgatacgcagacatccgctttcgttggtcggtcgatgtccggagttcctggctctgttcgcgcgtacgtctcggcgtcagctgccactaccagtggcgtcgcactgggtagtcaatcgaactaccccacatatccgtatgctggtaacggcgggctcctgtactcgcccatcgatgtacttgagaatagtatgcagccacgcggtttcttgccgggcgcttttgctccgattcatcgcagacctttccctgagatgactgttgttaccgatgtggacggattgccggttggtacccagcttctggcgaagtgcgttacggtcgacagtctcgcgggtggcttcagcgaaacctacaccggccagatcctgattgatatcaccaacgcgtgggcttaa

SEQ ID NO: 504201 - DNA, 429 bp, Stenotrophomonas maltophilia
atgcctaacagggcggttgtatttgtcagcgaagcgcttagcgacctgaccccggctcacctgtcccggatcatggcggacgcagagcgattcaaccgcactgctggggtcagtggggtgacgttgtttgatggaagaaggttccttgcgtacatggagggcccgccggacgggctggatgttgccttctccagagcagtgggcgccaccagccattcaagcctgatcgagattgcgcgtgggcgggtcgggcagcgccggcttccctactggccgatgcgttgcatccccctgtcgccgccggagctggtgcagctggtgcgggccgactggacttccttcctgcaacggggaggccatcaagctggcccggccaccgcgatggagatgctggtggcattggtggaacccttcgccgaggctgcctga

SEQ ID NO: 504202 - DNA, 393 bp, Stenotrophomonas maltophilia
atgagcagcgagcccacattccagttgtctcaaggttacgaagtcctgcctccgaagtccggaaaggcttaccccattccctgtgacgaatgggaactgttaaagggcaagatatccaaagcaaccgccgaaccttggttgtcccagacaattggctcggccctgcttggcatggcgttatctgcacttttgccgatagtgactagtgcttttcagctgccggctcagcagagagctcaagacattacgtggctcgtcctgatcatcacgggtgtctgcggacttgtctgtctgttcttttctcacaaggagcgtcaagtccatcgggagcgggcaagtgacgttgccgcgcagatgcagttgattcagcagcgctatgaccaagcctcgtag

SEQ ID NO: 504203 - DNA, 231 bp, Stenotrophomonas maltophilia
atgatcgatccgctcattaccttcgtgctgctgggggccatcgtggccgtatccatcggctgcgcaaagctcgtttcgtggctgctggatcggcgtgattacaccgcctcgcagcagtcccgcgaagcccaggtcatcgcactcgcaaaggctgagattgccgccaccaagcgtggcgacttgctggcggctgcccgcttcgctgagcagcaggagacggcccatggctga

SEQ ID NO: 504204 - DNA, 429 bp, Stenotrophomonas maltophilia
atggataccgccaacgatctgcttgacaaagtgaaggccgcttgcaacttcccgtccgacaacgttttggcgcagaagatcgggcttacgcgagcgatggtcagttcgtggcgacatgggcgccatccgatccccgatgagcgaattgcgcagatgtgtgccttggcaaagctcgatggacccacgtggattgccatgctccacgccgaacgtgcgcagactgcgaccgaacgtgctttgtggcgtctcatgctggacaggctgagcgcggcggctgcggtcgtcgcgctggtagcgctgtcgttgccgagcctcggaaacgcaaaaaccgcccaaaataaggcggttagcgagggtctactgacccattctgtatattatgttcatttcgccgttgcccgagccaggcttcaccagtcacgcccctga

SEQ ID NO: 504205 - DNA, 321 bp, Stenotrophomonas maltophilia
ttgaatccattggtacagtttttgctgagcctgctggcgggcgcgttcctctttctgttggctgtggggcacgactactggaagcgcctgcgttggctcttcggatgggatcccaatctgggccatgaatctgcagacaagctcatttccatcgccaacaggacggtgctggtgacggccgccttgctgttggtctgggcggtgacaggcccatccccgtaccggaggaactgggagatggaggtttggggtttggcggccggcacgttgattgcgtatgtggcgctcatcctcagcgcatcgacgcgggcccgcgcctag

SEQ ID NO: 504206 - DNA, 1215 bp, Stenotrophomonas maltophilia
atgcaaaccggactgatcatcgcagcgctgcgcaagcaccggctggccaccctgttgatcgcaatggagatcgcgctggcctgcgccgtgctgtgcaatgccatcttcatgctcacggagaaggggcgtgcactgaacctggacagtggcatcgccgagtcgtcgctgggcatcgtgcagctctccggattcgacgccgcccaggccgccgatctcactgcccgggtgaccggcgcactgcaggcgattccgggcgtaacgtcggtcggcatcatcagcgccgttccgttcggtgaaccgggtgtccgcgcgggcgtccataccgatgagagcggcaaggtcttcggtggggtcctcgatttctacctgggtgacgcggcggcgatccaggcgctggatctgaagctgttggccgggcgcttgccggacgtcgccgagtacgcaccgatcgggcagcacgtgcccgccaatgcgccgatcctggtaacgcggcagctggcggagcgctactggcccaatgcgccggcagtcgggcgcagcctgtggtcgatggacagccgcttcaccgttatcggcgtggtcgagcacctggccgtatcacaacccggtggaggggaggcgctggggaatgactggtccgtgctgatgccggccaagccaggtccgcagttggcggggcgctacctggtgcgggcggcgcccggagcgctgccccgggtgatggccggcgcacagcgggcggtggccgcggtggcccccgacgtggtgttcgaccaggccgccagccgtaccgtcgccgagctgcgcgcggactatttccatggcgccaggttgatgatggcgctgctggcgggcgtgatcgtcgcgctgctgggagccaccgcgctgggcattgtcggcctggccagctactgggtagagcagcggcgcagacagatcggcatccgccgtgcactgggcgcaacccgccgcgacatcctgcactacttccagctggagaacttcctggtcgtgagcctgggtgtcgtcgttggtgcgctgctggcctatgcattcaacctcggcctgatgcggttctacgaactgccacggcttccactggcgtacctgccgatcagtgcgctggcgctgtggctgctggggcaggtggcggtgcttgcacctgcattgagggcgtccgcgatcatgcccgtgcaggccatccggtgcgcctga

SEQ ID NO: 504207 - DNA, 1320 bp, Stenotrophomonas maltophilia
atgatggactattacctgaagctggcgctgcacaacgccaggcgcaatacgatcattactgcattgatggtgctggcggttgccgtgggaatcggcgccagcatgaccacgctgaccgtcacccacctgctttccggagatccgctgccgggccggagcgatcggatcttctacccgcaggtggatgtcgatcccggatcgaaagggcgcgaaccccacgacgtgctcgactatcggaccgcgcacgatctctggtcatccggccaggcggaccgccagaccatggtggtggtcaatccggtgaagctccgttcggatctggctgggatggcgccactgatgggatcttcgatctcgaccacggcagacttcttccccatgttcgaggtgccctttcagtatggccgcgcctggacagccgaggatgaccagcgtcgcggccgcgtcgcggtcatctcggcccggttgaaccagcgcctgttcgggggccgcgacagtgtcggacagacccttcgggtcaaggacacccatgtgcaggtcatcggcgtgctggatcactggcggccctctcccttgttctacaagatcaggggagggcggttctcgggtggcgagacgtcaagcttctacgccgcggccgatgacatctatctgccgatgtcgaccagcctggatatcaacgagggcgacttccagccctttacctgctgggcgatgcccgagacccctggggtactgcagaactcgccctgcgtggcggtcgcggtctgggtggagctcggcagcccggagaaggtggccagctatcgtcgctacctctccaactacgcgggcgaacaacagcgcctggggcgcatccggcacgcggacaacacccggcttcgttcgttgatggagtggctggacttcaatcaggtggtgccaagcgacgtgaaggtgcagacggtgctgtcctttgcgttcctggtggtctgcctggccaatgttgtcgggctgctgctggcgcgcttcctgcgccacggcggagaaatcggcctgaggcgcgcgctgggcgccagtcggcgtgcggtattcacgcaatgcatgctggaagccgggctgatcggtgtcgccggaggggtgggcgggctgctgctgaccctgctgggtctgtgggtgatccgtgcccagccggttgcctacgcggacctgatgcatctggacctgaccatgttcatggccatctttggcctttccctgttggccagcctggcggcaggcgcgattcccgcctatcgcgccagttcgatccagcccgtggcgcagctcaagctgctgtaa

SEQ ID NO: 504208 - DNA, 519 bp, Stenotrophomonas maltophilia
atgagcgaacaccccgacaagacagacgcgcaggcatgggacggccttgcgattcgccccttgtcccccgatgacctggatctgatctgcgcccaccgcgaagcgatgttccgcgagagtggtcgccccgcggaggtgttggagcagatggccggccctttccgtgcctggctcgcgccgcgcctggcctccggcgactatttcgggtttgccctcacggaccaggggcgcgccatcgcgggcatcggcctgatgctgatcgactggccgccgcacccggcccaccccctgcaggacaagtgcggctacgtgctcaacgtctatgtggaccccggctatcggcgcaggggcgtcgcccacaggctgatgcaattggccgatgacgcgttcgccgaacggaaggtgagctacataatcctgcatgccactgcccaggcgactccgctgtatgccgagttgggctgggtggcaaccagtgagatggcgcgtgcactgcacaggaatggcaaccgtgcatga

SEQ ID NO: 504209 - DNA, 627 bp, Stenotrophomonas maltophilia
atgaaaggacattccgcaccgcgccgactgcgcctggcacttctggacgaccatgagatcgttcgtcgtggcaccgtcctgcacctgtcgcaggacgcccgcttcaggatcatcgccagccatgggcacagcgacgccttcatccagacgctgcaacagacgcgggtggatgtcgccgtcatcgatctgacgctggcgcgtggcgaccgcagcagtacagagctgatccccctgctgcgcgcggcattcccggagacgccgctgcttgccttcgccaccctctccccctgcacccgtctccaccacctgctcatggccggcatcagtggcgtcgtcagcaaagccgagccccttcccatgctgtccgaagcgatcattcgtgtttcacagggactggagcggctgccgcccgactactccatcccggcggactacactgagctcagccgcaacgagcgtgaagtactggacctgctgctgtccggcctgaccgtctccgagatcgcgcagcgacgccatcgcagcgtcaagaccatcagcacgcagaaagtcgcggtgctgcgcaagcttgggctgcgcaacgatgcggagatctatgcgctgcggcgcccgccggatgcaccatga

SEQ ID NO: 504210 - DNA, 1368 bp, Stenotrophomonas maltophilia
atgccattgccgggttgcacgggccgatgcgggtgcggtcggaaggggcgcagcgtatcgagctgcacaccggcccgcggtctcccgcggtgggcgtggctgccgctgtggtcgctgctgctgttggccggtagtgccaccgccagcgaaaccattgccggccgctttgcgccgaaactgggcgagggccgtccgcgcgtgcagtggaccgagatgagccccgccaatcataaggagccgtgtggtgacggaggctggcgtgtcggcgccacgccggaggcctgccgggcgatgggcatggcgacgcgttcgtttgcggccggtcccaactactatagcccgggcgtggtgatcggccggcagaccctggtggcgggcagtaccgtgctcacctctcgcccgcacatcgagctggataccggtccccagggcgtatacctgacccgcgagaacggcgagtggttcaggattgaggtcgagctgatcggcgccgcggtgaggtaccaggtggcggcggggcgcaatccgcgtgcccgtgcgagcgacagtgggggatgccgtacttccgatgtgggaagcttcggtcacgccgggccgcgcagctggagcaatctgtatgtgcttgccagcgcaacggggccggcgctctgccttccgcagccgatcaccggcatcggcggcgactgggataacgtcgtgccgggagatgagatcgatgcaagcgtcgagctgaccgcgttgacgttccgcatgactgcgcctggattggctggcgtgggcaacggcatctatcgcggcacgcggcgcatccaggtcggccgtaccggtgatatcgacgtgggcgcggacggcgcgacgacactcgaggtggaatttgaagtcgaggtcgtcaaccaggtggtggtcagcttcggcgatggcgccgcctccgcgcaggtcaccctggccccgcagggcggctggcgtgccaatccggcgccccagcgcctgttgcaggaggtgccgctacgctttggcagcacggcgccgttgtcgatcaggctgcgctgcgggctgtatgccggcgagcgctgcgcgatcgcgccggcgggcgccgggccggcaccggtgcccatcgacctgagcgtgaacctggccggctacgcccggtatgagggtgggccggtacactacgcgcgtatccctgccgaggcctcgtcagggccgccgctggtggtcgagcctgatcggtcgatcggggcgcagctgtccccgcatgcacggttgcgggtggagaccgatgccgaggccaccgccgagctgttgcgccaccccggcacgcactaccagggcagcgtgaccgtcatcttcgagccctggcagcgttga

SEQ ID NO: 504211 - DNA, 588 bp, Stenotrophomonas maltophilia
atgaccgcaccactgcccatttccccggccacggctgtcgaggccaccaaggcatcgtcgcctgtcgccgcggttgtcgctgccatgcggcgcatcgaccccgccagcggccccgttgccgtcgaccaggtgcgcgcttgggctgacactctgctgaaagcgctctacaccgcacagcctgtgcgctgggagtaccgccacaaggacgatcaccggccaggctgctggatgcaggccgacgctgggcacgtctacggcgcccaccagcgtgggctcgttgtccgcgccctgttcgaaaccccacgcgtggtccagccggagaagctgcacgagttcagtggacgcgtgtgcgtccgctgcggcgacagcgaggattgggctggcccggattgtgagccgctggtccagcaagtcgacccgcgcaaactgctgcctgtccacccgagctggttccttgagccgctgcagtggatccgggacgccgggcccgctccggttagcacgcacgagcgccgccgcagggccaccgaagccacgttcctgatcgaacagctcgaagcccacatcgaggagtgcaacaagccatga

SEQ ID NO: 504212 - DNA, 303 bp, Stenotrophomonas maltophilia
atggaggaccgcagcctgatgcagccggagcagctgcgcgcgttcgcccgctcgatcctcgaccgcaagctgcgcgccggctggcgtcgagagcagatcctgggcatcgagtacgaaggtttcacggggccggcgcacgccggctacctgatctcggccggaaaaatctcggtgtgccaggaaaaccagtacctgatccgccataccgacgcgtgggccgtgacgttccgcatggccgacctactgcgtgatgaacccgaaccgccgccggcactgccggcccaactggacctgttcgcatga

SEQ ID NO: 504213 - DNA, 924 bp, Stenotrophomonas maltophilia
atgaccaaaagcgaacacgcacaaatcacaaaacacggcacgaccataggattgacatcatccaggcagccctgcttccggaagaagctcgaggctcgcggctgtggtgttcgccaattttccaaggaacttaccgtctttagctgctcgctctgcaacccccttaacggccaagtagccagatctgaccagctccttctttcgctccaactcctcactcgcttgatcggtatctacgttcgcgagctcatcgaggtaacgctgcagcacggaaacgtcacccgcaagacggctcaggcgcattcctgtcgaggcttggatcgcgtgcaatcggccaaccacggagtgaagtttctcgaggcgaacccccgcagccctctgagcgaataccttcctcatatgaggattgttcacaaattcctcgacggtgcactgatcgcttcgaaacaacgtgtcaagcgtgttcattcttacccgggccgcatcgagttcggcggaaagaaagcaaagcagtaccttctcttcgcgaacccgctccgcttttgcctcggaattgaggcgttctcgctcatcgattccatttttgagcccgactttggcgaccgaattagcctgtttccccaaccaaaagacagcatacgccgagactccggagacaacgactccaaccatcgcgacggaagtgccgacaacagctgtcaggacagcccatgcgtcccaccaaaccacacagtcgccctgaccgagtgtcatgcacgggctggctccactccagatcgtcgtcacgaatccccaatccagaagatagagaagagggagaagagggagaagatagaaaggaagcaagatcatgtcgccacgtccctgaagatcggtgggcattctgccacgtggcttgagcgcaaggcgcctacccatggctga

SEQ ID NO: 504214 - DNA, 258 bp, Stenotrophomonas maltophilia
atgacccagctgaaggccttctacgtcgacgacatgccgaccatctacgccgctgagacgcccgaagaggccgcgcgtctgtatgaggaagacgtgggcgatccctgcgatgacggctatccccgcgaggtgtccgctgcagagttggatcggtcgatccccgaattcggcgaagacgaacagccgaccggcgagatgacgaccatgcggacctggctggaagaagccagcccgggcttcctgtgcggggccgagtaa

SEQ ID NO: 504215 - DNA, 192 bp, Stenotrophomonas maltophilia
atggccaccctttccttgggctgccgatcggcagagatgaaagtcaccgctgaccacgtcagcgaacgcgtcatcgcagacatgggcgctgcccgcctgcacctcaccgccgacgaagcggagcagcacgcgcaccagctgcaggcagcagctaagcagctgcgcgctgcactccagggcgcagccgcatga

SEQ ID NO: 504216 - DNA, 525 bp, Stenotrophomonas maltophilia
atgaactggacgaactggctgacgttagggattgcggtgctgggcgccacgctcggtgtgttcaacacatggaccaactaccggcggggtactcggcgagcccgaatccagtgcggctatgacaaatcccaagggaccgaggccccgagcctttggtgtgaggtgataaatcccggcggggtgccagtgactatcaagtccgttcgcgtgctggccgccagaggtgacctgacaaaggagatgccgatccacggcagcgccgacattgagagaaagctgctgggccgcctggaaccaggggcatcggtcgtggcgaccgcacccgcagactacgtcccattcttcctttgggtcactaaggtcacggcgacgaccgccgatggactcgaatgcgtgttgctcggtcgccgacttgaacgcgtccaagcggaactccggaaagcactcccgggagctgacgtgctgctggttactctgccggagccggcaggaagtccaagcgttgaggacgagcgccaagactga

SEQ ID NO: 504217 - DNA, 294 bp, Stenotrophomonas maltophilia
atggacatcaagatctcgcgtggcgtttcagagaagcttcagaacaagcatcatgtttcgtacgaggagatccgggaggcgttcatcaaccggaccggcggcttcttcaccgatagccgtgaggatcatcagaccaatcctccaacgtattggttcgtcggagagacggacacgggacggacactgaaggtggtgttcgtgaagtacccagaccactaccaaatcaagtcggcctatgagccgacggacggatcaccagcgttgtacgaccgcctcgtacgtcgcgctggctga

SEQ ID NO: 504218 - DNA, 357 bp, Stenotrophomonas maltophilia
atgaatagctatgacaacgaatgccgctgggagtcgggcgagttcggtttgtcggagcagcacgcagtcgccgctccggcgtctgtggagcgcgatatcgatgatgccctggccctgcagatgatttctatacgtctgccgaagcagctgctgagcgatctcaaggtgatagccccgaaggaaggtttaggctaccagccgctgattcggcgcgtgctgcagcgctttgtcgaaggagaattcaggagcatggcgcatgacgagttcctgaagcagagagcggcaggccggttaaatagagagtcggcggaagaagagtgcgaagtcgaagatgcaccacgccgtgctgttggctga

SEQ ID NO: 504219 - DNA, 222 bp, Stenotrophomonas maltophilia
atgagcaagcgcgcgctgcgcgcccgtcttggcctgagtagcgatgcgcacctggcaaaggttctggacctgccggttgagcaggttagcggctgggcggatgaggacatggtcccggctttgccgcaggtgatgaagttgcttggggacgccgagcagccggagccgccggcaaacgacgcccccgatgcagaccgcatcgcaccgattgaggtggcgtga

SEQ ID NO: 504220 - DNA, 210 bp, Stenotrophomonas maltophilia
atggagacggaacaaatcgaaactcgcggcgcggacggccgcacggtgtgggtcatcaagcacttcacccgcatcgacacctcggacctcgacgggccaagctggatcgaggggatggcaaggcacacgctcggagacggcagcgccgtcaatgccgacgccgacggattcgaagtggttgcgacaggcgagcgcttggttcggctgtag

SEQ ID NO: 504221 - DNA, 180 bp, Stenotrophomonas maltophilia
atgtctgaccagacccccgagcaggtgcgggagcaccacctgtcgcgcatccgcgaatacgccgtgcagcacgacctcgctggcgaggatatcgcactgatcttcaatgctggactggctgccgcccgcagtctgcgacccgcgcttttcgagcaagtggctcccggccgtcgtccctga

SEQ ID NO: 504222 - DNA, 693 bp, Stenotrophomonas maltophilia
atgacggttaggcggcacggggcgcacccccagagctgcgcccggtgcatcccctcctgcacggggcgcgtcccctcctgcagcgggcgcaccacctgcagggggcgcatctcctgcgcccggtgcagcccctgcttttcctgcctttcgcccagccttcgacggcgcagcagctttgtcgaagttgacgggggtcaccttgtagaccgtgctgctgttgaagcggcggtcacgagtaagcagacccacagcctccagatgatccattgccgtgcgcacagcgcgcgccgacatgcagcagcgcgcggcgatggtgcccaccgccggccagcacacaccgtcgtcgttcgcctgatcagccagcgagatcagcacagccttttgcgtgacgctcaggccctgcagcggccagcactgcgacatgatgatggtcgacatgtcagagccccagcggcatgttctggcccggggccaccggccaccaggtgcatgctggtttcccggtggtggcgcacggagcggtcgggccacgccaaattcgtccctctcgggccaactcaggaagacggcgacccagcatgtggcggtccaggccggttagcatcgagaggtgcagactgctgtggccgggatggcgggtcacagcagcctctgtcttggcgtgctggacgcgtagtgtgccgctggcgatga

SEQ ID NO: 504223 - DNA, 663 bp, Stenotrophomonas maltophilia
atgctcagtgacttcgagcaggatcggcttgttgagctgctggttgccacggccgaagttatcggcgaccggatcagcccgagcgcggccgtgttcatggtgtcggatctggcgcagtacccgctgccgatgctggagcgcgcgctggcagcgtgtcgccgggagttgaaaggccgtctgtcgctggccgcagttcttgagcggatcgaggacggacacccggcgccaaatgaggcttgggccaatgcgatacgtgccgcggacgaaggcgcaaccgtggtctggaccgagcaaacgcgcgatgcgtgggctgcggcactgccgctggtgctggcgggcgacaagatcgcggctcgcccggcgttcctggaggtgtacgcccggttggtgaaggaagcgcgcgctgcacatcgcacggcgacctatcagctgtcccttggcgccgacgcgtctggccgggatggggtattgctgcaggccgtggccgctggccagctgacgcacgagcaggtggcggaacaccttgcgctgcctccagctacgcccgcgttcaatccggtggcgctgctggctggaaccgttgaggcctcgccgaccgccgattccaggacgcgtgcgcgtctgatggaaatcgcggagctgcttgcaggcaaggccgcatga

SEQ ID NO: 504224 - DNA, 210 bp, Stenotrophomonas maltophilia
atgaagaagacgaaggccatggcgccgaggatcaacccccagggtgcgcctcgcgagcggcgcatggatcacaacacggtatccttccccaagcgagtgaatcccggcaccggtacacgtggtccggtggagagggtggagcggttcgaggcccgcggcggccgagttcagtgcctgtcgaccagctgggaggcaggacatgcagcttga

SEQ ID NO: 504225 - DNA, 786 bp, Stenotrophomonas maltophilia
atggcggcgcacgttgagcacgagtttaaagggaaattcgccttggaggaggagcatctccgcaagctcgatcagatgatcagacagaagtgtccacctgagggcaagtacaaaattgccgtgaagaggacggattctgcagcctacactacggagctagttgatgagttgtgtgcggaggataatggcccatcagcgacgatttcctcagtaagctatctggtcgagtcggataagctgacaattaagttggagtttgtgaaggaaaagaaggctaatctcgagctggtgggtgaggatcgtggggaggtttttctaattgcaggagatctgcgctcatacatcgatgcggaggttatgcgatggcgtgccatctctaggaaaggatttgtcgcgtacgtgattcctgtgagtatgttgataatgctttttgttgcatcgggatttactctattcaatcaagcttccgcagaggacataagtgcggcacttgcgagtcgtgaccttcatgcgaagctcgactttctcattgctcagcgacctgagacgcgtgtcggatccttttcttgggtcatgctgattcccctgattattatgggagtggcaatccttaatttgcatgagagagttattaattttctatatccgtatgacgatttctttattgggaagaagaagaatcttcttcagaagaaggccgctctgcgccagaacatcttctggattgtgttcgtgacaactgggatctccgtcctagtgacttgggcctttcaacgaaattcctaa

SEQ ID NO: 504226 - DNA, 477 bp, Stenotrophomonas maltophilia
atgaaccggatcaccatcgcggttgctgccttcgtcctttggtcaggcgcaatgttcggcgctggctgggcctggcgtggcgaccgggccgatgccagcgacgccaccctgcgcgccgccggcgcatcggcagtcgccgaccaagtgagccagacccgtgccaccgagcagagcaaggctcggcagctggccgacattggagctaagcatgaagaagaccgcactgcggccgcgaccgtccctgctgctgttgtggctgacctgcgcgctgggcgtctccagctgcgcgacgacctcgccacctgcagcaccagcctactgtcccaagccgtcgccggcgccgtcgaacgtgatgcgcacgccgaactacgagcagaggttgcgggagctgctgttcaaatcggccgcgacgccgacgaccacgtccgcgccagtcaagcagtaatcgcggccgaccggcaaacggtgacgcaatga

SEQ ID NO: 504227 - DNA, 738 bp, Stenotrophomonas maltophilia
atgccgattcctaagctgctgcagctggcgaagaacaacgccggccagtccaagcccatccgggcggaaaccgaaggtaaggaggcaaccatctacctgcacggcgtcatcggcgggtggtggggcgacattgacgagacgatgtttgcgcaggccatggccggcatcgatgcggatgtgattcatctgcgcatcgactcgcccggcggtgacgtgtttgcggcacgatccatgatgactgccatcgcccagcacaaggccactgtcatcgcccacatcgatggcttggctgcctcggctatgaccggggtctgcatggcgtgcgacaaggtcgagatcagccaaggcggcgcgttcatgatccacaacgcatggaccatcacggtcggcaacaaggccgacatgaccaagaccggtgagctgctggccaagatcgatgccggcctggccggcgactacacccgccgtactgggaaggatcaggagcagatcgtccagtggatggacgaagagacctggttcacggccgacgaagccaaggaacacggcttcgcagacgaggtggtggagatcgtgggcaagaagaaggcatccaacacctgggacctatctgcctacgacaacgcgcctgccgcactggtcaaccgtgcccccgaacccgacgacggcgccgccgccgccgcccacaaggcaaacctgtcgcgccgtctggcgctgctcgaacgctccgctgcgtaa

SEQ ID NO: 504228 - DNA, 333 bp, Stenotrophomonas maltophilia
gtgaggcgggcgggcaagtaccggcatcgcatcgagctgcaggattacggcccggtgcgtgatccgcttggcggggacgtgaagcaatggcgtagatggcgggctgacgtgccggcagaggtggttccgctttcgggtcgagagttcactgctgcctccgccgagcatggacaggtgactgcacgcatcgagatcccctacctgcccggggtagtgccgaccatgcgcgtggtgttcgacgggcaggtgtacgcgattcgtgcggtgctgccggatgcgacagcacgcgggcatatcacgctgatggtcgatgccggggtgtccgatggctga

SEQ ID NO: 504229 - DNA, 504 bp, Stenotrophomonas maltophilia
atggctgagcaagtaaagatcgacggcctggacggcctcctgcgttcactgcgggaggcacccaaggcgattcaagggcgagccgtgcaagccggtatgcgcaagggtggcaacgtaatccgcgacgacgcccggcgccgggctccgagagcatcggggttcatggcctcgcagatcgtcacccgccgggccaataccaaaagccggcagcgggcaggtgtaggccaaggcggcgagtacttcacggttggggttaagaccggtcgccgccggaagtacgccaacaccaagcgcaaccggcgccgtggccgcgtcgggaaggtctacgaggaggcgggctgggcctactactggcggttcaaggagttcggcaccaggaaaatgagggccgagccattcctcacgccagcaggtgaggctaagggcccggaggcggcgcaggtgatcatcaacgagacctggtcagcactggacaggcaactgaagaaggggggctggaaatga

SEQ ID NO: 504230 - DNA, 363 bp, Stenotrophomonas maltophilia
atgatggttcccctgatccagtccctgctgcagggtgatgcagcggttcggcacgttctgggcgacccgatccggttgtggccgggaaccgcgccacaggatgcagcactgccctacgcgacgtgggaggtggtcggcggttcgcccaccgcgatgctgtccgaggcgccgccgtccgacggctggcgtgtccgattgaccgtgtggggcgaagccctgacgcaggccaacggcgcggccgttgccatccgcgacgcgatcgagcgcgtaggcagcatcgagtcctacaaccctacgcctgatagcgacggcacggacgcctttggcatctccttcgacgccaggctcctgcaactgcgctga

SEQ ID NO: 504231 - DNA, 375 bp, Stenotrophomonas maltophilia
atgagcaagaccagcgaaaccacccaagcccagccgcagcagcccgtgagcatcctgcagtcgttcaccaacctaggcatgttcgcctccaaggacgttcgcgccgacacgatcaccttgcccaacggtgccaaggcacagttccatgtgcgcgagctgccggacgcggagttccgcaagctgtggggcgaaggcgatcgcgccaagctgatcgcagcgaccatctgcgacgaggacggtaagcccgtcatgaacgtggagcaggccgcccagctcaagcccctggtggccgctgagctgcagcgcgtggcaatgaagcactccgggttcggcgacgccgccgcccaggcgcaggccgacgcgggaaacggctaa

SEQ ID NO: 504232 - DNA, 216 bp, Stenotrophomonas maltophilia
atgtcgcgccgcgagttcctggaatggtgggagtttcacaagcgcaaccccatcgaccccgtgagcctgcacatcaagcccgctgccttcgccgcgtacatcaccgcctcgcacagccagggcgggaccaagcgctcctttcagcactacctcgacgccctcttgccccgctccgatgaggacgaggcgcaggactggttcgacggactgggatga

SEQ ID NO: 504233 - DNA, 1977 bp, Stenotrophomonas maltophilia
atgaccatgaccgacactttcgggcggttcgccgccacgcccattggcccggtactcgctgcgcgagatggcgggctgaccctggccaccaccggtgcaaccacgttggccagccacgcgcgctccgacttcggccttgatgccgggacggtgggcgtggagtttgcggtgtggggcgatgacgcccttgcagccctcgtaggcttcgccacgggcccggcagcgatgaacaaggcgctgggtgcggatctcgccagcatcggctgggatctcgccgccgggcgcctgctgcaggctggaggagcgatcgccactggcctgccggcggtggcccacggcgacattgtcgggctgcaggtcgtgttctcgacccctcgccagctgcggctctacctcaacggcgcgcagatcctggtgcgcgagctgcagctgtccgggccgctgttcttcgccgcgtcactggccgccaccaaggccggtgggctgtgccttgcggtcaacgcagggcagtgggggccgcgaagcgacgcggctgcagccggttggcggctccccagctctaccgccagccccacgcgcttggccgacgtggactggctgtccgcgcccggcgacagcccggcgaatgcccgttacgaggggttggtggccgagggcgtcaacctgatccaggagctggcgttctggccgtggggcggtgacccggtgtcccaggccgcggccgccgagtgcgtcgtggtcgatgcggaaggtttgctggacgggatggcgggcactggtgcctctggcagctcggtgcagatcctgttggcgcccgaaaacgggatgcgggccgacgcggtcccggccttccgttgcgcgatcgagcagatcgagatcaacgacgacggcaccaagacgctgcacctgcgcgatgcgcacgactacctggacgagacgctcaaccggggcgttttcttgccgaacatcgcgtccctggcatggaagccgcagcccgtggtaatcggggcagtggcgagcattccggcgatgggggccaactccgacgctacctcaatgttcgtggccgacggacgggtctacgtcgacgccgtgatggaccgcggcgacctgatggaggtcggcacctacagcgaggcgccggacgggcaacaggtgttgctgaagtcaccaccggtgacgcctgtggtcgtggatgcttccagtgttggcgctggcatgatgcccgccagtctggggcaggcagtaggagacgtgatggcgcggctgggccgcgaggcgtggtcggccagcgactgtgtggcgatcgatcaggccacgggctacatgggtatcggatactacgcgggctcggcgatcaccggtcgcgcagtattgaatgccctgctgcccagctacggcgccgggtgctatcaggatccggccggagtgctgcgcttcgttcgcgtgatcgcgcccgagacccacgcagggccgttcgcctttgatctgtctgaggcagacgatctggcggctgacctggtcatggtgcccgatgatgctccgaacctgaccccgcgtatggcctaccgcccgaacgcccaagcgctggccgcatcggatctcgtcaccgacgtggtcgacgttccgcaggcgcgccgcgatgagctgactggcctctaccgtgggcaggtgtatggggctggcccgctgcatgcccactaccagcgggcggaagctgctgatcctgtcatctcgttgttctggcatgcggccgacgcgcaacaggagattgatcgcgtcctcggcctctaccgggtgccgcgccacttctaccaactggcggtgcgcggtgatcaggatttggcgccgctgccaggtcagatcggcaggctcacgtacagccggtatgggctggaagacggcaagccggtgctggtgcgccgagtagagcgcaaccctgccacgggggacgtggtgctgacggtgtggggatga

SEQ ID NO: 504234 - DNA, 3387 bp, Stenotrophomonas maltophilia
atgcaagcaaggaaactcacgctggtagaaatcggcgtgggcgggctgccgtccgcgtctccggtggcgccgcgcttttccacctggttcccggtgcccttcaaggcgccggacgtgccgccggcgaacggggtcaatcccacgccggtagccgacggcgtcgtgctcgaatgggacaccgccgatctggagggtgtgatctacgtcatctcgcgcagcgagagccaggacggcccttggacggagatccaccgcaccaccgagacgcggtacgtctacagcgacggcagcggcaagacgtggtggttccagatcaccccgaccgttcgcggcaagacaggcaccggaaccgtagtgggcgttgttccgccgactacgtccaaggacctggccgaacagcaggccaagctggcggcggagatcagtgcccgcatccaagcgatcgcagacgaagcggctgctcgagccgccggcctggcgcgggccgcacaggacttggtcgccgaggcgctgctgcggcagcagggcgtgactgaagccatgcaggcgatcagcgccgaggcccaggcacggatcgatgcgctgctgaacgagaagatggcgcgcgaggcggcgatcagccgcgaggagcagctgcggcagagcgccgatgaatcgttggcgcgcgcggtgtcggaggtcgcggccggcagcgggacgcagttcgacagcatcaagctctggccgttcaaccagaccattgaagggtggtcgggcaacggcgcgccaaccctcgtggatggctggctgcggcccgccaaccacgccaccgcgccctgggtgcagtcgccggtggcactggccgtggacggcagcgcctatcgctttgtgaagctgcgtctaaagcgcgtgggctcgccgacatggaaaggcctcctgcaatggatcaccgccgttgatcagaattggaacgcggcgaagagcgcgagtgctcgagagcctgtgtgggacggtgatggcttggctacgatcgacgtgcaggacgttgcctggtggccggcaaccatcgacgcaatccggcttcaagtcggggatgctcagaccgtcgcggactactaccttatcgactacgttgcggtggggcgcccgcaacccggcgcgtcggtcgccctggtgcaggaggaaacccaagcccgaatcgctgcggacgcagccgaggcgctccagcgatcatcgcttgccgtgcaaatgcgaggtgattacgaaggaagcgacgtgacgggcgtgcgctcgggcctggtggccagtgagcgtgatgcacgtatcaacggcgacggggtcaatgcccaggcaattcagctgatcaacgctcgcatgccggatggaaatggcaagacagcaagtgaggcgagcgtccagcagctggcacaagcgaatgcggccgagcacgccgcgatgggacaacagatcgatcagatcggtgtgagccttgatgaaaaggctgatagtgcggttgtggctctgcttcggtcagaggtgaatatgatcgacgggcaggtacgggcaaactcgcagagcctcaccagccttaccgatcgagtggccttcacggagggcggcgtcgccgccaattcgtcggctatcagcgggcttgcgtctacggtaagccagcacggcgatacgatctccgcccacacacagcaactcactcagataggcgggaaggtcacggatctggaaggcaaggaacttgccaattcctcggctatccgtgggctcaccacccaggtgacacagcaaggtgggcgacttgacagtcaggctgagcagctcatgcagttgtcgtcgcgtgttggcgatgtggatggcaagaccaacgccaacgcatcggcgattggcgggttgaccacgcgcgtcacggagactgaacagggcctcgccgcgcaggcgacgcagacaggccggcttgaggcaaggttggactcgtccaacccgaacctgctccagaacccgaagtggtcggacggtctgacgaattgggtaggtactgatgggattattgttagctacaccgattggagcggtacatttctgcaactcctcgctcgccctggtgactaccgctacctgttccaagcagtccccttcgttggagcttcctacactccgttcaccggaagcgtagacatgtaccgcaacaacgttcgcggtgcagtgtttgcgcagatggagttcttcgacgctgccaataaccgcatcggaacgactccccgtgcagacgcaacccatactccgggcacctggaagcgttacgagttcactggcgaaactcccccgggttgcgccaaggtgcagatcgtagtctatagctacgacaccgactccaacgcgtcattccgtcgtgccaagttggagacgggtcgatacgctactaccttcgacgaaggccgtaacgtagatgcacttgctagcggctttagtaccctaaacgcgaccgctacgcgccatgatggtcagatcacggccaacgccagcgcggtgcagggtgtgcaggcacagcttggtggcaaagccgattcggcggttgtagtgacgatggacgccactatgaagtcgctgggtgcgtctggcaacctactgcctaattccaccttcccaatgtggaatcgcaacggttggagctggtggggcaacgcgggtgactggttcaacgagcttgggaatccgaccggcggcaacgcctggaaccagccgggtgtcactggtttgggttcggtagccaagggcggcacggcagttggtgagattcgagtgttcggtatggataccgacgttgcaatcgaacccggcagaacctacgccatttcggcatacatgcagcttcaccgctgcgactcgcagctggcattcttcttctatgattctgcgggcaaccagttggcatcgccgtccagcacctgggtgccgtcgaattggggcaactccgccaccagtggccttactagcctcccgcgccccttcgtgatctccaaggccccgcccggcgcccgtcgtgcgcgcatggcggtctacatccgcgcagcggcaggtgcagatacgtctgctccctacttctggatgttccgtccgatgttcagtcaggtccttgacggagcatccaccgcgccagcgtggacagcaggcggccaggaggcatccgcacagtggggagtgaacgtgcgtgctgacaagaagatcggtggcgtgcagctatccgctacgggtgagatatctgccttcgacgtgctggctgacatgttccgtgtgtcatctccaagcgccggtatgcgcactgagttcagcgacggaaactggcgtgtttacgaccagaacgggcgtctgcgtatgcgatggggggttgtgccgtga

SEQ ID NO: 504235 - DNA, 918 bp, Stenotrophomonas maltophilia
atgctacagatatcagatagctggcctgaagcacaaacgacacgtcctttctggaaattgttcatcctttgcctcgccactactgctgccatttgtgctgcggttctgatttttgttgtgggaattgctgttgcaaaagtgtttgggttgcctttcccgtctcctaccatactggaggtcacgcacccggggcttgagaacgaacacttgcttctcggtacggttgcgtttgcgttcttcttaactggtctcgcagttctcgtgccggcaaagttggtctatcgaacttcagcttgctcgatgctcttcccatcccgaagagagtggctcctctatggggtatggggtgcactgatgacattggtggcctacatcattgttagcaccttcttgtctgaggggcaggggctagaggagacgcctttggctgaagcgatacggggcggttttggcggtagatacctgttggcgaatattatcttcctgttcgttatggcggccacggaagaaatcgtttgtcgtggtgtatttctgcacgttactaggacgttcttcagaagtccggcggtgttgtgcgttgctaacggtttgttcttttcgctactccatgctgagtttgatcctgtcgttttctttgctcggttcgtgtcgggagcgctttggacgtggtacacgttgaggtcgggatcgatcgctttcgcggttgcatcgcactggatgggcaacctctttatcgctctgtcccagtccccgatatacgaatccgctgaagaaagtggaactctgcaagacctgctggccattctttccgttgaggcgatagtgctcggtctattcgttcttctaatgcggcgttccgacctggttcggcagctggggcgaggtgtcaagcccaactcgccttcggggaggcgttga

SEQ ID NO: 504236 - DNA, 933 bp, Stenotrophomonas maltophilia
atgtgctattccgcccagatcacagccgcctatcagaagctggtccggatgaccggcgccaccctgtcgctgcaggagttcgccgcgctctacgcgcacgacccgggcaagaagcggcctaagactccgaaggccatggatgacgccttccgggccggcgcgagcccggcggagctggcggtgtgggccgaggtcgagcaatggaacagggccgaggccaccatcgtggagcaggagctgttcgccaaccgcaagcggctggccgacgccgagcgcgcgctgcaggtgaaggagacgaaaaaggcccgcgaggacgtgcggattgccggcaacaagattgagcgggcaaaggcgcggctggcggacctgcaacgcgttgagccgaaggaccgcgacagccgcatcttccccggcgtttacgccccggtgatcgtctccgagggcgggaagctggttatcaagccgatgcgctaccagtgccgcctggccgggaagccggccaattacgaccagcgtttccccggcacctacaacgcccgccgcgacagcctggagaagttctgggcaccggccttcggccacacccacggtctgatggtggtggacacgttctacgagaacgtcgaggggccggacggcaagaaccaggtggttcagttcacgccgcgcactggcgagcccatgctggtagcgtgcctgtggtcgcactggaaggatccggccggcagggagcctgatctgctgtcgttcgccgcgatcaccgacgaccctgagcccgaggtggccgcggccggccacgaccggaccatcatcaacatcaagcccgagcatgtggatgcttggctcaacccggacccagccgacctgaacgccctgtaccggatcttcgacgacaagcggcacccgttctacgagcaccgcatggcggcgtga

SEQ ID NO: 504237 - DNA, 276 bp, Stenotrophomonas maltophilia
atgaacgatgccatctccgacctgctggagcgtgtccattcctgcgaagttgcaatcgaagtccaccgcggctatctgaaagccatggagtacgcgctgcgggtttcggtgctgacccaccctgctcccgagcgactaagcgatgcatggctccagctactacccagtatcgctgcgaggcacaaagaggatggcggcgagctatttggtgccgccttccagcagtctctaacccttcttaccgagcaaataggcgcggagaacacgcacccttag

SEQ ID NO: 504238 - DNA, 2421 bp, Stenotrophomonas maltophilia
atggccagtaacgttcaaacgacaacgatcacgatcggcggtgaggtgtccaagtcgctgaaggacgcattgtccttcgccaatgatggcgtgaagcgcctcggcgatgaagccggcaagctggagctcaagctcgccgcgatgaagaagtcgggcaccgcatacacccgcatgcgcgcgcaagccgatgcgctgcgcgcctctcaggaagcgctggagcgtgtcgaagccaagcgcaccgccaacctggagaagcgcgagaaactcggcgcctcgttcaaggcagcgcgcggcacactcggcaccgccgtcaccgcactggccaagccggtcgagaacgcctccggcttcgcccgccagaaccagcagatcggcgtggcagccaacctcagccgcgcgcaggtgagtgcgctaggccaagcgatcctgcagcaatcgcgtgcaaccaaccagggcgccgacgatctgcagcggtcgatcaagctgatggtagcggccggcatggacgcacagtccgcgcaggccagcctcggcgccgttggacggaccaccaccgtcaccggtgccagcatcgatgatgtggcccaagctgcggccgccctgcagcagtcgttcgatatcgatccctcgcgcatgcagaacgcgctggacgtgctggtggtgaacagccagcagggcagcctgggcctgaaggacatggcccaggtgctgccggtgctgggttcctcgttcgaggcgatgaagctgcagggcacatcggcggcggctacgctgggtgcggcactggaagccacgctggactcggcaggtggcgccgacaaggccgccagcaacatgaagagcttcatgtccgaggtgctctcgccggacattcaggagaaggccaagaagagcctgaacctggatctgcacaagatcatcggcgatgcacagaccagcggcggcaatcccttcgacgctgcgatgcagggaatcatccaggcgaccgcgggcgaccagaagaagatcggcaccctgttcagcgatgcacaggcgaagaacttcgtccagccgatgatcgagaactgggatacctacatccgtgtccgcgacaaggccttgaatggatcggcgggtaccaccggtgcggcctatgccgatgcgatgcagaccgatccgcagaagatcgaaggtgccaagatcgccgtggataacctatccaaggccttcggtgcggcactgctgcccgcggtgggcgaggccgcggtcaagctgaccgagctgttgaacggggttacctcgttcgtgcatgaaaacccgaagctgatcgccaacaccacgcagatcgtggtcggcatgctgggcatgcgcacggcggtgctcggcgctcgctacgcctggactttcctgcagggcccgatcctgggcgtgcagaaggccttccagctgttccgtggcggcagcctgctggcacagctggggcgcttcgggccgatggccatgcgtatcgcctcggtgttccgcgtcgtcgccaccgcagtgggcgccattggtggcggccctatcgcggtagctgtggccgcgctcactgccggtgccctgcttgtccgcaagtactgggagccgatcaaggccttcctgggcggtgtatgggaaggtctcagcagcgcgggcacctccgcgatgggagagctgatgaatgccgttgcgccgctgcgtccggcctgggaggccgtgagtgccctgctgggacaggcctgggactggctgtcgcggatgctggccccggcgcagtacaccggaaacgaactctcccgcgtgggcgagatcggcaagctcgtgggcgaagcgctgatgttcaacttccgcgccgtcatccaggtcgctggcttcgtcgccgaggtcttcaggatgatcggtgaggtcatcggcacggtggctggattcatcgtcgtcaccttcggcagcgcctgggactgggtttcagcgaaggtcagcagcgtgatcgacacgatgatggccaagatcgcccccttcatggaggtggtgggcaccatcatggacaaggtcgggggcgtgctgggcaccgccaaggacaagatcgcgcttggtgtgaacaccgcggctgatgcctacggcgcgatacgcgcaaacggcggcatacagctgcctccggtgatgctggcgcccgccagcatgcacagcgccagcgtgcagccacgcatgccgaatgcctttggtacgccggccgggcgtgccgcaccggagatgccttcgcccaccccgcgcagcgccaccaccgtgcagcagcagcagaccaaccacatcaccatccaccagcagccaggcgaatccagcgaagcggtggcgcgccgcacggccgacgagctgcagcgtcgcaacgcggttgccgcccgtggtggcctggcagacaggaactga

SEQ ID NO: 504239 - DNA, 585 bp, Stenotrophomonas maltophilia
atgaccttgcctactgaaccgcgcttcgcgcactcctacgatccccacacccgtgcctacatgggcaaggtccgtctgcaaccttcgcccgatggcgcgtggaacctgcctgacttcactgtggacgtcgccccccgccaggccgcaggcgaataccagtcactgcgcctggccgaggatggctcacgctgggaactggtggccgatttccgcaactgcatgctgtgggacacgcgcaccgcgatggcggtacccaatcgcctcgcgctgggtgagccgttgcccaaggacgtgaccctgtccgagccgttcaagctggatggcaccaccgcgcagtacaacgcgtggaatgccagccgccgcgaatggacgctgttgccggactacagcacgcgccccctgtggaacaagcacgatgccagcttcgccactcccctgccccgcggcgtggcgctgccgtccacggtcaccgacctggcaccacccggcgatcgcagctatccggtcaccttcgatgaagccagcgccgcctgggcaagggtgagtgcgcccgatcccgaagcgggcacgccgccgcagccgtga

SEQ ID NO: 504240 - DNA, 1500 bp, Stenotrophomonas maltophilia
atgcgcttgaaaatcaccgacgccggcttcgccaggctggtcaatccacccaacaccggcaccagtgccgtgctgatcaccgagatcggcctgacgtccacggcattcacgccgacggcagggctgaccgtcctgcccggcgagatcaagcgggtctcgacgttcggcggcaaggccgtgggcgacgacacgctgcacgtcacgatccgtgacgacagcgctaccgcctacagcctgcgcggcttcggcctgtacctgggcgacggtacgctgtttgcaaccttcggccagaccgatccgatcatggagaagaccgcagcctcgatgctgctgctctccaccgatacccgcttcagtgaagtcgataccgcgctgatcgagttcggcaatgccgaattcatctatccgccctccaccaccgaggtgcagggcgtggtcgaactggccacgacgaccgagaccgaagagggtgcagatgcccagcgtgcggtgacaccgcgcgggctgcgtgccttcatcgacaagcgctttggcgccagcgcccccacccagttcgtccgcacgctgttgtcgatcgccaccgatgccgcgttccgttccgccttggggctgaaatcggccgcgttgaaggacgagggcgccgacaagggcctggatgccgacctgctcgatggccgccacggcacccactacctggactggcgcaacatgaccggcgtgccatccagcgtgcacgtgcccggacaggtgattctgttcgccggtgccaccgcgcccaacggcatgctgctgtgcaatggcgccgctgttccgcgtgccagctacccggccctgttcgccgccatcggtacccgctacggcgccggtgacggcgcaaccaccttcaacctgccggcaatgcaggaaggcacggtggtcacgcacacactgaacgcggaagcggtcggcagcttcacccagggtgaggtgatccgccatgcccacagcgcaagcacggcaacagcaggcagccacagtcatgccatctccgtaggcgcaggcggcgcgcactcccacggtgccagcgccagtgccgtcggcgaccacgcgcatggtgcgtggaccgactcgcagggccaccacgcgcataccggtggcacctcgtgggctggcgaccaccagcatggaggcgtcgttccctccaatcctgccctcaacggctacggcgtctatcgcgaacgcgacaacgacgcgctgtatccggacggcgccacagcacctgccggcggccacgcccacagcttcaccaccgacggcgctggtggccatggtcacaacatcggcatgaacggcgccggtggtcactcgcacaccatttccatcgcccaggtcggcgaccacggccatgccgcctcggcggcggacgccggtgcacacagccatgccatcgtggtggaggccgccggtggcgaccgcaacctgccggcgggcctgcggatgatctattgcatcgcgtactga

SEQ ID NO: 504241 - DNA, 1302 bp, Stenotrophomonas maltophilia
atgaatgattccaccgcacgcctgatcaatgcacgcctgcgtggcgtgatcgatgggcacaacctgcagttccgccatccaggtggcgcactggccaccctgcaggcggtgtaccgcgccgattggcaggggcgattgaagctgtcggacacgatgcggcgcaacctgcagcgtttctcggcagccttcgaccatccacgatggaaaggcttctacgtgaagccggcgaacctgtcgtacagtcatcccgctccggatggcagctccagtgcctggtccttcccggtctccgatgcgatcgggggcccggagcagaacttcgccggcgtggtggacgaggatggaagcgcgtttcccaatggtgccgtgcgcaccatcagcatctggctgcgtgcaaccgaaccctgtgcgatcgacttcggcatgcgcaccaccggtgcaggcaggacccgtctgcaggtgggcaccgagtggaagcgctacagctacacctatgccgcaaccgcggatgacgccccccggggcgtgagcatcgtgctggatcggcgggcgggcgggaacgctggcctgaagccggacagccgcatccacctttggggcgtgcaggtggaggaaggccgcgaggcgaccagctacatccgcaccatgcccgagccggtgggcgtgatcgattacagcgtgctcaacaatgtgatcacgctcagccggccacccgctcccggttcgatcatcgacgccgacgtgctgatcagggtgccgacggcaaccaccctgctgccgcccaacgccacccgcgcggaacgggcgctggcccgtgctgcggtaacccgcccgctgccggtggacatcaccgcgctgtgggatgcggaccgctgcccggccgcgttgctgccttggctggcctgggccttgtccgtcgacgaatggaaggcctactggccggaaacggtaaagcgtgcccgcgtgcgcgccgcgatcgcgatccagcgccgcaaaggcacctggggcagcgtccgcgatgtggtggctgcgttcggcggttcgatcctgatccgcgaatggtgggaaatgcagccgcgaggtgcaccgcacaccttcgaagcggtgatgaccatcgccaaccagggcggcgagaccgccaccgccaagttcgtcgacgacgtgatcggcgagatcagccgcaccaagccggtgcgctcgcacttcacgttcacccagggcatgcaggccagcgccggtatcggtgcacttgccggcgcccatggcaccaccttccgccgcatccaactgatcggagagtaa

SEQ ID NO: 504242 - DNA, 648 bp, Stenotrophomonas maltophilia
ttgccgctgggcgacgtcaaccggctgatcctggcgcggcccgacgtggtgcgggccgagcggctgctggccgccagcgtcgaggacgtgggcgcggccaccgccgagctgtacccgcgcatcgacctgggcggcttcctcggcttcttcgccctgcgcgacggcgacttcggcagcgccgcctcgcgcgccttccaggtcgcgcccgcggtgacctggcccgccctgcgcctggggaatgcccgcgcccgtttgcgcggggccgaagccctgtcggacggcgcgctggcgcgctacgaacaggtgctgctgaccgcccaggaggaagtcgaggacgcggtcacccaactggccgaacagcaacgccaattggccgcgctgctgcaggcggggcagcacgcccaggccgcgttcgacatcgccgacaggcgctaccgcgccggggccggcagctaccaggcggtgctggagaaccagcgcacgctgttccagctgcgtcggcaggtggcgcagcaggaagccatttcccagacccggatcgtggccctgtacaaggcgttgggatggccagtcccgagtcccggtgacgtggcgagcctgtctgccggcgcgggccggcaggacgcggggcgagattccggagcgtaa

SEQ ID NO: 504243 - DNA, 903 bp, Stenotrophomonas maltophilia
atgctgatgcgccatatccggtatttcatcgccgtggcggaggaactcagctttacccgtgctgcggagcggcttcacatcgaacagtcgccgctgtcgcgatccatccgccaactggaggatgacctgggcgtccggctgttcgagcgtaacagccacggcacccggctcacctgggctggacaagtcttcctcgaggaggcgcggcgcgtgctggcggcggccgagcaggcccgtgccggcgcaagggccgccgcgaccggataccgcgggctcctgcgaatcgcactgtccgacggcatctcgccatcgcacctgagcaacctgctggcccgctgccgcgaggagtcgcccgaggtcgagatcagcctgttcgaagtgacgctcgcccagcagctgaaggggctgcgagagggcgactacgatgcggggttcgcgaaggcggagcatccgggggaaggattgctggccacgccggcgtggagcgagcctctggtcgtcgcggtgccggcgaggcatcccgccttgatccatcccgagctttccctgatggaactgctgtcccatccgctggtgctgtgcgacccggacgcgtgcgcaggatgcagccggcaactcgacaggctgctgcgtgccgcggaatgcgaggtcaggattgccgaaagggtggcgtcccatgacttgctgatggcgctggtggcggcgggctacggccttgggatcaccacccgcacgcatctgtcgctatggcggcatccggatgtcgtctcgcgtccgctggccggtgaagtgcccccgttgacgacctacctgttgcgccgggatgccgaggactcggagcaactgcggagctttgtcgagcgattgcgcggtgccacgatgcccgagcccgacaaggtgtag

SEQ ID NO: 504244 - DNA, 612 bp, Stenotrophomonas maltophilia
atgacacgatcgccaacaaaaagtgatttcgtcctcgtccacggtgcttggcacggtggctggtgctgggagcgcctgattcccgtgcttgccgcctcggggcggcatgtggtggcacccacgctaagcggcctggatggcgagccggggcggttcgggctgagtcgtcacgtcgaggatatccttgccgctgccgaaggacttgcatcgatcacgctcgtcggccacagctatgccggattcccggtctgtgttgccgcatcacggctgggcgagaggatcgaccatctcgtgctgctcgacgctttcctgcctgccaacggagagaaattgctcgaccacgcgccccatctcattgatcgttacgccagtgccgtggccaccgatcctgactggcgtatccctccactgcccgcatcggatttcggagtatccctctccgaccagacctggatggatacgcgcctgaagagccagcctccacacagttacttcgagtctgcccgtctggaaagtccattgcctggcggacccaagacctacatccgctgtcgccaggcgtccggtgatctgctcgcgcgctccgtcgcccgggccaggaacgacggctag

SEQ ID NO: 504245 - DNA, 609 bp, Stenotrophomonas maltophilia
atgcgccccgacctgctccttgccttcatgacctatgcgttcgtgacttccatcacgcccgggcccaacaacaccatgctgctcgcctcgggactcaaccatgggttcgttcgcagcgtgccgcacatccttggcatcagcatcggctttgcggcgatggtgttcggcgtgggggcgggactcgggcgcctgttcctcgcgtacccatccctgtacaccacgttgcgcgtggtcggtgcgatctacctgctctggcttgcctggcagatcgcgacctcacagccgttgcaggagacggcggcccccggtcggccattcggcttctggaaggccgccgccttccagtgggtcaatcccaaggcgtggatcatggccatcggggccatcgccacctacgcacccgccgagggcggcgtgccggcggtgatcgccatcgcggtcctctatgccgttgtcaatgcccccagcgtcgccgtctgggccgccttcggcacgacgctgcgccgctggctcacggaccggcgccacctgcgcgtcttcaacatcgcgatggccgtgctgctcgtgatgtccctgtatccgctgctgtccggccacgcgtcacaatga

SEQ ID NO: 504246 - DNA, 621 bp, Stenotrophomonas maltophilia
atgctcaagattcttggaaagcgatcctccatcaacgtccgcaaggtcctgtgggcttgcgccgagctcggcctgccgttcgagcgggaagactggggcagcggctacagcgacgtgaacacggaaacgttcaaggcactcaacccgaacgcgatggtgcccgtgctgatcgacggggacttcgtgctgtgggaatcgaacaccatcctgcgctacctcgccaatcgccatggcaacggcgcgctgtacccacgcgatgccatggcgcgcgcccgcgtcgaccagtggctggactggcaagcgtcggacctcaaccgtgcatggagctatgccttcatggcattggtgcgacgctcgccggagcacgcggacgcccgccaggtccagcgatccctggaagactggcatcggttcatgcgcgtactggacggccaactggtcgacacggacgcctacgtcgcgggcggggacttcagcctggcggacatcgccatcgggctgtcggtccgccgctggtaccagacacccttcgagcatccccgcctggatgcggtggacgcctactaccgtcgcatcgaacagcgcagcggattcatcgcgcactgcatcggcgtaccgtga

SEQ ID NO: 504247 - DNA, 600 bp, Stenotrophomonas maltophilia
atgttcgccagcaatacagaatcgccccccgtcgcccagccaggaggtgccagtaccttcctcgaagaaaaggcctttcgcgcacgcacggtacttgtgttcgggaccgtgaccgatgcgctggcctcggagaccgtccgcaagctcctggcgctggacgcggaatccagcgcaccgatcaccatgatcgtctcctctccgggaggccacctcgaatcgggcgatgcgatccacgatgtcgtgcgcttcgtttcctcgcccgtcaacatggtgggcacaggctgggtcggcagcgcagccacccatctctacctgggggcgccacgcgagcgacgcttctgcctgccgcagacccgtttcctgatccaccagccgagcggcggtgccggtggaccggcgagcgatatcgcgatccaggccaaggagatcatcaaggcccgggagcgcatcgcccaggtcatcgcgcgcgagaccggccagcccctggaacgcgtgctgaaggacatcgagcgcgacctctggatgccggctgaggaggcggtttcctacgggctcgtgtcgcgaatcatccagcgccgcgaggaactcatgcccgcctga

SEQ ID NO: 504248 - DNA, 777 bp, Stenotrophomonas maltophilia
atgtcctcgaagcgaaccaccttgccgggccgggcccaggccattcgcaagcgcgccgggcgcctgccacggctgccctgggtggtcgctggcatccttgtagccggcctgctgggatggctcctgtaccgcacgcccggtgcgccggcaccgcgcacggggcccgatgtcgcgcaggcacatccggccggcccaccctggcgccgcggcccagccgatgcgcgcttcacgctgacgctgtacgccgacctggagtgtccgttctgcaaggcctactacccgaccctgatggcctggatcgatgcccatcccgagaccagcctgcggtggcatcacctgccgctggcgatgcacgatcccgaggcgagtcggctggcccgcatggccgagtgcgcaggtgaggcccaaggccacgaggcgttcttcgatgccatcgcctggctctaccaaaacacccggggcgatggccaggggctgccggctgacctgacctggccaggcctgacggccgccatccaggcatgcctggacagcgaccggcccgcagccatcgttcgcgcgcaggccgacgaggccctgcgcagcggcatcaccgccacgcccaccgtgcggctggaagacagcctcacgggaagatcactgctgctgcatgggttggtcgagggcgatgcgctgctgtcggcgctggacctggtcgccagcgatgcgtcgggtgctccagggcccaaccatgccgccgatgcggcactcagcagagacacccgcactccgcgatga

SEQ ID NO: 504249 - DNA, 2880 bp, Stenotrophomonas maltophilia
atgggctggcgattgccgtggccgcgtcgtccggcccccaggccagtccaggccgacatcgagccggacgcctgggcacagtatgtcgcccgcctcgccgcgcacggcatcgaggcacctggcgccacccttgggtcgaatcatcggcgccctgcgacgcaggccgaccacgcggcgctctacgacgtggcgccgtccttcgccgacttgctgccctgggtcgagtacctgccggccacgcagtgcatgctgctcgaagatggccaatcggtggcggcgttcttcgagttgcagccggtcggtaccgaagggcgcgagaccgcctggctgtggcaggcccgcgatgccctggagaatgcgctgcaggactccttcgacgagttggacgagaacccctgggtggtgcagctctacgcgcaggacgaagccgattgggaccactacctgcgcacgctgggggcgtacctgcatccacgcgcgcagggcagcgcgttcagcgagttctacctgcgcttcttcggtcatcacctgcgcgcgatcgccaagccgggcggcctgttcgaggacaccatggtcacgcgcctgccatggcgtggccagacccggcgcgtgcgcatggtggtctatcggcgtaccccggacgccgcatcggcccgacgcgggcaatcgcccgagcaggccctggcgacgatctgcgaccgcctggtcggcggcctggcgaatgccggcgtcaaggcccggcgccttggcgcggcggatattcacgactggctgctgcgctggttcaacccgaatcccggcgcgctgggcagcacggccgaggaccgggaacgcttctacgcgctcgcccgctacccggaggaacgggaagaaggtgagatcgaactggccagcggcgacttcgcacaacgcctgttcttcggtcagccgcgctcggatgtcgcccgcggcctgtggttcttcgacggcatgccgcaccgggccatcgtcatggaccgcctgcgctcgccgcccgcgaccggacacgtgaccggcgagacgcgcaagggcggcgatgcgatgaatgcgctgttcgaccagatgcccgaggacacggtgatgtgcctgaccctggtcgccacgccgcaggatgtgctggaggcacacctcaaccacctggcccgcaaggcggttggcgagacgctcgccagcgaacaggcgcgccaggacgtgcaacaggcccgcggcctcatcggcagcgcgcacaagctgtaccggggcacgctggcgttctacctgcgcggccgcgacatggcgcagctcgacgcccgcggcctgcaactggtcaatgtcatgctcaatgcgggcttgcagccggtgcgcgaagaggacgaggtggccccgctcaacacctacctgcgctggctgccctgcctgttcgacccggcggcggacaatcggcagtggtacacgcaactgatgttcgcgcagcacgcggccaatctggcgccggtgtgggggcgcagccagggcaccggacacccgggcatcaccttcttcaaccggggcggcggcacgatcaccttcgatccactgaaccggctcgaccgacagatgaacgcccacctgttcctgttcgggccgaccggctccggcaagagcgccacgctgaacaacatcctcaaccaggtcacggcgatctaccggcccaggctgttcatcgtcgaagccggcaacagcttcggcctgttcggtgacttcgccgcgcggctgggcctgagcgtacatcgcgtgaagctggcacccggcgcgggggtgagcctggcgccattcgccgatgcctggcgcctggtcgatacaccgggccaggtgcagacgctggatgccgacgccctggacggggacggcgacacccatcaggccgacgacggggatgaccagcgggacgtgctcggcgaactcgaaatcaccgcccggctgatgatcaccggcggcgaggacaaggaggaagcgcgcatgacgcgcgccgaccgcagcctgattcgccaatgcatcctggacgccgcccagcgctgcgtggcacaggcgcgcacggtgctgacccgcgacgtgcgcgacgcgctgcgcgaacgcgcccgcgacgccaacctgccggatgcccggcgcgcgcggctgctggagatggccgatgcgatggacatgctctgccagggcgcagacggcgagatgttcgaccgtccgggcacgccctggcccgaggcggacatcaccatcgtggacctggccaccttcgcgcgcgagggctacaacgcgcagctctccatcgcctacatctcgctgatcaacacggtgaacaacatcgccgagcgcgaccagttcctgggtcggccgatcatcaacgtcaccgacgaaggccacatcatcaccaggaacccgctgctcgcgccctacgtggtcaagatcaccaagatgtggcgcaagctcggtgcgtggtactggctggcgacgcagaacatcgacgacctgcccaaggccgccgagcccatgctcaacatgatcgagtggtggatctgcctgtcgatgccgcccgacgaggtggagaagatcgcccggttccgcgagctgtcgcccgcgcagaaggcgctgatgctgtccgcgcgcaaggaggcgggcaagttcagcgagggcgtcatcctgtccaagtcgatggaagtgctgttccgcgccgtgccgcccagcctctatcttgcccttgcgcagaccgaaccggaagagaaggccgagcgctaccagctcatgcgccggtacggcatcggcgaactggatgccgccttcaaggtggccgagaagatcgaccaggcgcgtggcatcgcatcgccgccgctgtccctgccgaaatga

SEQ ID NO: 504250 - DNA, 432 bp, Stenotrophomonas maltophilia
atgcgtcggacctggattgaccgcccccttgtcctgctcgccgccgccgttctcgcgggttgtgccaccagctcggaaaagctgctgccccggggcgagcacaccatgctggacatctggcagcacgagactggcggccatagcggaggccaggccggccgcctgctgctcgacgcacgccaggacctgcgccgtccgctgaccgacgctgacaccctcgtggcgcccgtccggaacgcggcctacacccgaacggcagcgaacgagatccagcgacagttccatcgactgccgaaccccgatctggtgatgtacgtctttccgcacctggccggcaccgacccggtaccggtgcccggctacagcaccgtcttcccgctctaccagcgcgtgcagtacgcgatgcccggcgagcggctggaggactactga

SEQ ID NO: 504251 - DNA, 1419 bp, Stenotrophomonas maltophilia
atgaggagtaatcccctgttgaagtggctgctgattccgatggcattgttgctggtgttcgtcggtgccaggttgttctcgggcagtgacgctgcgcctggcaagcaggatgtttcagggcagctcactcccgaagaaatgaaggcgctcggcatcgcgggcgacaccccgcgcgataccgtcgccaccctggtcgcgcaggtcaagcagctccgcaccgagttgcagaccgcgctgagcgacaaccgccagcacaaggccgagaacgagcgcctgcgcacccgcgagggtgcgatcgaccagcgcatccagaatgccctcgacagcgaacgccgccgcctggaacaggagcgaacccaggccgccagcgaccggcagcagacgcaagggctgatgcaggaattgcagcgccgcctggacgggctgtccggcaagggcggtgccgccgacctgccgatcggccttggactggacgggcatgacggcgggccgctcacggatggcggcatgcgctggatcgaaccggctgacgcccggcccgatcccaagggcggttcgagcagcctgcgcttgcccgcctttccctccagcttcggcccggcctcgccggaactgtcggccacggcggaggccgtcagcgacagcacggcgcaggctgttggcggcaccacccaggcggtctatacgttgcccaccaatgccacgctgatgggctcggtcgccatgaccgcgctgatcggccgcattcccatcgacggcaccgtcaacgacccgtttcccttcaaggtgctgatcggggccgacaacctggtggccaacggcatcgagattcccgacgtggccggtgcggtggtcagcggcacggcctcgggcgactggacgctctcgtgcgtgcgtgggcaggtccgctccatcaccttcgtgttcagcgacggcaccatccgcacggtgccggaggacgacggcaagcgcagtcgaagccagaacagcaccagcctgctggacggcctgggctggatcagcgatccctacggcatcccgtgcgtctcgggcgagcggcgcagcaatgcccagcagtacctgggatcgcaggcgttgatcaccgcggccggcgcaggcgccgcctcgctcatcaagtccgacaacggcagcgtggccgtggtcgccaacaacagcggttcgctgggcacggtcggcatttcgggcaacgaggccatgggccgcatcctcgccggtggcgtgcgcgacatggccgactgggtcaacaagctctacggccaggccttcgctgcggtctacgtgcagccgggcgccagggtggccgtgcacctggagcagccgatcgccatcgaccacgacgccaaggggcgccgggtgaaccacctcatgggagaagcgcatgcgtcggacctggattga

SEQ ID NO: 504252 - DNA, 888 bp, Stenotrophomonas maltophilia
atgaaacaccacgtcttcaccatcgtggcgagcctggccctcggcttcggcctggtgccggacagccatgccatcgagatcctgcgctggcagcggctgccgctggccgttccgctggtcgtcggccaggagcgcgtggtcttcatcgaccgcaacgtgcgtgtcggcctgcccccgagcctgggcgagcggctgcgcgtgcagagtgcgggtggagccatctacctgcgcgccaacgaggccatcgcgccgacgcggctgcaactgcaggatgtggaatccggcgccatcgtgctggtcgacatcgccgccacggaggcccgggaagacgagcagccgctggagcctgtacgcatcgtcctgcaggacgccgccgcggaggccagcaaagacaccgccgccggtccgagccaagcagcgcaacccgccaagcgtcggcagacgccggtagccgttgtcctgacgcgctacgcggcgcagaacctttacgcaccgctgcgcaccgtcgagcccgtggccggcatcgggcgcgtgccgctgcggcgcccgctcgcgctggacacactgctgccaacgctgccgctcaaggcgcgggcgctggcggcctggcggctcgaagaccagtgggtcaccgccgtgctcctgaccaacacctcgcctcaacggatcgacctcgatccaagggcgctgcaaggcgatttcgtggccgcgacattccagcacccggacctggggccagcgggcgcttcgaccgacaccacggtggtctatctggtcacgcgcggccgcggcctggccgagtccctgatgccggtgctcagccccatcgatgccggcacgaacttgccgcccgccgccgctgcggggaggacgtccgatgaggagtaa

SEQ ID NO: 504253 - DNA, 678 bp, Stenotrophomonas maltophilia
atgagccgtttcaggaacgaagtccatcacctgcaggcccatgtgcgcacgctgcgcctgggcgccggtgcgttgttcgtggtggcgctgctgctcggtttcggctggtggagtgcgccgaggcaactgacgatccacgtgccccccgatctgcgctcgggcagcacccgcgcctggtgggatgtgccgcccgagaatgtctatgcgttcgccttctacgtctggcagcaggtacaacgttggccgacggatggcgaacaggactacccgcgcaacctccacgcgctgtcggcctatttcacaccggcctgccaggccttcctgcgacaggactacgagtaccggcgcagcagtggcgaactgcgccagcgggtgcgcggcatctacgagattccggggcgcggctttggcgacaaccccacgatgcgggtgaagacggtttccagccgcgactggatcgtcacgctcgatgtcagcgcggacgagtactacggcgccgagcaggtcaagcgggccctggtgcgctatccgctgaaagtggtgcggctggacgtcgacccccagcacaaccccttcggccttgcgctggactgctatgacggcgcgccgctgcgcatcgaggcagcgccaccgtccggcacgcccggcggcggcctttcgcagggaggcaacccatga

SEQ ID NO: 504254 - DNA, 411 bp, Stenotrophomonas maltophilia
atggctgccttgaacgatatcgcgcgtgacgggttggtgaccttcctgccgcacaggctgaaccgccagcccgtggtggtgaggggcctgaccgccgacgagctctggatctgcgccggtctgtccgcggtggcggggttcatcgccggcgtgccgctcgcctgggccacgcacagcgtcgccatggtgccgaccctgatcgtggccggcgtggcggctggcgtgttcggtggtggcggcttcctgcgccggcagaagcgcggccgcccggacacctggctgtaccggcaactgcagtggcgcctggcgctgcgccatccgctggcagcgtcctggctcggtgggcaccgtctcatcacgcggtcggggtactggaccacccggcgctcacgcggagcagccgcctcatga

SEQ ID NO: 504255 - DNA, 360 bp, Stenotrophomonas maltophilia
atgaagacccatccgattccccatcgcgttgccaccaccatcctcgcgccactgatgctgctgggcttgccgctgatggcccgggcgcagggcctgccgaccatcgaggacccctcgcgcggacagggcagcggcatcatgcagacgctgcagaactacggctacgacatcgtgctgctgatcgcgctcctcgtggtcgcctcgatgttcgtcggtgtgtgctaccacgcctatacgcgctactcggaaatccataccggtcgcgccacctggggccagttcggcctcaccgtagccgtgggtgcgatcctgctggtggtcggtatctggctgctgaccaaggccactggcgtgctctga

SEQ ID NO: 504256 - DNA, 234 bp, Stenotrophomonas maltophilia
atgaacgccgcccaggtcagcgccttccaggccaatggcggcttcgcccccgccgccgtggccacggtggtgctcggcctcgtgttcgccgtcctgctcctgtggggcgtgtgggccatgcgtaccgcctacaccgggtgggccgagcagcgcctgtcccagcgtcagttcctgggtgtcgttgtgcgattcgtcgcgatgtacctggtgctgacctatttcctcctgtcctga

SEQ ID NO: 504257 - DNA, 372 bp, Stenotrophomonas maltophilia
atgacgaccacaggaaaaccaacgaccgactgccgccgcgcgccggcattggccctagtcctagccgtcgcgctgaccaatgcatcgcccgcgtcagcgggcgatgcctccccagagcatgcgcagttggcgaccctcgcgcgccagctcgatctgatcgaccgcctcgccgagcacgccgcccataccgctccgcaggcacgcgcccgctaccacttcgaccatgcccgcctgcgcgaggacctccagcgcgtgcgggcgggcatccaggactacctgacgccgccgcgcgcccagccgcgcgatccggtcgagctctccggtgactaccgccagtccagcccgccctccgacgaggaggcaccccaatga

SEQ ID NO: 504258 - DNA, 5460 bp, Stenotrophomonas maltophilia
atgagtaatgcgttcaccaagctttcccaggacaagttgaatgcggcggtcgcttgtctgctgtgcccccgtatcgaagcgatcctgggtgaccgtggcccaggccactgcatgcgggtcaccgatctcgatgacgaggtaatggagtcggtctgcaaggaactacgtcggacccggcccgacggaaacatctttatcctcggcagccatgatcaggagggccagcccttccgagtcacttccaccaaactggtggagttgcgcaacccggacgcgaacggcgagctgcgtcagccgttgctggtcttcataccgacttcgcttcgcaccagcgccgaggactctttcggtgtggcgaccttcgaggagctgaccttcgccggtatctacgaggaccttatcgactcgctgcttgatcggctcccgacaacgctggttggccatgctcgcgatcttctgggcatcctcaccgacgaggagtggctgtttgccgaccatgtttcccgcgtgcggtacctgctcactgcgctcgaaaacgggattgatggagaaaccctcggggccagcctgtatgaattgacgttgattccagacttcaagctctttgccgatcccggcatggtcaatggcaagattcgccgtaacctcggcagcgtccgcagtctgatggcctcgcacaagtcggttcgtggtcgtatcgccgatctgggactcagcgacaaggcattggagtcgcgactattcacctattttgaaaaatacgaagtccaggagcccgaatcctggacgccgcccatcgcgaccgacaagagctggtggagcatttcattcgataaatggacgttccaggaagagctttcgctggacaaggtcctgctgacagtactggagaccgacttgccagtcgttcaggaggatgagaccgacgaccaactctccggcctcatcgggcaacaggttctggtgccgaacgaccgccgcaaaatgaacgtggtgttcgaggttagccctcaccccggcaaggtaagcgggcttgatcattttacggttcagatcatttcgcagaatgacggcccggttggaaaaactaagaaagtcaaggcctggacgccgaaccgcctgcaatgcacgaccaacttggccaagctcaataagatcgaattcgaggaaggatggcatttcatccgtgtaatgccttggacggccgatggcgatccgattccgctggaagcggattccgcctccgagggcgcaagacgttcctacgagagcgaacctttctacgtcctgcccggtggcaacatcgaggaagaaccaccgcaacgcgccatacccattgagcagagcctggagcatgcgcgtttccggctgcaactgactgccctgggcgatgaacgcgatcccgatgatatcgccatcagtggtgtcgcctgggccgagggcggtcgttccaagaagacctctcgccaggaaaccctacacgcaaaattcggtcgcgagggcgcggttcagattccgctttcgcgtatgctcaaaaccatcgagcagcgcgtcttggcggagcccaagcacccgtcaggctggcgaatgcagatcaatctggataccgccgagccgccttccgaggttggactcacgctgccatcttccgccgcgatggcttccttcttggctgcccgcgaagagttttttgcagcagtgcgcaaagacactgccgagctgatcatgcaggggctttcgttccgcgactcggaaagggaatgcctcgcgtatgctgaaagctaccttgacttggtcaggaacctcatccgtcaggccgagacgacttctggtgccgagcgtcagcaacacttgcaagcgctcagaaatgtgctggccgtcgattccattcatgtcatcttgaccgacttcggtggaaggcaccgggaggctgttttggtctccccaacccatccgcttcgtgccttgtggctgagcagttgggtcgccctgggtaaggattggattgagaagatcaagtcaggcggaaaggatcacattcctcacgtccgttccgcgctgttggatggccttgtgccctctgcctatccggtcggtattcccgtcgaggatggccgcatcttcactccggtggacaacctgaatgctttctgggcgctctacgccccgacgaccgaggaaaattcccgtggtctgatggcggaaatctgttcagcgctcggcttggccgagccctctgcggcgggatcaaatatttccggacaagtcattgcggacaagatcgagcgctatctgtctcagcatccctatgttcgagagttatcactgaacatcttcaaccctggggccggatcggtgattgcggaggctctgctatcgctccagcagaagcgcgagcatgccgatttgcgctatgacgtgcggctctttaccaccgatcccgactcacctgttttgggcgaggctcttgagtcgatggtccgtcccggagccacggtaaacgaggccgccgacgcatttgcgacctcaacgggcagccatctgttctccaaactgaacttggccaagcatcccctgaatgaattccatgcaaattccaaggagttcccggcccacatcagtgttcttctggatgtgtttcccgccgaggagctttccattgcagagaagccgatgggcgtgaccccactgcatgggctgatacaggacttcgacactgaattcgttgatgacgattcgggaaccttctggaacaagcggccgattgtcgggcgctccctcggcgcggacaaccatgcggcgtgcttcgatttgctgtcgtccctgagccgacacctctgctttgctacctcagcggttgctgcttctggtgccagcttcaaagctgtgcctgtggtgacccttggcctcgatgtggcccaacgagaactgatctacgaggttcaccagatcagcgattgggtgttcaccatcgaccgaaatatggggattgagttcttcgaccatggcggccggaagaacagaccggactatctgattgactatgtgccgggagccagctcccaggcgacacacaacctgatcatctcgtcgcgctcgaacgatgaactggaggcgatgctgaagccggtgctgcttgagcatggcttgtccgccgacggagagcagtcggttcagatcctggcaaatctgcggtcgctgtccggtcaactagcgctcaagctgatttctgctcgcacacaacaggcggaggcacttggtctggctttggctcggctctacctcgaatatcagggcgcattgagcaatcaggtcattgtgccgttggatgcgcacacggacctgtaccgctcaagcggtgagtcagacgatgtcaatgatgcaatcagcctgcaacgcaccgacttgggattgttcgacttggatttgaacaccagaacgatcacttgcaacctggtcgaggtgaaatgctattcgcaagtgggcgactttgcggccttcaaccaactgaaggaacggatttccgcccagatcaatcagagcgagcgcatcctccagcgccactttgacccggccttgaagaagcccgaccggccggataggttgctcaagagccgggagttggctcagatccttcgtttctatctagagcgctcactgcgttacgggatctttgatgcgactgttgcgcaggaagcacgggggctacttgaatccatcgagcagggctactcgcttcagttcagacgctgcgccctgatcttcgacttcgataagaccggaaccgaggcccccgacaacgaggttggcattgaattccaccgcatcggtaaggatctcattcgcgccttactggagaactgccgcaagcctgtttccgtcgagattgaggaagaaccgaccacgcaccttcttagcgagcagttcataccgaacgtgccaaaacttgagacagcggcctttatcgcacccaagagagcgcggtcaacgtcctggacggtggatgagctttgggacggtgatccggaggtaccaatcaccgcgccagcacccccgaccgcagagggagcacctgcgcctgctcaccaagaggcagaagaacaggcgagccctgtcgagccaacccctccgtcttctatcgcttcggaagtcgaaaaggatgacgaacaacctgccgtggctgccgtaccggaagcgcatgctgaaccagagcatggagggcacctggcgtccgagcctgtgcctcaatcagaggcctgctatgacatcatgctcggcgtcaatggcgactcgcctcagtacggattactcggagaggtctccggtagaaaggtcgcgctagatctcaaccacacccacacgatcagtctctttggggttcaaggcggcggcaagagctacacccttggaacggtgatcgagatggcctccatgccgttccagcatattaacgtgctgccaagcccgcttgccacggtcatcttccattacagcccgacgcaggattatgcgccggagtttacctcgatgatcaattcgaactcggtggatgaggagattcgcgtccttcgcgaacgttacaaggccaacccagaagcgctgaaagatgtgctgattcttacccctgcgaacaaggtggatgatcgccggggcgaatacccggatatcgaggttaagccgattgctttctctgcctccgagcttaaggccgcccactggaaattcctgatgggtgcgattggcagccagagcatgtacatgcgccaaatcaatctcatcatgaggggactgcgcgacaacctgaccttggacgccctacgagcaggcattgataactctggcctgtccgatcacctgaaggagctggcccagacgcgcctgctgttcgccagtgaatacatcaacgataaccaacggcttcaagacctgattcgtccgggccgcttgatcattgtggatctgcgtgacgagtacattgaaaaggatgaagcgctcggtctgttcgtggtgatgttgcagattttctcggaagccacttaccaaggaggcgcctttaacaagctcgtggtatttgacgaagcccacaagtacatagagaacgatgatctagtttccggattggttgaagtggttcgggaaatgcgacataaaggcaccagcatcatggtcgcgtcccaagacccgccatcggttcccgtttctctaattgagttgtcctcacagatcatcatgcacaagttcaactcaccagcctggcttaagcatatccagaaggccaatgctgccctcggagagttgacttccgagaaaatgagtcacctcggtgcaggcgaagcctatgtttggtcaagcaaggcctcagatgactcgttcacccgcggcgcagtgagaatcaaatgccgtccacgcatcacccagcatggcggcagcacaaagacggcagttgctaaccagcaatag

SEQ ID NO: 504259 - DNA, 1644 bp, Stenotrophomonas maltophilia
atgtcaatcaagggtagagacaaggaattcagaacacctaaggtcagttatttgcattggcagcacacagaaatggatcgtgtgctgaccatgctatttcctcgtctcaaattcaatggctatggcagtcgcaagccgccacgcgcaaatattttgcagccagaagaatttgcagatgaaatgatgctgtccgaagaggttaagcagtattttgagggatttgacgaacatccctccattgtccacaagtgggtagagaccgaacttcttgatgtggtaaatcggggcaagtcgaatcaagctgtcgcctctccgcgcccgcttcatggagagacctacaaatttcgaaattcgaagcactgccgtgactatggggcagccgagcagatttattggatgctctactatgcccgcaaaggcaagggccaggccgcccgagacacgctaaaacgcttttttttccctgggattgatcatgtaaccggtaggcatgaatccggcacggtcgtcgatgtagaaacccaagcgctacttcgcttcgattctcaagttactcaggacacacaggactccaaggagcccgagcgctttccaccacttctaatcgatcaggccgacaccatggccgacgacattctgcggctattggcctatgagccctatattcctcgctcggtgctggtggattacctcaaaaccctgatggcattccatctggcgctctaccacctcaagctgttgcagatactgcccaagctggtgaagcagcgctcggacaacgcgctggcgagttcacctgatcccgtggcgctggtcgtggatatgggggacgccaataatccgcatatggtcgagctggctcgcaagtccactgaccggctctatcgccagattcctgcctttgtgcaggccaatttcgtcgtcaagaagctcgatgagatggcggaatacctgagcaagaagacgggcaagctgaccactccaggggccggcgtgtttaccgtcggcgatctggtttctctactgaagcccgagcacgacgccgagcggcaagcctacttcaagttccgcctggccagcctgatcgaggagtcggcctctggaaacgaggacatcgatccggagatccgggacgtcaccgccatgggacttggcgagttcgaatccttcatagaaatcctgatggcatatcgcggcaagtatcaccgccagtacatcactgagtgcctggactcactgctgctgaagaacaaggagaacggcctgttggcccaatcccgaaccaagggaagtcctcggcggtttgtgctgggaagcaagcttcttgaggtgctccttcaggtggctgtgctcactcaggatgacgggcgtttcgtgacccgcgaggttcgcatcgaagagttgctggcctttttgagaagccgctacggccttcacatcgatcggctgccggaaggagcacaggccaacagcagcatcctcgacagacgcgccctgcgcctcaacctcgaagccttcaagcgtcgcctgcgtgaaatcgggttctacgaggacctgtcggatgcctacgtgacccagaaggtatcgccccgctatgcgattgagagaaatgacggaacagataaaaacgggaggcacgcatga

SEQ ID NO: 504260 - DNA, 4158 bp, Stenotrophomonas maltophilia
atggcgaaggtcatacccatcgggcaacccgcgaacgaatctgaacgccaggccatcggtttccttcgggatcatttgcccgagggctggctgatcttccacaacttcgagatgcgccaaggccaggaggtgttcgagatcgacattgccatcctcgcgcctcatgcggtgtatctggtggatgtcaaagggacgcggggcaacatcgatgtgtatggctccaagtggtatccgcagcggcggcaaccgtttcactcgcccctcgcgaagcttcgtcaccacgcgaaggtgatggccagcttcatccgcgatagcaatcccggacagatcgagttgcgcaaggctcatgtccatgccgccgtgttgctcactgccgatgacgccgccgtgttcgatcaggcgggcatcgacagcccggacgtgaccgacttcaagcactgcctgaaatacttccgcgacgcgagccgtatccctgacaaccggctggatagcatcacccgcttccactcacagatcgccaaggcgatcaccggcaccgccaagcctaagagcgcggcgctggtgttccgcgactggcaggtggaagagaagctgggcggcaccgaccgctacaccgagtaccgcgccaaacacaacctgttgggcaagagcggcggcatggcccgcctgcgggtctaccaggccgacccgtaccaggacgaggccgcccgcaaggcagagttcaagaagatcagcaacgcctatcgcgcggtggcgcacatgccgacccacgccaatgtgctggcggtgaaggatctgttcgtctccgacgatgaagacaaggtggtgctggtcactgaggatctgcctggccaggccctgcgcctgcacatcaacaaggtctcgatggcgctgaccttcgatcagaagctccaagtgatgcgcgacgtgctgtcggccctggaccatgcgcaccggcatgaggtgatccaccgcaacctgaccccggacgccattctgctgaccaagggcggccaggcccgggtaaccgatttcgatttcgccagggtgggcaagaaccgcacctctaccatcgccgatcaggtggcggatgatctggatgctacctaccaggctccagagtgctttaaggacccgacccaggccagcattgcctccgacctctatgccgccgggctgatcttttttgaactgctgaccggcgagctgccctttgaaagcgtcgaccagatgatggaggccgacggcaagttccccatcaagccctcggagcacaagccggacctgcccaaggggatcgacgagtggttgcagaagttctgcgagtttgatcctgaggaacggcacacgagcgcagccatcgctcgcaaggccctggatgatctgattctgcctgaggccaagaacgactcaggcccggatgtgagcggcccggccgtggttgtgccacagctcccagataacctgatgagcttgccgcaggatttcatcctggcggatcgcttccgcattcagaagaagttgggcagcggcggcttcggcgtcgcctacaaggtgttcgattccctgggcgatgtggtccgcgtcatcaaactggtgaccaaggaccgccgcagcgtgtacgaacggctgcgccgcgagtacaagaccctgaccaatctccccgaacatccgcatgtggtgaaggtgatctgggcggatcgcatggccgatgccaagcagacgccttacattgtctttgagtatgtggaaggtttggatgtttccgatctgatcgatgccgaggcgttgtcgctggatgatgccgtgcgcatcgtgcgcgaggccgccgaggggctggcccatctccacaagcacggcgtttaccatcaggacgtcaagccctccaatctgctttggacggacaaaggcgtccggatcatcgatttcaacgtcgcggtctccgagaacgatgaggttcaaggaggtggcggcacgcgccgttacctgccgccggattacgactactcctccgagccggatgcttcggatcgaatggatcgtgacctctatgccttgggcatctccttctatgagtgcctgaccggcaagtatccattcgacgatcccacaccgccgatcaagactcagcccagggaccccaagcagttcaaaggctgcgccgacctcagctcgtcgctggtcaatgtgctggcgaagatgatcgcgccggagcgcaaggatcgttttgcgtcggcggaggagttcttgattgccctagccgaggtcaagcgcctgcgctcggtgctgacgaccggcgagattggtgccggacccaaggtggtgtccaagctgggtttcgagccgaccaagcccaacaccaacccttttgtcacccacctgctgacgctctatagccagagccaggtgtccaacgcaggcacccgtggcctcgacgaagttggcaaggccacctacgtgtcgacttatctggacgaaaagctcaagcccgcgctgctcaagggcgagttccgtttgatcatcatcagcggtaacgccggcgacggcaagacggccttcatccagcagttcgaggcctttgccgagagcaagggcgcacagatacagcgcggcgcgaacggggctgtgctccagctcaaggggcatacctaccaaagcaactacgacggcagccaggatgaaggcgacgagcgcaacgatgccgtgcttcagaagttcttcgcgcccttcgcgggcaaggatgcctccgactggcccgagaatcagacccgcctaatcgccatcaacgagggacggctggtcgacttcttccttgagcatgaagaagagttcccgttgcttgccaagcagatccagcagggcttggccggagctgctccggaaggcggtatcgcggttatcaacctcaacctgcgctcggtggtcgccgaacccgaggaaggtcagccttcgattctggagcggctgatcgcccgcatgacccagcaggaatactggcaggcatgcgacaagtgcgacctcaagggtaaatgctacgcctatcacaacgcccggaccttccaggacccggttgccggtcccaaggtgatcgagcgcctgaagatgctctacaccattacgcacctgcgcggccgactgcacatcaccatgcgcgaccttcgttcggcgctggccttcatgctggtaggcacccaggattgcgacggcattcaccacctctatcagaacggcggtgaagaaacccagaatcgcatccttgacggtttctatttcaactcgtggcttggtggggcggaaggatccaatgaccggctgattgccttgctgcgcgaaatcgatgtcgccgaagtcagcaatcccgatctggaccgcgagcttggcttcctcaatcccaagaccaaggccatgagccgcttctcgttcgcggagcgggctgggtacgacgatgaacttgtggcgacgctgttccgcaatctgcctcgcgattactcgtcgaagaaccgtgctcgactgatcgccaagcaccgcaattatttatcgcatatgcgccgtcgccatttctttgagcgacgcgacaccggctggaaggagatgctgccatatggaagcatcgatcccttcctggatgccattgagcagccgggagcaaaaagcacagatgaggttacggccattcttcgagccatcaaccggggcgaaggtctgagcgatccggcgcgtttgggcaaccagttggcactgcgtgttcgccaagtggataagggcaccatccgcagttaccgtctctttgacggcgaccatttcacgctccgcaccgcgcaggaaacagcggctcaccctttccttgaatgcctgtctcaggcgctggtgctgctttacgactccggcgatgggcacaaggccagcctgcgcatcaaccttgacatctatgaaatgctgatgcggctcaacaacggctaccgtcccagcatcgaggagcaggaaggtttcctgttaagtctggcggtattcaagaacctgttatctgctgcactctatcaagaagttctgctgacggagaatgggctccggttctaccagataaacagaaaagaggatggcgtattggcattgggtgtttctgaaaagggggctgaatatcatgtcaatcaagggtag

SEQ ID NO: 504261 - DNA, 1410 bp, Stenotrophomonas maltophilia
atgaccagaaagttccaaataaaggccgtcccaagcggctggctagaaaacaacggccgtcgtcttgactgcggcccctacatgtcaggggccgttgaagcgcgggagcttttgaagaagcacaaaactgagcctctcaagactcttactgtcgaacgtaacggcggcatttttaatggccctcggtttcctcgagtttacgttgacgatcctgtgcatggtgttccatttctgggaagcacagacatcctcgatgctgatttgtcggacgtctctttattatcgaagaagcaagttgacggaaatcctgccctggtaattgatgaagggtggacccttatcacttgttcgggaaccatcggacggatggcctacgcccgttcggatatgaaaggaatggcgggttcgcaacatttcatgagggttgcacctgacgaaagcaaaatcgcatccggctacctctacgcttatctttccagccgatttggtgtccccatcatcgtttctgggacttatggagcaattattcagcacattgagccgcaacatattgctgaccttccggtcccgcgtctcggcgcagtggaaaatcaagcgcatgaattgatccagcaggctgcgaacaagcgtgtacaagctagtcgaatattttcggaggcaattgaactgctaggagtcgaggcggggctacaaaaaataaaatctaacaaagttgatggaatcccattcagcgcaggtgccatatcgtcatcaagcataatcaaacgtatggatggagccttccacagtcttttccatcgtgaggctctcgacactctcggtggcgcatcagtcccgatgacgactgtgtcaaaaatgtcggtttccatcgttgagcccaagagatttaagagaattcagatcaacgatcccgagttcggagttccaatgtttggaacatccgcgttgatgtgtgcagacccgcagcccagctacctcattccgaagagcatgagtggtgtcgatgaactcttgatagatcagaaagctgtgctcattccccgatccgggcaggtctccggaatcatcgggacagccgtgctgccgtatggagccttaattggaggagccgtatcagaagacgccatacgaatccattgtgctacagatgttattgctggttttctctttatcgtattgaggtcggagtacggacggcgacaactgaaggcaagagcttacggctcctcgattcctcatctcgacgtgtctcagattgggcaaatcctcgttcccgacctacaagacggagtggttgaggagataggtactttggggcttcagagtgccagacttcgccatgaggccattaaccacgagaatgaagcccgcaccctcgtcgagcgcgccattgaggagggaggtcgctaa

SEQ ID NO: 504262 - DNA, 2019 bp, Stenotrophomonas maltophilia
gtgagcgatcaagacgacatcatcgagaccccgcaggatgctgccgaagagagcggcccggataactttttcatcgacatcctgaccggcaacaaggaaagcgcctcggccaagaagctgctggtgcagaaagttctgcgccagctcatcgagagctatggctttgaccgaaacgatctggaggtcaactacaacccgcagatccccggccaggggcgcaagcgcatcgacatcgcgattttccaccccgatgccgagcacaataacgacaacctgcagcggatcatcgtctgcaaaaatcagaaaaagcgagacaagctccgctccattgccgaggccgacgccgacctgcgcgagctcaaggagctgctggaactgatcccgggcgcgacgctgggcatgtggaccaacggtcaagaagagttcctgttccaggtcgagcgcacccgttttgaagtccggcccaaaccgctgggtgtctggccggttccgggcgaacgtacctccgatctcgatcgcaccggcggtgtcattcaggtcagcgccgaagcggaagatctggaagacgcactgatgcgctgccgtcaatatctgaaccggaaccttggtctcgatcacaaggattccttcaagcagttggccgtgctgatgctggccaagatccatgacgagaccctgcccaccggtgagcgcaagttctggatcaggggtgacgagcctttcaccgaggcgggccaacaggccattgcccagcgcatcaccgaatccattgccgccgccaaggcctggcaaccgaacctgctgacccgtggctgggatctgacgctggaaccccacgagaccgcccgcgtggtcatggagctggcccgttactctctgagcgaaacccagccccgttaccgtaccgaggccttccgtgcggttgcccgcagcgtgatggacggccgcgagggccgctaccctacgccgctcaacgtggccgaaatggcggtggagatgctcgacccgcaacccggcgaacgcatcatggactgctccagcggcaccggcaccttcccggccatgaccgctgcgcacatcttcaagaaaaaactggcggccgtcggcacgacgcctgaagaggccaccaacgaacagatccgccaggcgcaaaacgaaaccgccgcctgggcggccagcaatgccctcggctgcgacattgatcccttcctggccgtggccagccgtatgaacctgctgttcaccaccggcaatcccggtcgtgtgttccgcatcgatgctcgcactttcccggacggcgatctggatggcattgaagccgctcgcccggccatgccgctgggcagcatggacatggttctgctcaacccctggttctcgacacaagatacggtcagcgacgcctccatcctggagcgctatgacttgggcaacaactgggagcgcgacgaggaaggcggattccgcaacaccggcaatctgaacaccggtggcgtaccgcctgaggtgttgtttatcgaacgcgccctgcagtgggtgaagcccggcaccggccgcgtgggcatcctgctgcccgatggcttgctgggcaatcccggcgatgagcacgtgcgctggtggattttgcgtcactgcgaggtattggcctcggttgacctgccggtggagccgttcaaggtcacggtcaaggaatatggcctgacacccgccttgcccagtctcctggtactgcgccgccgcagccaggaagaactcatcaataccgaacaccccgaatacaaggtcttcatggccgtggtggaccgggctggtgtcgacgcccggggcaatctcctgttccagcgagcccccgatggagaggaactggttttcgatgaggaagtgatcgaacgggttcgagaaggcggtgaagtggaaatccgtcggactacacgccgcaaccgccgcgttcatgacgagctgccgctggtggcagcgaaatacaaggaatttcgcgcaaccggcgaggtgaaattatga

SEQ ID NO: 504263 - DNA, 2004 bp, Stenotrophomonas maltophilia
atgagcagaaagaagaacaagcaggccgagaacaccatcccagctggatacacgctcgactacgtttccggcagacagatcaaggaaacgaagaaagagctcgttcggcagcgggtagttcgtgccctgatccatgaatacggattctctccggaagacatggagctggatttctccattggcgggcgcaagaaggtggatgtggccatcttccaccacggcaaggaccacacaattgagaatctcagccgcgcagtgatttgccgccaagaaccgaacgtcggcaaaaatgccatgcgcatccgcgattacgagcaggccgccaaagacctcgaagagatcgaaaccatcatgcgcgaggtcgatgccgttcagtacggcttgtggaccaacggcctggagttcttctttgtcgagaaagagcaaaagcgcttcgaaaccaagtgcaaccccatcggcgactggccgatggccgaagagtcggtcggcactaaggaggtcatctccgatgcccatacccgtgtcgccgacaacgagatgctgaagatcaccttccggcgttgccacaacttcattcatggcaacgagggcatgcccaaggacgccgccttctggcaattcctgtacctaatattctgcaagatgcacgatgagaacctgcgtgccaagcagcggctggcctggcagcgccgtttctgggctggacccaaggagcagttcgagccacaagggcgcaaagccatccgcgtccggatcgaggagctcttcaccgaggtcaagaagcagtacaagaatattttccgaggcaacgaggagatcactctctccgaccgggcgctggcctttatcgtttcggaactggccaagtacgacttcacccgaactgacgtcgatgccaagggcgtggcctaccaggagctagttggcgttaacctgcgtggcgaccggggccagtatttcactcctagaggcgtcgtgaagctggtcattgagatgctcgaccccaaagagaccgagactctgctggacccggcctgtggcacgggcggcttcttggtcgcgaccctggggcacatgctgaagaagttccgcgaagagcaaaacatccaggccggaaacgagaacaccaccgagttcctgaacatccacgaacggctgaaagagtatgccgccgccaatgtcttcggcaccgacttcgacccgttcctgatccgcgccgctcagatgaacatggtgctggcgggcgatggccgtggacatatctacaacatcaactcattggagtttccgctggggcatctagccgacctgcccagcgtcaagaaggagatcccgctggcgtcggtggatatcatcgccaccaaccctcccttcggctccgacatcccgattacggacaagcacattctggagcagtacgagctggctcatggctgggagccggacggcgaaggcgggttccgcaacaccggcgtcctcaagggcagcgttgcccccgaaattctctttatcgagcgctgcatcaagtggctcaagccgggaaccggccgcatgggcatcgttcttcccgacggagttctcggcaatccggccgcggaatacatccgctggtggatcatgcgcgaaacgcaggtgcttgcttccgtcgacctgccggtagaagcctttattgccgaagctaacgtcaacatcctcaccagcttgctgttcctgcgccgcaaggacgaccaggagaagcatcgcgaggccctaggtcgtgccgaggaatacccagtcttcatggccgttgccgacaaggttggcttcgaccgccgtggtaacaaactctacaagcgcaccccggacggcgaagagattgtcgagcccaagcagcatatcgagcgcatccgtatcggcgggcgcttcgtggaacggaccctgacccgcagtgaaaagatcgaggacaacgatctgccggtcatcgctgagaagtaccgcgaatttctcaaggagcagaacgggtga

SEQ ID NO: 504264 - DNA, 207 bp, Stenotrophomonas maltophilia
atgcttggggaagaagtgttcacggttaaagaggtcgccacgctcttaaaggtcggcgagaagacggtctactccatggcccaggctggagaacttcctgcgttcaaggtgcgaggtcagtggcgattcgcccgaaaggacattgatacatggatagagcagcagaaacacacaacccatgatttcggcgaggaagaccagaaatga

SEQ ID NO: 504265 - DNA, 351 bp, Stenotrophomonas maltophilia
atgagtagctttggagagacgattcgcgaccttcgggtggcacagagccttggcttacgtgaggcggcaggcttagtcggcatttcgccggcctacctgagccgtatcgagcgtggcaaggagtctccgcctaggcctgaggtcatcaaagctctagcgaaggtgctggcggcagatcccgacgtcttgttccgcttatcgccttcgactgaccctgaagtcgtcgactacttgcacacgcagcctgaagcgatggctttggtgcgatacctcaaggaggcgtcattgcccgcagaggacgtcgcaaagttgttggagcttgccgagtcgctgtctcgccctaccaagtag

SEQ ID NO: 504266 - DNA, 1734 bp, Stenotrophomonas maltophilia
atggcacgaatcagaaaaatccagatcgccaacttccgcggcatccagctgctgacctggtgcccgacgcctggcatcaactgcctgatcggcccgggtgacagcggcaagtccacggtgctggacgcgatcgacctatgcctgggggccagacgcaatgtccagttctcggatgcggacttcttcggcctggacatcacaatcccaatcagcatcacgctgacgctcggcgacctcgatgacagcatgaggacgctggagggctttggtgcattcctgcgcggataccacgccaacactggcgtcgtcgaagacgaaccctctgccgacgctgagattgtgctctgcctgaacctgacggtcgccagtgacctggagccctcgtggacccttgtctccgagcgcgccgcacagcaaggcatcgtcaagacgctcgcatggaaggatcgcgtcgccctggcgcccactcgcatcggcgccctggcggacttcaacctgggatggcagcgcggctccgtactgaaccgcatctcggaggagcgagccgacgcttcggccgccctcgtcaaggccgcaagggatgcgcggagtgccttcggagaccaggccgaacaacagttgggagaagcgctagggatcgtcaccaccactgctcaggagctgggcgtcaacatcggcgccaaggccaaggcgctgctggattcgcattcggtgtcgttcggtggcggcaccatctccctgcacaacgaaagcggcattccgcttcgcagcctgggcgtcgggtccacgcgtctgcttgtcgctggcctacagcgcaaggcggccggtcaggcgtcgatcgtgctctcggacgaactggagtacgggctggagccgcaccgcatcgcgaggttcttgggctccctcggcgccaaggaggccgctgctccgctgcaggtgttcctcaccacccactcacccgtggcactgagagaactgtcgggcggccagctcttcgtgttgcgccgcggccccctcggccatgaggctcgcctggtcggcgccgacaatgacatccagagcacgatccgcctctaccccgaggccttcctggctggctccgtggtcgtgtgtgagggagccagcgagatcggcctgctgcgcggcctggacttgtacaggcttgaccaggggaatgcgtcactggctgcattgggcgtggccttcgtcgactgcggtggtggggagccggatcgaccgtatgcccgcgccgcagcgttccagtctctgggctaccgggtgatggtgctgcgcgacgacgacaagaagcccactcctgcggtcgagcaggcttttgtcgagaacggtggcaccgtcgtcgcctaccgcgcgggccgggcgctggaggacgagctgttcggcagtctcacgccggctgcctgccagaggctgatcggctacgccaacgaattgcatggcgacctgatcgccgaacacctgcgcactgtctcgaacaacacgctcaccttccagcagatctgggacgaaatccagaacaccggcctcctgtcgcccgaacgcagggccatccttggtcaggcggcgcgtatccgaaaggctggctggttcaagcaaatctcgtggatggaggacgtggcgaggaccatcgttgcaccggacctgcatctttgcgatcagggcttccgtgcgctgatggaccaggtattcgggtgggccgctgatggaccacgttga

SEQ ID NO: 504267 - DNA, 1419 bp, Stenotrophomonas maltophilia
atggaccacgttgaaatcgaccttcgtgcaatcgaacgcggaaccgtcaccgcaccggccggctgcggcaagacacagttgattgcccacgcgcttgccgggcatcggggcaacaagcccattctcgtgctgacacacacgaatgccggggtcgcggccctgcgtggccggttggactgcgccggtgtgccagccagcgcctatcgattgagcacgatcgatggctgggccatccggctcatctcgacctttccgggccgcagcgcccacgatccggagattctgcggctggctgcacctgcgcgggactacccagctatccgcgatgccgcctggaagctcctgcaggccgggcacgtcagtgaggtgctgaaagcctcgtatgcgcatctgatcgtggatgagtaccaggattgttcggtgcctcagcactacatcgtctatttcctctcgttgatcctgccgacctgcgtgctgggcgaccccatgcaggcgatcttcgggttccggggcaatacgctggccgactggaaccagcacgtgtgcgcgcattttcctgtcgtcggggaactggcaacgccctggcgatggcgcaacgccggcgcggaagcgctgggacaatggttgttggaggcccgccggttgttggcggcagggcagtcggtggatctgcgtagtgggccaccggagcatgtgacctggatgcaggcagtaccacccaacgaccatgcccagcgcctagccgctgcgaggacggcatcgccaaccgctgacgggcgcgtgctcatcatcgccgatagccgcaaccgagcagcacagcagaactttgcgagccagacgccgggcgcttcgacggtcgaggccgtcgatctgcaagacctcatcgccttcgctagcaactttgatgcgggagcaccgaatgctctcgcgcagttactagcgctggcgcagagcgtcatgaccaatgtaggcgtggcggagttgacgcggcgcctggagtcgttggcaaagggaactgcaaggaatcctccgaacgaggcagaaagccgcgcactggcgttcgggcgcgcgccctctctcgccgcggccgccgcgctgttgtcggaactgcgggtactgccgaacgtacgtgtgcatcggccggccatcctctacggggtgcttaaggcgctccgggaagcctcgtcgggggccgtccctctggcagaagcggcccggcgcgtgcgggaagagaaccggctgttggggcgcccgctaccaaaacgcgccgtcggcagcacgctgttgctcaaagggctggaagcggaagtggcggtgctgctaaatatcgagggtatgagcgcacagaacctttacgtcgccatgacccgtgggtcgatgaaggtcgtagtgtgtagtcctggtccaacaatcggctaa

SEQ ID NO: 504268 - DNA, 750 bp, Stenotrophomonas maltophilia
gtgaaagagcccgccgcaaccgccgagcggcagcaggcacgccaacgcggcctggtcgccagcgtggtcacgctgccatggcgcctgttcggcgtgttgatcgcctcgctgctactgtccatcgtcatcgaatgcgtcggcatgcacctgttctggcccgaccagggctggcgccacgcgcagggcatgctcgactacgaactgaaccagttctccacccatttcacccggagcgccgtcgtgcaggagccgggacgcaccgcgcgctggctggtggagggcacctacgagtgggctttcgtgaagacgggcttgctggactggatgcgcgacgcctcggcgcaggccagcgcacccagccgaggctcgcaccgagacttccgccattacctggcccaggtctatgtctggaccaagggctatctgattgctgccggcttcaccgttctgacgttcatcgtccgcctgctggtcctggtgctcacgctgccgctgttcctgctcgcggccttcgtcggcctggtcgacggactcgttcgccgcgacatccgcaagttcggcgccgggcgggaatcgggcttcgtctaccaccgggcgaaggcggccttgatgccgctggcggtgatgccgtgggtgacctacctggcgttgccggtgtcattgcatcctttggtgattctgctgcctgcagcgtttctgctgggactggcggtgaacatcgtggcggcgagcttcaagaagtacatttag

SEQ ID NO: 504269 - DNA, 2160 bp, Stenotrophomonas maltophilia
atggcccagccgcacgccgtcgaagtcctgctgcggccagcggtggagctatacaccgttgccgtatgcgcaggcgccgcggtggtgtgcgtggtggcaccgtggtcgctcgcgttgaatccggtactcggcctcggcagcgcgctggccttcctggccttcggcgcgattcgcctgcgcgacacctgggccatcctgcgctaccgccgccacatccgtcgtctgccacgctacgtgatgacgagccgtgacgtgccagtgagccagtaccgcctgttcgttgggcgtggcttccgctgggagcaacgacacacccatcggctgacgcagacctacaagcccgagttccggcgttacgccgaaccgacgacgttctaccgcctggcgcgccgcctggaggagcggctggagttcgcgccgccgccgctgcctaggctggcgcgggcattggcctgggacagcccgctcaatccggtccggccgctgccgcccgtgggtggcatgccgcgcctgcatggcatcgagccgcacgaaaccgacgtcaccctgccgctgggcgagcgtgtgggccacaccctggtgctcggtaccacgcgcgtgggcaagacgcgcctggccgaactgttcatcacgcaggacatccgccgcaaggtccatggcgagcatgaggtggtgatcgtcttcgaccccaagggcgatgccgacctgctcaagcgcatgtatgtcgaggccaggcgcgccggacgcgaaggcgagatgtacgtcttccacctgggctggcccgacatctcggcacgctacaacgccgtgggccggttcgggcgcatctcggaggtcgccacgcgcgttgcggggcagctttccggcgagggcaacagcgccgcgttccgcgagttcgcctggcgcttcgtcaacatcatcgcgcgcgccctggtggaactggggcagcggccagactacctgctgatccagcggcacgtcgtcaacatcgacgcgctgttcatcgagtacgcccagcacttcttcgcccgaaccgagcccaaggcctgggaggtgatcgtccaactcgaaggacgcctcaacgacaagaccatcccgcgccacatggtcgggcgagagaagcgggtggtggcactggagcagtacctgtcgcagacgcgaacctatgacgcggtgctcgacggcctgcgctccgcggtgcgctacgaccgcacctacttcgacaagatcgtcgcttcgctgttgccgctgctggagaagctcaccaccggcaagatcgcgcaactgcttgcgccgaactattccgacctgtccgacccgcgcccgatctttgactggatgcagatcatcaggaagcgggccgtggtctatgtgggactggatgcgctgtccgacgccgaagtggcggcggccgtcggcaacagcatgttcagcgacctggtgtcggtagcggggcacatctacaagcacggcatcgacgacggcctgccgggggcatcggccgatgccaaggtcgccatcaacgttcatgcggacgagttcaacgaactgatgggcgatgagttcatcccgctcatcaacaagggtggcggtgcgggcatgcaggtcacggcctatacgcagacgctctcggatatcgaggcgcgcatcggcaatcgcgccaaggccggccaggtcatcggcaacttcaacaacctgttcatgctgcgggtgcgcgagaccgccaccgccgaactgctgacacgacaactgccgaaggtggaggtctacaccaccacgctggtcagcggcgccaccgacagttccgacatccacggtcagaccgacttcaccagcaacgcgcaggaccgcatcagcacgtcgagcgtgccgctcatcgagcccgcacacgtggtcggcctgcccaagggtcagtgcttcgccctcatcgaaggcggtaacctgtggaaggtccgcatgccgttgcctgcgcccgatccggacgaagccatgccccgggacctgcaacaactggccggctacatgcgccagcactacgccgaggcgggcgaatggtgggagggcaacgggctgctccggttgcacgacgacgacgcgttgccagcgaatctggccgaggaagtgcaagaaggcacgccggatgaagaggccccatcgtga

SEQ ID NO: 504270 - DNA, 318 bp, Stenotrophomonas maltophilia
atgctgccggtgcgttctgcccatttggcccctggcgatgtggctccccgggcgatccaggcgccggggctcacgccgatgttcctggttggtgatgaccagcgctcccatgcctggctgcgccagcgtgccccggcgctgcgcgagctcggggccgtggggttggtggtccaggtcgagtcaccgcaggcactggcgtcactgcgtgccctggcgcccgggctgatgctggcaccggcgtccggggacgaactggccgagcgcctggggctgcgccactacccggtgctggtgaccgccaccggcatcgaacagtga

SEQ ID NO: 504271 - DNA, 579 bp, Stenotrophomonas maltophilia
atggcagcgacagtaggcctcgcgcgtctcgcgctcctgctgctggcttgctgggcactcggccaggcgaaggccggggaggtcccgccgccggcctaccagttcgcggcacagcgtgcgggcattccggcggcggtgctctacgcggtggccttgcaggagagtggcacccggtaccacgaccgcctcgtgccctggccctggacgctcaacgtggccggggcatcgcatcgattcgccacccgcaccgaggcctgcgccggcctgcaccaggcattgcgcgacgtgccgcgcacccgcatcgacgccggcctgggccagatcaacctgggctaccagcgtcaccgctacgaccacccctgcgaactgctcgatccctatcggaacctggcactggccgcgcagatcctgcgcgaacagcacgcgccgggccaggactggctgatcacgatcggtcgctaccaccgtcccgctggtggcgcacccgctgcccgctaccgacagagtgttggccgccacttggcccgcgtactgggcgagccagcgcggggcgcggatacccggagaaccctgccatga

SEQ ID NO: 504272 - DNA, 747 bp, Stenotrophomonas maltophilia
atggtcccgcgctacttgatcccgccattgatggccgtgttgctggccgctcccgccatgcaggtggcacttgcccagcccaccggtgcaaccaccgcggccaggacggcgccgagccgtgaagcgcctgcggccatcgctcgcagcgacgaacagcgggcgcaggactgggggctgcgcacggacgaatggacgcgctaccgcgagttgatgcaggggccactgggcgtctactcgcccagcctcgacccgctcacagccctcggcatcgaagcacgttccgacgaggagcgccgccgctacgcggaactgcaggttcgggccgaagcccggcgggtcgagaagacgctggcctaccagcgtgcctacgacgccgcctggcaacggatcgcgccgggcatggcgcgggtcaacctgcccggtgccaagccgaccggcgcgttcaccgccatcgcatcaggcgccgaccgaatcgccgtcttcgtgaaggacggctgtaccgcctgcgaccaggccgtgcagcggctgcaggcgtcgggcgtcgagttcgatgtctatgtcgtcggcagtcgcgtcgacgacgcgcgcatccgtgaatgggcacgccgggcccgtatcgacccggcgaaggtgcgcgcccggcacatcaccctcaaccacgacggtggccgctggctgtccctcggccttcagggcgaactgcccgccgtcgtgcgccaggtcggcggccaatggcagcgacagtag

SEQ ID NO: 504273 - DNA, 648 bp, Stenotrophomonas maltophilia
atgaccatccgggactcggcgacgggccagcgcacgacgctgctgcgggtcgcggccgcaacctggttgttgctcgtcagcgcggtggtgctggtggatcacatggccttgtccgggctggcggaacagacccaggccttcgtgcccaccgcgcaggtttccctgctcgaatcccgactggacggcctctcgcatcggatcgaacaacgccacactcagcccgccgcattgccgcaggcgcgctacgaagaggacaccaaggcattggaccagcggctggcggcgatcgagcaggcgcaggcccatcacaccgccaccgatgcgctgcacgcattggaaacccgcgtcacgcgactggaagcccgcccggtctcgcgccagcccaagccgcccgcaccgtggccatcccaacccttggcggcccaacccaagcctgttgagccgtcattccgcctgatcggagtggaactgcgtgcgggagagcatttcgtgtcggtgatgcctgtcggtggcaccgggctggccgatgtccgcctgctgcgcgccggcgagtcggaggccggctggcggctggacggcatcgagcgcgatggcgccgtcttccggcagggtgacgagatccgccggctgcccatcccgccccgatag

SEQ ID NO: 504274 - DNA, 585 bp, Stenotrophomonas maltophilia
atgtgcccatcccgccagcccttccgtatcgccggacgcagccatctgatttgtttgcccggcttgctcctggccgccatggccagcggctgcgcgatgacgaacgccgtgccaccgacgcccgcatccgaagccatcgacatcgcgcctgaagccgtgacggagttcgtgccggtgacacgatatggccgctataccctggtcgagctcgcgccgacggcggcccagcacgacctgttgctgcaagtggtggatgtggttatccccggcacgctgggcgccaccgtcggggatgccctccggcacctcgtcctgcgttccggctaccggctgtgcgatgagcagtccgccgacctgctggccttgccgctgccggcggctcactaccggctcggcccgctcctgctgcgcgatgcgctcttgaccctggccggccccgcctgggatctgcaggtcgacgacggtgagcggaaggtgtgcttcatccgcagcctcagggaagctcgtacgccgcacgagcccaagccaccggaaatcaaccgttcggctgagcccgctccgctgatccaggaggttgcgccatga

SEQ ID NO: 504275 - DNA, 621 bp, Stenotrophomonas maltophilia
atgaccgcgttcgctgccctgtctctgttccttgccatgatcgcgctcgctgcgatgcccagttcgagtgtggccctggtggttatccggtccgcaacgcttggggtacgccatggcgttgccaccgcactggggattgtcgtgggcgacttgctcttcgtcgttctggctattgcagggctcgtggccgcggtggaagtcctgggaagcgtcttcaccgtgctgcgctacgtcgccgcggcctatctcatctgggttggcgtgggactgatccgacgtcgcgacccgccacccaagcccagggggacgcatgagaccggcggcatctgggcaagctttgccgctggcatgatcttgacgctcggggatgtgaaggcgatcttcttctatgcggcactgttccccgtcttcgtcgacgtttccgctctgacggcctttgatgcaagcctcatcgccgcaatcaccgtcgtcgccgtgggaggtgtcaaggtcgcttacgcgatggctgcgcgtgcggtcgtttccgcgtccaaagacttgcctttcaagcggccggttcgcgtgacgacgggcgcgttgatgatcggagcgggtggatatctactggccaaaggcgcgtga

SEQ ID NO: 504276 - DNA, 252 bp, Stenotrophomonas maltophilia
atgtctctcgcgttcgcagcagcccctttgagtgctgaacaggcccgcgccgaatccatcggccaccaggccctggcctacgtcggcaagcgcctgcccctgcaggtgctgtgcagcgcagccggccactacatcggcaccgccgatgcggatggtcccgtctcgcgcgagtcggccagcttcttccgctcgcaccacgctgccgagcacgccctgcaaacgggccgctggcagcagcgcctccacccgtga

SEQ ID NO: 504277 - DNA, 1659 bp, Stenotrophomonas maltophilia
atgactgagcagacgccgcaggacatggccgccaagctgctggccaccggcttcgagcgcaacggtccttcggctgcggccttgaccgaccccatcgccgacacgccgatggtggtgacgctggacgagttgcgcccctatgaacatgacccgcgcgtgacgcgcaacccggcctacgaggaaatcaaggcctcgatccgcgagcgcgggctggacgcaccgcccgcgatcacccgccggccgggcgaagcgcactacatcatcaggaacggtggcaatacgcggctcgccatcctgcgcgaactgtggagcgaaaccaaggaagaccgcttcttccgccttgcgtgcctcttccgcccgtggccggcgcgcggcgaaatcgtggcgctaaccgggcacctggccgagaacgagttgcgcggcgggctgaccttcatcgagcgcgccctgggcatcgagaaggcgcgcgagttctacgagcaggaaagcggccaggcgctgtcgcagagcgaacttgcgcgacggctaacggccgacggctatccggtgccacagtcacacatcagccgcatgaacgatgcggtgcgctatctgctgccggcgataccgaacctgctctacggcggcctgggacgacatcaggtggaccggctcgcggtactgcgcaaggcgtgcgagcgcacctgggagcggcgtgcgctgggccgcaccgtggccgtggactttgccacgctgtttcaggatgtgctggcgcagttcgacacgcagccggatgacttctcgccgcagcgggtgcaggacgaactggtgggccagatggccgagttgctagagacggactacgacacgctggcgctggagatcgacgacagcgaaagccgccagcgtgcgctgaccagcgaaccggcggcgctgacgcctccggcagcgcctgtcgtgcctgctgctacttccgcaccggtctccgcgcctcagcagccacccgggtcgtccgtaccgcgcgacaccacgccggtcgcgcctccggcgccagcagcgacagcgcctgcatcgtccaaagcgccggaagaccagcgaggaccacgcgacgagcgcctgcaagcgcacatcgtgacaccggcaccgaccaccgagcgcctgcagtccatccagcggatggtcgccgaccagcttggcgacaagctgcccgacttcgaggccgatgcgctgcgtgcgatccccgtacaggtcggcgggctctatcccatctcggacgtctggtacgtcgagccggggctggacgcgccggatcgcctgcgcgtgcacatcgcgcagttcgcgcgggaaatcggcgaggaagcggcggttgccgaccacatcgaggccagcgtcggcggcatcggcttcgtctgcgtggcgccggccgtgagccaggcgaaggcgttgccggcattcgcgcgggcggtgctgaccctgctgcatgcgctgagtgcggctccgccctcggcgaacggattggaccgcgcgcggctggccgacgaactggcggcgctgctccatggccacggcggctcggctacacgtctgagcgatgctgcgctggtgaagctgttccgtctgctgcgcctggcgcgccggctgctggatctggaagccggcgtagcgagccaggattcctga

SEQ ID NO: 504278 - DNA, 249 bp, Stenotrophomonas maltophilia
atggcgaacgcgcatgaactggcccgcagccatgagcggctgcgcgcgctgatcgagttcgcgctgggcgaaggctggcacgtgaagcgcacgcgcggcgggcacctgatgttcaccaagcccggctgcgccgcgatctacaccagttcgaccgcgagtgatcaccgcgccagccgcaacgctcgcgcgcagcttcgccgcgccgatcgacaagtaccggcggcatctcgggagagcagcgatgactga

SEQ ID NO: 504279 - DNA, 219 bp, Stenotrophomonas maltophilia
gtgactgcccagaccatcgccaccgcgacgccgaacgaacaccgcatcctgcgccgcgcggaagtcgaggccaagaccggcttcaagcgcgcccacatctacaacctgatcaaggagggcaagtttcccaagcccctgcgcctcggggtacgcgccatcggctgggattcggtggagatcgatcagtggatcaccgatcgactcagggaacgggcgtga

SEQ ID NO: 504280 - DNA, 762 bp, Stenotrophomonas maltophilia
atgcgaaagtcattttcttccggcgcccacgccaaggtcttctaccgcccaatcgaggcggccatccagtgggcagggctgtcgcgtttcgagcgtcgcatcctcgatgtcgccaaggggatgaaccgcttgccggagcaccccgaactggcgcgctggccacagcttcgcctgaacgcggaacggatctacgacgcactggtgcatctcgaccttccctacggcaaggacggcatcacgagcaacgaccccgccttgctcgatgaccccagcctcacgatccgacatgtcgatctgaaggcctggatgatccgcttctatcccgaccagcgaccggccttcctgttcgatgccttcgagcgtcacctgcatccggccgtcagtgtcgatgccgtgcaggcactgatcatggatcgcgaggcattgaagctccagcttgccgacagggtgcaagcctgggatgcgctctatgcccagttccagacgctcagccaggagcaccaggcacgtacggagcgcgagaagcgttccggggtgccgggcgcccgcagtgagtccacctacctgaacatcgttggcggtcttttgaccctgctgctgggcaagtcgcccaatggcgttccctattcttccttcgagacgctggaatcggtcatcagtgcgctggtcgcccattacggcgacaagtccgggatcagcgagcgaacgctgtgggcgaagttttcggcagccaggcgtcatctcgccacccaggaccgctga

SEQ ID NO: 504281 - DNA, 411 bp, Stenotrophomonas maltophilia
atgtcttcttccgatcaaaagcgctctggtgcgcaggtggcgatgccgcagcccgtcgcgcgcgcgctgcgccgcctggggcaggacatctcggcggcgcggcgcatgcgccgcctgagccaggaagaccttgcgcagcgcatcggcacgtccctgagcaccgtcaggcgtatggaagatggctatcccggcaccgcgctgcacaccttcctgcgcgcgctgcacgtgctgggccggctcgatgacctgtcaagcgcgatgaccctggagaaggatgcgctcggcatggaactggtgcgggagcaattgccgcagcgggtgcgcaccgctgccggcaggaagcggcaggcagttcccggcgttgacaagggcgatgcgcccgcgcctgccgatgacctggagggcttctga

SEQ ID NO: 504282 - DNA, 1251 bp, Stenotrophomonas maltophilia
atggcaacgagcaagccatccaggcgcggcgacctcgaagtccacctgggggcgagcggccaggtcgtggggcgcctgcatcttggcagtggccggcgcagcgcgttcagctacgacgaaggctggctgcaggatgcccgtttcttcacgctgtcgcccgatctccagccggtggccggcgtgcagcatccccgtcaggtgttcttcctcgcgctggaggacaccgcgcccgacgcctggggcgagcgcgtgatccggcgcgcccatgcgaagctgcggcaggaagaccgcgacacccccgcactggacccggtggacttcgtgatgtgggtggacgacgaggcgcgcgtcggcgcgctgcgcctgttcgatccgcaatctggcgcctacctgcgtgctggaggcgcgaaccggcatgtgccgcccctggtggaactggacaaggtgctccacgcggcccgcgccctggaagacggaacggaaagcgcgcaggacctgcgctacctgctggggcaaggcacgtcgctgggtggtgccaggccgaagtccacggtgcgggacaccgatggacgcctggcggtcggcaagtttcccagccaggcggatcggcgcgacgtgatccggggcgaagtgctggccatgcaactggcggccaaggccggcatccgggtggcgccggcgcgcgtggaagtgatcggcagcacggcggtcgccgtcatccggcgtttcgaccgcaccgacgacggcgctcgcatcccctacgtgtcggccgcgacgatgctccagtccgatggccgcgatgcgacgcatgcctacaccgaactggtggatgtgctgcttcagtcgggcgccgatccgatcgccgacatccatgagttgtggcgccggctggtcttcaacttcctgatctgcaacaccgacgatcacctgcgcaacaccggcttcctgtacgacgcacgccagcgcggctggcgcctgtcgccggccttcgacctgaacccgatgccgggcgaccgtcgcgagagcaagacctggctgaccgaggacactggcgtcatcgatagccgggacatgctgatggccgccgcggcgtacttcaggctggatgctgcgcaggcgcaggcgatctggagcgaagtggcccaggccgtggcaggctggcgtgcattggcccggggattgggcatgcgcggcaccgacatgctggacttcgagccggcctttgcccaagagggcggggctggtacataa

SEQ ID NO: 504283 - DNA, 438 bp, Stenotrophomonas maltophilia
atgtcgatcaccgtattcccgcgcttctccgaagtggatgtactcggccacgtcaccaacaccgccctgcccgtctggttcgaggaaggccgccaggagatcttccggcatttcagccgcgaggccagcatgcgcgacctggcactgatcctgcgccgctacgagatcgacttcctgcagcagatacaggcgggacacgaagtgcgcatcgagacccggatcgagagcattggccgctcctcgctgtcgatcgtgcagcaggcgttccagttcgaggccctggtagccagcggccgctgcgtgatggttcatttcgactacacggccaacgcctcgcgcgagatcgatgcggagcagcgccaggcgttgtcggggctgttcaccgaggaatatgcacagtcgctgcgggaaacgagcgcgcgcgccgccgaggcctga

SEQ ID NO: 504284 - DNA, 432 bp, Stenotrophomonas maltophilia
atgaagaaccagaagggcttcacccttatcgaactgatgatcgtcgtcgcgatcatcgccatcctggccgccatcgcgctgccggcttaccaggactacacctcgaagtcgaaggtcaccgctgcgctggccgacctggcctcgcacaagacccagttcgagatggaaaagagcgcgggtcgcgttccgactccgaacagtgctggtttccagggcacctcgactggcagttgctcgacgatcgccgtggacggtgatggtatgacttgcaccatccgtgatccgggccgcattggcaccggctccaccatcgcgttgacttacacggattcggttgttgatgccaccactggtgccatcacgactgctggcggcttcgcctgcgttaccaatgctgttgacgccaagttcaagccgaagggctgcagctga

SEQ ID NO: 504285 - DNA, 273 bp, Stenotrophomonas maltophilia
atgaagcttcccggcattgacgtagtgattcaggcgataggtcaagacacaagctcggcgcccctgtcccgcttgctccttgatctggaaattggtgagcgcgactttcgtcactatccgttgaagttggcgggaatgcggttctggactgacgaggaaaatacgctgcagttggaattcaaggacgtcgggctgctggtggacattccttaccacgacctggacgaagggccctgggtactgacgagcgtagcgctctgggagcgagagtga

SEQ ID NO: 504286 - DNA, 1083 bp, Stenotrophomonas maltophilia
gtgaagtccctggaagcgctccggcgccaccaccacgccgcgctgccccagcagatcggccagggcaagcaggcgcccggccgtgcgctggcgcgcctgcgaatcgaacagatcgagatggcgcaggcgttgcaggaaaccgcggcgactggccccgatctggttgttcccatgctgccggtagtcgatggtcggttcggccagcatatccaatcctccacgcagcgatgcgtggaccgccagccattcgtcgtggctccagcccggcgggaccggcagcgatccggccagcagcccacggcgcagcgcacaggtggcaccggtgatgaagttgcgcagcaggatcgcatcgatcgcaaggcccgagcgttccagctcgacctcggccggatggaccaccagcacctccagcagccgctggcccagcggcgcgccctgcgcgtccaccagccgtgcgtcgctgtgcagcagcaacaggccctggtaggcgtggaagcgttgaacatagcggcggacacgccccggatgccagacatcatcctggtcgcacaggaacaggatgtcggcctggcaacgcatcagtgcatcggcgaaattgcgcacatagccgagattgcgcgcgtgctggacgatctcgacacggatgcccagcgcctgtgcacgcggcacgaaggcctgcagcagctgcagcgtctggtcgctggaaccgtcatcgccgatcatgacttcgttcaccggaagatcctggtcgaggatgctgtccagctgcgcctgcaggtagcgcgcaccgttgtaggtgcacagcgcgacgccaatgcgctcggcaggggccgatcgggatggcgcgtcaggcatcgaacgtactcgcggaaacaagggccgggggatggtagcagagccccccaagaggatggatatggtggctggctagccgttgtcgggatacgcagcgatccgctgcacggcctgggccgcgctcatcggtcgccacgtgtccgcgtcgggctggaacggccgcggatgtacgtccagcagcgcctgcagtgggccattgtccgcaatcagatcctgctgcaggcgtga

SEQ ID NO: 504287 - DNA, 1224 bp, Stenotrophomonas maltophilia
atgctaactatggacgctaaggttattcgtactgaagatcagtacttggcctatatgaatgaagttcagaggctagtttcgctccagcctagtctaggcacggtggccagtgatcgcctcgagcttctaacggttttggtggaaaattacgagaactctaaatttccgattgagagccctgatccaatcgacgcgattgtttttagaatgcaggaaaaagggctcaagcagactgacttggttccctacttcggtacccgtagtcgagtttcggaagttcttgccaggaagcgcccgctcaccgttcaaatgattcgcgcgctttcactgggcctggggatatccgctgagactctggtcgggttgtcggtgtctgaagacctgggcgcagccagtaaatcgggtgcagactggtcaagatttccccttaaggagatgacgcgacgtggttggttggctgatttgaccgcaaagactaagtctgatgtcgaggagctagtcagaggctttattgaagatgctgggctgcagtttggtgctgctgcatttcgccgtagcattggcggcgaagcggcttctccgaccacaaagtatgcccttcacgcttggttagcccgcatcattcagagggccagaggaaacaggtcgaagcttgggccatttgaacgcgagcgaatgtcggctggttttctgcgtgagctggcccagctaagctggtcggagcatggtccactgctggcagttgaatttctagagcggcatggtatagctgttgtaattgagccccagcttaaaggcacttcgttagatggggcagcactaaaggatgtagatggcacgccgattgttgggcttacgctgagatacgataggctggacaatttctggtttactcttctccatgaagtggcgcatgtctggaaacatatcgatgacaatgaggccttcttggacaatttggatgcctcttcagaggataagcgcgaagccgaggcgaacaggcttgcacgcgaggcttttattccgcgagttctatggcgccgaagcgaggcttttctttcgcctagtagggattcaattgagaagctggcgagggagttgagaatacatccagcaatcatcgctggtcggcttcgaaaggattcgaacaactacacccttttctctgatttggttggccagcaaaacgttcggtcttttttcctgtcttcagatgaggtgtga

SEQ ID NO: 504288 - DNA, 1134 bp, Stenotrophomonas maltophilia
atgaagctgacgtatctcccgattttaaaagccctccccagcgaatacgaagcgtccaagaatctggaggccgatcgggcggcctcaattcaccctttgtttgacgtcccggttattagctcgacccggaagatcgcaaaaaaatatctcgagagctcgtctcctatttccgactattttgatgaggttgctcaaaatattaaggactcatggaagggtggtgttgtactgattgatgcatttaactggcctcctgatgccgcggttgagactggcgagcacatcgtgacctacctcttcgacgagcttcaggcaaaaggcgtgtcagtagcgccggtgttcggctacgaccgttgggacgatccggtctatcgagtggcaatgcgcggcatcgatgtcgaaaacgtgccctatacttgccttcgtttagaggccagtgcggtcgaggactccgctgagcccgaaatcttctatgagcgcgtggaagaaattcttaatgagttggagctggatccggaaaattgcgtcgtacttttggatttcggcgacctcacagccaagtcgctcatggacctcatcgatgacgctaatcgtgtgattggtctgttgaaaaagtatggtttcatgcgcatcgcgactgctgggtcgtcgatgcccaagtcgatcgatcttgcagtaaagaagccggatagcgttgggcgcatcgttcggaaggagatgctgctctggcaaacgctcagtacggagttccctcgcttgcccttggtgtatggagactatggtgtgcgcgggccggggtcaaatgatgctatccagaatcctcatgctaacgccaagattcgctacacgtgcgggaaagcgtttctcgtttctcgaggtcattccatcaaaaaggacaagtgggcaattcagatgccaggagttgcatctgaaattgtaaagtccaaagagtaccttcctgggttcagctggggcgacaagattgttgagcgcgcgagcctcggcttgtcagtcaaaaatggacacgggaagtggattgcatacgatactaatcatcatctggcgttcgtgctggaagaagttctcgagtttcagcgcagtgtcgcccgcccgatccctgcacctctgatttaa

SEQ ID NO: 504289 - DNA, 342 bp, Stenotrophomonas maltophilia
atgtccaaatcccgccacccgtatctggccgccacgctcggcgacgccatcactcgcctgccgcccgaactggcccaaccgctggaagcccccttcgctgccgcgaacgaagcgccctcccccatcaccctgcgcaattgcctgcagcagattgcggccggcgatacggccgacggccagccatggcatggcgcggtccgcacgcccggcgaggccgccgccaacgcccgccgggatcgcgccgccactggactggtgtcgccgctggagctttatcacgtgcccgaacgcgtgcgcgtggatggcgaggagaaagatgacaacggcgacggcacgcgctaa

SEQ ID NO: 504290 - DNA, 1017 bp, Stenotrophomonas maltophilia
atgaaggcgggtacggcgctgccgaacctgcagggccggggctatcatcccggctcacccacggatgactggttccctgccatggccgcgcccgacttcgaacgtacccagcagtcgctgctggaactgcagcagcgcatccatgcattcagtatggacgaagccaacgagtatgatttggacatcgaagaccccgccagcccgctatggtcggcgctgcagacacacctgacggtggcccctctgtacggcggcctgcacgtagaattcttcggcaacccgtgggacgcgccgttcgaatggacactgacctgcctgtctgatcctgccgtggcccacgctgtcatgtcgctgcacttcaccggcggggatgaaggtgcgaatggcacccgcgaatgggagttcactgccctgctggacagcaatgtgcagttcccgcgtctgcgttcactggtggtcacgcccaccgcaccagaacaccacaatgcctcactgatccagcgcgctggcccgatcagggaagaggctggtgagatcgcccgcttcgccagccgtgcgccgtatctgaccgaactcgtggtgcccaacgcgcccgatgccagcttcttcgatgtgccgctgccgcatctgaacatcctgcagatcggcccgggcagtgatactcagcgcttcatcgaacacctggctgcatcgcgcaacctgcccgccctgggcctgctggatttcagcgagtccaccgaactgcagttcacctgggccgatgtccgcgaggccgatgcggtgacgtcgtttgcggcgtacgagcgcctgttcgccagtgacgctttcgcacctgtgcacatcttccgcctgcgtaacagtgcgctatcgccggcgcagttgcaggcgctgcagacgatgcggcccggtctgcagttcatggtcatccaggcgggcatgggcggttacgtcagccatttcgcgcggaacgtgttcccgtggcggcatctggtaccgggcgataccgggcagcgctga

SEQ ID NO: 504291 - DNA, 819 bp, Stenotrophomonas maltophilia
atgagccgaaaatttgatctcgatgcgcgtgcagagaggatgcggcggaaggaagagccgtttcgtctccacgggaagctgcgatcagtccactttctgcgaggcgttatgtcacgcgcaagcatgagccttccggcgttctactattttcttggcaccgcgcaggctgctgaagatatggatgcctcgggcgacttgccctttcgcgtatcgcagtcgtacctagagttctcaacgctgaactcgctgtccctgaactgccggaaagtctttgatcatgccaccaagccagaccttactggaggtaatttcggccgcttgcccgacggagtgctcgaagagcatgcgcactactggtccgagcgaggaagcaatactttcgaagatgctcatcgcgccctcgtctttttaagggaattctttcgtgaatacgcgcggacagatactgacctactcaaggctcccggtcgactccacaagcggatcggccttctaaagcaacacgccgatcgcgcggcagcgcatctttctttacaggagtacgagctcgaacttctcgatgtgatgcatgtggtagctgcgcttgtgatcgtgggggaggtgattcgaagcttcgatgcgccctcaatgggtagcgaatacttcaatgataccgacgcggcatccctggcggcagcgtcgcgtacttttccatctatgcgcgattttcgcctgctcggacatgtgaaggtagaccagcaggcgcgcgcctactggaggatgtaccagtacgagagtatcccgcgcttcttcgatcagctcgagttcgcgttggggtag

SEQ ID NO: 504292 - DNA, 942 bp, Stenotrophomonas maltophilia
atggcagttagggtcgatcacgagtggtcaaagagctcctacttagccaagtctgacttgtattcggaggctatgcaggctaattctaccgattggcagtatgggctttggtcaacttttctcatggaaatgttgataagagcgtcaatttcgcatgtgtcgcctgcgcttgtggcagacggctccgactggaataatattctttatgcacttgggcatgctccaaagaaggctaaattcgttcctcgaaccgccccgattacagaattgattgggcgcgctgaagaattggtccctgcgtttacgcgcgagcatgtcaacttttgcttggcgcatttctcaaagagaaactcggagcttcattctggaaacctgaactttgaaagctctagctcgtcgtcctggcggccgcacttctttgctgtctgcgatgtgctcttgagtcattgtgggtcttccttggaaaatcttttcggagatgctggggcaaaagaggcgagggaagatatatcagcacttaatgacggcgccgcgaagagcgtccttggtgctatcaatgcccataaggttgtttgggattcgaagtcagacgaggacaggaagacggctctggaccaggctgcggctgcgtctttgcgccactatggtcatcgagttaattgtccctcctgtaccgccactgcgctcgtgcaggggcgcgcaatgggcgtagccaaaacatcaactgcggaagatggtgttattgaacgtcaagcaatgcggccagaggagttcttctgcgttgcatgcggattgaagatttcaggatactcaaagcttcttgcttgcggattaggtgatagttatgtttcgactagtcattatgatgcgatagagtactttggcattgatgttgataggcttgcgcgaaatatgtgggaagatgacaataatgagtactaa

SEQ ID NO: 504293 - DNA, 633 bp, Stenotrophomonas maltophilia
atgagttcatggcaacgacagcttcaagatggcggatttgcgaagacccaaatttctaggaaattcgaatttactgaagtcgagcagactttaggaaatattgacaaaatttatggcgttgagccaattcaagagctcgtgccaagggttggtgtgggtatgggtcccagctatagccataatttcggattaggggtatttccatttcataccgatatggctcactggagcatccctccgcgctactttgcgcttatttgtatcgtgggatcccacgacgtgaagacaaatatagtgcacagagatagtctgattagcccccaggaacgggacttctttaggaaggcaattttgcgatctcggaggccgcttgatggtcgtcagattccgctaagaatggtggatggtgatatattccgttgggatacactattccttcagcccgtaaattcgatagcagtccgtgctgtgcgaatgattaacgatcggattcgggatgtgagtattagtagcgttgccctagatgagcctggccaagtactggtggtggacaattggcgaaccctgcacggcaggtcggaagtgtcgtcgagttctcgtggaagagttctgaagagggtctacttggagtga

SEQ ID NO: 504294 - DNA, 1710 bp, Stenotrophomonas maltophilia
gtggacccgcgattctggctgatcctgctgttggcacccgcagccgctctgttttcgaccccgtctctggcgtctgatgccgtcggctactgcggaactccgtatgacaaggctgtcaccacagagtacccaatacgcggaacatggatgtacgcccggtcggcctgtgggtggcagacctcgctgcaggactttcatcggatgggtggcacgacagtactcaatttcgggccgcatcttaagcgtcacaccgatcctagtaccgtcgcgatcggttgcacgactgcggagggcacctcctgcgtgcagcaggccaggcaggagatcgggactgggcgcatccgcaactggctgagctacgagttcaacgaacactacggctctgccatcgcgtgccccggaggatttgatcggaagatcgaaactgtcgttgacggcgtacccagagtgttctggcgcattgttctgccccatgacgggcaggcagcctgtgattactccagtggttcattcgacgtacttttcgttcagtacgacgcgaacgcaatcgagagcaccaccgcaatgctcactgttgccgatcacctcggcatggaagtctacctcggagctcccgcattccccgtcgtcaccggccaagagtggcagatcgatgcagccatgctctcgtcacaccgcgactgggcgcggcgcgtctatgccgactgggcaacaagacatgctggacacagtagttttcgcggcgcatatcaatcctatgaggtgctgctgggaagcacctacactgcgtccgacacggagtacggccaggatgccggcctgttccgaaacctcaacccaggcagaaaatatgccatctcaccctacctttttcttctgaaggacggtcgcggcaatacccagaccgtcgagcagaccgtcagcggtttcaggcgcttggccatggccggagtggacatcattgcgcctcaggatgggcgcggtaccggaaatgcggcctactactggccgggccaggcaacgcagctggtgggcgccgtcgaccccaggcttggtctttacccgcgcgttgacgcttctaggagtttctccagtcaatacggcggatcgatacgggatgtattcaatgccctgggagaggccaagagtgaattcaaccaagggaatcgacgggtcgaactgtgggccaatattgaggcgttcgaggaagacaccgaaagtccagactacgcaggttgcagctacatctcgctatcgcgaacaacgaaggaacggatggatcgagccctgacattcgtagcagggcgcgtcgacaaagttatttccttcatgtacgacccgttgttcacctgcaccgatcgcttcggtcttccgctccatcaagctatcgcggccgatcatgatcgccctgtcataaccgatgcatttttctgggatgcaccgtcaaccggcatggttgtgaacggccacggcatcggtgcgggcaccgaacttcagatcacctggtacgactccaactggcaattgcagacccagcgtctttcgccaggctggatctatccaggtggcgccggcgcagggcttgactccatatggattccattccagcgctcagatcttgctcccggcttcttcatttacatcggtgcggttaaaagtacccagtccggaacaaaatccactaccgagaacttcagcctcggatattga

SEQ ID NO: 504295 - DNA, 159 bp, Stenotrophomonas maltophilia
atggcacagcagaaccagaacccgaaccagaagcagccgggccagcagaaccagcaggatcagcagcagggacgccgtgaccagcagcagcaacagcagcaggatcagcagcgcaaagagcgcaaccagcagcagggcggccacgacgaagaagaatga

SEQ ID NO: 504296 - DNA, 513 bp, Stenotrophomonas maltophilia
atgcgtcaataccgttcccctgccgtgctgatgctcgcctgcagcgtgacgctggttgcgtgcgcacctgcgccccagaccacacccaccgccgccgcacctgctgtgccggcgccggccaacacggccgcagtggtcacgcctgccccggcaccagcgcgcagcgaatgcccctacccggacttcgatgccttcctgaagcatttcggcaacgagatcacgctgcaggaaaaggccaccgccgacccgctgctggacagctatatcgatgccgaggccgagccggaaccacgcaaggtggaaagccggctggcgctggccgacgtcgagtggccggtgatgccggatcccgccgcactggccgggcagggccgcgagctgcaggtcaacacactggccgatgggcagcgccaggtgcagatccgcaccccggacagcagtgaccagcagacctacaccttcgcgcaggcgccgtgctggaccttggtcaagcgtgaggatgagtcgatctga

SEQ ID NO: 504297 - DNA, 1845 bp, Stenotrophomonas maltophilia
atgcagattcgcaggatgcgtagcaccaccgccattgccgcactgctggcgatggtgcccttcaccggcctgcatgcgcagccgctgcacgccgacgatcgcgcctacttcgccagcgccgcagccgaacagaccgcgcgtgatgcgttgggcaggcagctggaggccctgcagcatgctgcgggcaccgcacccgcggaacgtttccagcaggccgaggccatggaggcgcagtgcctgcgccatcacagctacctgcacctgcaggccgcccgcaacgcgcgcgatcatcgtccggcacaggcgctggaccaggtgatggcgctgtgcagccgcattgcccgcaccggtcgcgccgcgctgcgcgaagcggctgcggacgcggcctgggccgcaccgtatgccttcctgcgcacgcgcgcattgaaggaggccgccgccccagccaatgccacgctggatgaggcggtggatgcgttggctgatccggcgctggacagtttcgcgcgcctgcgcgggcagatcctgcgcacggccgagtacccgcagatcgagcgcggcggccagcactgggacacggggcgcgacaggcaggcactggcccggcagcctgaccgcgccttgcgcgaggcgggctggaagggctactggcaaggcctgcaatcgcgccgtgagccgatggcttcggtgctgctgggcctggtgcaggtgaacaatgaggccgcgcgcctgcatggggagggttcggcgccggcgcgtggctatcagcacatgggcctggatgcatcaacagtagacgcgacgttgctggcgatcgaacaccatgcaggagatcgacgcgcctaccaggacatgctgctgcgccacgccgcgcgcgctggcgtcgacgcgccgcagatctgggataccacggtgcctgacgccggctacgcgccgccggtgctgtcactggggcagctgcgcgacaccgctgccgacgccatgcagcatctggggccggcctacgtcgccgagttgcgtgcgctgcttgacccggccaaccaccgcatggacctggccaccgaacgtggtgagcgaagccaggatgcattcccgttgaacgcacccggcgcgccggcgatgctgttcgttggtgtgcgcagcggggatctggaaagcgatgtcgagatcgcccatgaagccggccatgccctgcacggcgagtggatgcagcgtggccatgcctcgccgttgcagcgcaatggcagcccatggctgaccgaggcgttcgccatctacaacgagctgcgtttccgcgacgagctgtaccagcaggcacaagacccgcgtgcaaaggcctactacctgaagtcgctgctggacgacatggtgctgcagcttttcacttcatcggaggaggcaaagctggagcagtcgatctatcggggagtggccgacaacacgctgggcaccgccgacgatctggatgagctgaccggccaggtgctggcacgcttcggccagcaaccggagcgctacccgcagctgcgcaacagctggatcggcaagcgcctgatgtatgacgacccgaactatctggtgaactacctgtatgcggggttgctggcggtgcagctctatgtgcaggaccagcgtgacccggaaggattccgtgagcgctatcttgccgtgcttggcgaaggcttcgaccgcgcgccgaacgaacaggtggcgcagctgctggggcacacgcctgactggacggccctggtggatgccgatctgcaggtgttcaacgagacggccgcgcagctgcaggcgctgcacgcgcggatcgaagtggcgcacaacccgtccgcgccgtag

SEQ ID NO: 504298 - DNA, 1080 bp, Stenotrophomonas maltophilia
atgcgtatgaacaccgcgattgtcgggctgctgctgatggcatcggcgctctccgcccgcgcagacggcagctggacggccggcgagcgccatggcaccaccaccgtggccagcgccagcgtgcgcgatgcgcagcacggcgacaccctgcgctacacggtgtggtacccggcgccggccgcgagccgggaaaccgcactcaccatcggcccgcccgcagcgccgctgttcgatgtcggccgctcggcgttggaggcgccgctcgccggcactcgcctgccgacgctgctgctgtcgcacggcaacggcggcagtgcacgcatgatgggctggttgggcacggcgctggcgcgggacggttatctcgtgatcgcggtcgatcatcctggcaacaacggcgccgacgagatgacgctgaccggcagcacgctgagctggctgcgcgcggatgacctgcgcgctgcgctggccgcggtgcaggccgatccgatactgggccgacacgtcgatcctgcgcggctgggcgtggtcggcttctcggccggtggctataccgcgctgctggccgccggtgcacggcccaacctgcaacggctgctggcgttctgcaccgcacaccccgatgacggcgtctgccagccgcagcaggaggccgccacgcacacgatgcaggcgcgcctggccgctgcggcttcgcccgcgcttgccccctggatcgccgaagctgacgcacagcgcgcgattcccggcgtacgtgccgtgttcctgctggcgcccgccatcgtgcaggcgttcgcgcccgcacaactgtccgcgttgcagcagccggtgtcgatcatgttgggcgaggctgacacggttgcgccgccggaaaccaatggtgcggccgcacaggcgcagatcccgcacgccacgctgcaacgcctgccggacgtgggtcactacgacttcctggcggcctgtaccgctgtcggtgcgcagaggctgcccgagctatgcaacacgtctgcccccagggcgagaacccaccaggaggcggtggatgcagccgtgcgattcttcgcagacgcattgcgctag

SEQ ID NO: 504299 - DNA, 2988 bp, Stenotrophomonas maltophilia
atgacgtacaaccgctcacctggccgccacccgctgaccagcgccctgctcgtcggcctgctggccgcgacttcggcgcccgccttcgcgcaggaagcctcctccaacccggtcgatctggaccgcgtcagcgtgaccggctcgcgcattgcgcgtacgggcttcgtgacctcttcgccggttaccgccatcaccgcagaagaaatccgccagaccggcgcgctgaccatcagcgacctgatgaacaagatgccgcagctggcaccgtcgttcacgctgggcaactccacccgctacatcggtaccgctggcctgggcctgatggacctgcgtggcatgggctacgaccgcaccctggtgctggtcaatggccgccgccatgtcggcgccaacccgggcagcacctctgttgacgtcaacaccattccggtggagtggatcgaacgcgttgaagtgatcaccggtggtgcctcggccatctacggcgcggacgccgtggccggcgtggtcaacttcatcatgaagaagaactacgaaggttttgaagcccgcgcccagaagggcatcgcgggtgaaggcggcttcaaccgcggcttcgtgtcggccacggcgggcaccaacttcgccgacggccgcggcaatgtggccgtcgccgtcgagtacagcgagcagggtcgtttcggccgtggcgaccgttcgatcggtcagcgctatgacgtgaccgtgcccaatccgaacttcgacagcaccaagccgccgagcgagagcaacccgcagaccgtcctggcgcgtccgggtggcaactactccacctcctacggcggcaccttcgacctgggcggcaagtttgatttcaccaaaccgggcacctacaaataccgctaccacttcaatccggacggcagtttcagccgcaaccgcttcgatggcccggtggtcagcccgagcacctgcgtcaactgtgatttcgccgatctgaacgccgttgccgacctgcagccgaagttcgaccgcgtcagcgtcaacaccgtcgcccacttcgacctgaccgacaagcaccgcctgttcttcgaaggcaagtacaccaagaccgaatccaccttcttcggccagcccgctttcgacagcaccctgcgcatccgtcgtgacaacgccttcatcagcccggaactgggcgcgctgatggacgccaacggtgtcaaccagttgcagatggcccgcttcaacgtcgatgccggccgccgtggtgaagaggtcaagcgtgagaccaagcgcttcgtcctgggcatcgaaggcatgttcggcgacaactggagctatgaggcttcgggcaactatggcgagaccgagatcaaccgcgtcaacgtcaacaaccgcatcaacgaacgctggcaggccggcctggatgccgtccgcgatccgagcggcaagatcgtctgtcgtgtcgacctcgacccgaatgccaccaacatcaatgcaggtggccgcaagtacaaccgcgacctgatcggctcgggctgcattccgttcagtgttctgggcaacggtgcggtgtcgcaggaagcggccgactggttcaacacccgttcgcactacttcggcaagcttcagcagaccgtgttcagcgcatcggtcaacaacaacgcgctgttctcgctgccggccggtgacgtcggtatcgcggccggcgtggaataccgcaaggaaaagagcctggagcgcaccgatccgctggcggcctccggcgcgaccttcctcaatgccatcaacggtggcggcggctcgtacaacgtcaaggaagtgttcgccgaaaccaacattccgctgctggctgacattccgggcatccgccgcctgtcgctggacctggccggccgctattcggactacaacaccatcggttcgaccaagacctggaacgtcggcctggattgggaagtgatcccgtccttgcgcgtccgcggtaccctggccaaggccatccgcgctcccaacatcggtgaactgtacgacgagcagtcgcagaacttcgccaccatcaacgatccctgcaacaccaacgccaccaactccaaccgtccggccaccgctggcgatccggcactgcgcgctgccaattgcgctgcgctgggtattccggccaactgggttgactcctacagcgccaaccgtcctggcctgagcggcggtaacccggacctgaagccggaacgcgccgagtccacctcgatcggcttcgtctggcagccggagttcttcgaaggcttcggcatgtcggtcgactactggcgcatcaccctgaaggatgcgatcggctcggtcaccgcgcagacgctggccacgcgctgcgtcgactcgccggggggcatcaacaacgccttctgcgacaagatcaagcgcgccccgatcggcggcgcaaccggggccaacggcgccgagttcccggcgtacagcatctacgactggaccgcactggccgagaacctggccaagagccgtcgtaccggtatcgacctggaaatgaactatgacttcggcatgttcggtggtcacaccaacctgcgcctggtcggtacccgcctgctggaatcgcgtgaatgggagttccaggacttcccgagcgactacaaggaacgctcgaactacgtgaccaatccgcgctggcgcggtcagttcactgccaagtacacgctgggcaacttccgcgccagctgggacatggtgtacatccatcgcaacctgcgcgtgttcccggagagctacaacagcaacccgggttcgcagagcccgatctggaacccgtcgtacacctaccacaacatgcagatcggctacaaaatggctgattccggtgtcgaggtgtacctgggcgtggacaacgtgttcgacaaggatccgccggtcaactacttcggtgcggacctcggctcggcctactacgacaacgttggtcgcttcatgtatatgggcgtcaactacaagttctga

SEQ ID NO: 504300 - DNA, 888 bp, Stenotrophomonas maltophilia
atgagccgttccctgctgcctcccctcaatgcgctgcgcgcgttcgaagcgacggcccgccttggcggcgttgggcgcgccgcgcaggacctgcacgtcacccacggcgcggtcagccggcagttgaagctgctggaggatcaccttggcctggcgttgttccagcgggccggccgtggcctgcgcctgaccgctgcgggcacgcggctgcaggcagcatgcagcgaggccttcagcggcatcgaagactgcgtgcgcgaactgcggcggccggcagcagccccggcgctggtactgggctgcagtggcagcgtgctggcgcgatggatgattccacgactgccagcattgcaggctgccctgcccggcgtgcgcctgcagtggtcggcactggatggcagtttcaccgaagcgcaggcggcgctggacgccgtgctgctgctggcgcagggcccgtggccacgaggctggcaggtacgcgagctggcgccggaacgggtcggcgtggtggtggcgccatcgcatccggccgcgcagcgccttcggcatgcaccgccgtcggcgctgttgcaggagacgctgctgcacaccagctcacggccgcaggcatcgccggcatgggcacaggcgcacgatctggacgtgtcgaagctgcagctgggcaccgccttcgagcacctgtactacctgctggaagccgcggtagccgggctgggcccggcgatcgcaccggagccgctggtggccgaagacctggccgcaggccggctggtcgcaccgtgggaatttaccgccaccggcggcttctgggtgctggcgcggccggatggccaggccgacgcacgcgtcgacgccctggcgggctgggtcgctggccagctcaggtaa

SEQ ID NO: 504301 - DNA, 885 bp, Stenotrophomonas maltophilia
atgcccaccgccgccgtccgcgccaccctgtgcactgcattgctggcgaccccgctgctggcgctggcccagagcgcgatcctgccgcagcagcgcgatgccgccggcaacgtcatggagccgctgggacaggtactgatcgcgagtgagactggaccgtcggggctttatgactgcacgcgggacggcaactggtgcgtacgcgtgcagccggttgccgaggagggtaaccggccgaccgtgctggaagtgcttgagaaggcaccgggccagggcaagccgcacacctaccacgtcagcatcgacgtgccgcaggaaagcgagctgtcgctgtggccatggatcgtgcggctggcccctggcgtgggcagcgatgaaccggtgaccgacccgcagcagcgcgcccgccagaatgtgctggtgggtggcatcgtcaagttcagcaccatgtactccggtggaggtgccgacgcgtccacgctgcagctggcacgcgtgcgtcacctgcaggacgacatccaggtggacgacgacgtgctgaccgtgccatggctgggcaatgcgatgatccgcgcctgtttcagcgagcaggacatcaagcagcgcgccggtgcctgccacgacgaatacgggttctcggcgaagctggcgctggatacggttgccgagggcatgccagtgctgcgctaccagaccgtggcgacccggtacccggccggtgtttcgcgcttcgaggattcgctggccagggggccgttgaagaagcaggatctgcgcatcgaacaggacccggcgtgtacctacacgcggctgttccgcttcggggcggggatgttccacccggaccaggcactgccggactgtgccggctataccgaaccctga

SEQ ID NO: 504302 - DNA, 510 bp, Stenotrophomonas maltophilia
gtgagccaggaactgcccgtgctgtggtcaccggcccagcaggcctggctgcaggccatgggctacaccgtctatcacgacggccagttggctgcggagctggatgccgcgctgcagttgagcgtggccgaagccgatgcggctgccgcggcttcggcggaacaagtgcgggcgggttcggcctccatgcgggaacaccctgccgaagccgcacccgctcctcaccaggaacgcccggcacctacgcgtcgcgagacccccgtcaccgcaccggataccgcaccggcaacggcccgcccgctgccgggtggcaatgcgcggcagccggtggtgcggctcccggatcgcctgcagatcgcattgctgcgtgcctccggctgtaatcccaacgaccctgccacgcaggcgctgatggacagctggccgctggaccagctgcgtcaggacccggccgccaagcgcgcgttgtggccgcaactgcgcgccctgcgcaagcggggcgcaccatga

SEQ ID NO: 504303 - DNA, 564 bp, Stenotrophomonas maltophilia
atgatcagggccgtcctcgtcgatctcgatgggaccttggtcgacacgcacgccgtcaatctggcggcctaccgcctcgcgctcgacgaagaggggctgccctacgatcacgccacactggagcggaccgtgggtcgcctggcgtggcggctcatgctgcagtcggtgcttccaggacatccttgcgtgcatgaacgcgtggctgaacgcaaacgccgtctgtatgcaggcatggcgtcgcaggttcgtgtcaatgaagcgctggtcgaaacgctgcggctgctacgaccgcgcgtgagtatcgcactggtgaccgcggcatcgccgggttcagtcggtccgctgctgcaggcgaagggtcttgacgacctgttctcggtggtggtgaccagcgctgacgttgagaagcagaagccggatccagagcctttccagcgcgctgcgcaattgctcggagtaagcgccgacgagtgcgtggtgttcgaggactctgacgtgggccttgcagccgcacgtgcgtttggcgcccaggtgtggaaggtcgaatgggccactcgcccctga

SEQ ID NO: 504304 - DNA, 1908 bp, Stenotrophomonas maltophilia
atgaaaccgggcttttttgtcgcagctgtgttgctgttgcttttctcgcatattgtccgaaccattcgctggcgggtcatcctttcccggtccggggtggaagtgtccaatacgcgcccgctcgcggcactcagcgttggctacctcatcaatgcattgctgcccctgcggctgggcgagcttgtcagaactggactgctgtcctataccgtgcgaacgcggttttccacggtcctggcgacagtcttcgttgagcgcctgatcgatctggccatactcgttctgcttctcgtggtgctgcccggctggccggctgccccgcagctggtgctgggttcgctggtcacattgttcgcgctgggcgcgtttttcgtgttgctgttgtgttccgctgcatcacgtcgcgccctgttgatgttggcgtcgctgttcaacgacagcctgaagagcgcgatcctgcatttctgctatctggtgacacagttgctgctgcagccgtcactgcttgcgcgtgggcgcttctgggcgttgaccgtcgcgatgtggggagcggcgcttgcgtcgctggcgttgttctccatgggtgcagatcaagacgttgccaccaccttccttgcggtctacggagataccactcaaggccagccggcatcccttgctgtgttgaagagcccgtggttgctggcttacctgattctgccggtgccgatcatcctggtgtacgcctacctgtcgggattcaatgcgttggcaggtctgcgtggtggcctgcgcgcgatcagcaggcttgaggcctacggcggaggtcagttgaggtcgagatcgcagacgttcaattcgcttggccaatacaatgcgtttctggataggcactatcgtggacgcggcggcttgctttccgagttcgagcagcgcggaatcgatgacgttctcgtgcaccggatcttccacggtggatctggtgccgtcactgcgctggtggaagttgccgggacgctgcgtgtccgcaagttcgcgacgggtgcgcttggagccaagctgcgcatccagcgtgaatggttgcagaattatcgcggcgatcttccgctggtggacattatcgaaacccgtgccgatggcgaagactatttctatgacatggcgttcataggaggaagccgcgacctgtatgagggtattcactccgagccggtcaacatgtccatggccttgctggacgacgtcatcgagcggatgtccagcttccatgccatcagcgcctgcgaacctgcgtcggatgcggtagtggccgattacattgccaccaaggtggtggcgaactatcgcaccattcgcgcggagttccaggacatactcgatatgggctggattgagctcaacggcgagcctttcgacctggcccagctggaaatgatggaggaccccgaagcgttcatcggtcgactgacggaccgtcggcagtccagcattcatggcgaccttactatcgagaacatcatgctcgagggcaccgtactggagcctgggcgctggttcctgatcgatcccaatccagtcaatggcttccagtctccgttgatcgactttgccaagctgatgcagtccctgcatctgggctacgaggcgttgcacaaagcaccccgcgccagcctcgttggcaacaggctgacagttgggttgcatcgttctttccagtacgagagtgtctatcgccatgtggtggacgggcttacccagcgcctcggagccgatggaatgcagcaggtatacctgcatgagctggtcaactatctgcgcttgattccttatcagttgcgcgcgaaccgtgaggccggcctcgctttcttcgggggcctttgcctgttggtgcgcgagttccagatcgcctatccggcgcgcccgtcatga

SEQ ID NO: 504305 - DNA, 750 bp, Stenotrophomonas maltophilia
atgactgatgcgtgcatgatcatgccgatggccggccgtggttcacggttcgcccagcagggtgagcccttgcccaagccaatgatccagttgggcggcaagccgttcttctactgggcgacccgcagcgtgctacgcgagcttccgcatgcgcgtttggtgttcgtggtgctgcaggagcatatcgatggcttcggcatcgacgcgcaggtcaagagatactttcctgacgcacaggtgctggccatccctgaggttacctccggggccttggaaactgtgctgaaggtcggggccctggcgggtgaggggccggtgctggtcaacgactgcgaccacgcgttctcctactcgcgcctgaagcaggcgatcactgcgctggagcggggggctgatggcttcctttcccattttcgttcgacaactccgcacttctccttcgcagcttacgatgcggaggggcgactgcagcgtactgcggagaaggtcgcaatcagtgaccgtgccatcgccggcctgtatggtttccgcagcatgcacctgatcgaaacggcggcacgctcgtatgagcgcacctgtccctatccggagctgttcgtcagcggtctgtacaatgacatcgtggcatccggaggcgaagtgcgcggcttcgatctggactctcatattccgtttggtacgccggaagagtatcgcgaggcgcttctccggagcgaagagctgcagcggctggaagggccgctggaatga

SEQ ID NO: 504306 - DNA, 795 bp, Stenotrophomonas maltophilia
atgagcaataggacattggtgtttgtgccggcttacaactgcgagcggcaagtcctacgcgtactggcacagctggaagatggctgggtgcgctcttgcgtgtcacaggtgatcgtcgttgacaatggcagtaccgacgcaacacggcacgttgtcgcagagcatgcgcgtaagcgcggcgatgcctatatttccctggtgaccaacgatgccaactacggtcttggcggttcgcacaaggttgctttccagtatgcacttgagcacggcttcgactgggtggtcgtattgcatggggacgatcaaggcaccatcgcagacttccggagtgtgcttgagcgccccgatgcactcgacgttgacgcggtcctcggaagccgtttcatggccgggtcgcattcgccgggctattcacggttccggatttttggcaacttcgtcttcaacgcgatctattccctgtgcctgcgccgacgtatccacgatctgggagccggcctcaacatgtatcgggtgaatcgcctgcggatcaatgaggtcttgcgctacccggataacctcacattcaactgcgtgatgctctgcgcgcaggtcattcgcggggatcggataaggttcatgcctatttcttggcgcgaagacgaccaggtctccaatgtcaaactggttcgtcaatctttccagacgctgggcatcgcattgagagcgatgattgcccgctcgtccttcccgtctgccgagcatcggcagcgggtgatctcccgttactcatggaaggtggtggccaatgactga

SEQ ID NO: 504307 - DNA, 435 bp, Stenotrophomonas maltophilia
atgaaactgccttggccggcgtggcaggaagcccggcgcgcgctcggctttgtgctgttctccggcttcggctggtgtttggacatgtgcctgttctttggacttgtccatgcactggccttgccgcctgggctggccaatctcgtcagcgcgacgacggcggcgatggcggtgttcgtggtgtcgagggtgctgctgttcgatggagcgcgccgcggtgtgaagccgattctgggttacttcttctacactgaggtgaatattctgctgtcggcggcggcgattgaggcgatcgcactccatctctcctccgcgtacacgctgcagtcaacgacggcggcaattgccgccaagatactggtgacgcctctctcgttggcgtgcaatttttttgttacccgctggatctcagggaaaaaggcagatgagcaatag

SEQ ID NO: 504308 - DNA, 1911 bp, Stenotrophomonas maltophilia
atgaagagtccattgacaaaaaacaagaacgcactccggctgatcgggatgacgttgctcttcattgcggctttcacgctgttctgcctgcggaatctggaccccatcacctatccatcattgtatgccgaggatggcacctggttcggggatctgttgacccgcggtttctatgacactgcgttcgataccagagtctttccgatcgttggtttcatcatatttctgcagattgcaagctgggtaatcgacgtattcctggggggcaatctctactatctgcctcttgtgttgttcgtgttgtctaacatgttcagtgcgggcatggtgctggtggctgtgcgcgtattccgcggccaccttccgttctggggagttgccgccatcgtactttcaatcgcgcttctgcctgtaggtggagacgcgaatgagatctatgggcggatcctcaacctgggattcatgttcccctatctgcagacactgctgctgctgccattgttcctgcccggcagtcgccgtcgtgtaggtatcgccataggcctcgtattctccttgatatcgggactcacattcccggtggggatcggtgtggcaggcgtagcctgcgggttgctgttgctgagattcatgcatgaacgccgtcgtggcgatctggtcgcggccatgctggtggggcttaccgcgctgctgccgttgctgatgttgaccagtcagaccttcagcgatacaggcgctgcctccatgccggtcaaggttgaggcgtgggtagagttcgcaatggcccgatcgctcctgtatccgattgttttctggttctattcttcgctgacagatgcctccgtattgctcatcgtggtggcagtggtggtcgcggtagctgcgcagttgtggcggacgcgcaggtctgcagagctgccagcagtttcagcgggttatcccttgtacctgttctggggggcgacgctggtcaacctggccgccatgctggtcatgcgatccggcttgtcggcgatctttgatggttacagcagtacgttcccggaccgctacttcactggactgaatctgctgttcttcaccagcctggtgctgacggcctgtcgcagcaggtgggggcaggcggtcgcagctgcattggcagttccgttgctggcgacctccgccggacggttcgaattgaacagcccatccatgcattggcactccgttccaacgtggaccaagagcatctgcgaaaccgcgatgcgcgatggtccccgcgccttcattccatttgcgcctgagggcttttcaaccgaagtgccgaaggaagaactgactgctgcgctgcttgcgcgctgcgcggcgacggaaaccagggcctatgccgaccttccgttgatttcggcggttgtgtcggatgatcttgacaggcctccttcggcggcggccatccgttacgaaggccaggtggtgcgccgtccggcgcagagtggcggcaaggacgatggatggttctatgtgtccgaaggcaagcggcgttggatactggatggcaagtggctggaaacgcaggggctgacaacggctgatgttgtgcagatcagtgctgccgagctggcgaccattgcggagaatcccagcccgatcaccgccgacactggacccattgcgaccaacggtggagccacccgcactgctgatctctacgatgggcagatcgtgcgccgggccccgctggacggaagccgtcaggatggatggttctatgtcaagaacggcaagcgtcgctggatcgcggacggagcgtggttgaaggaggccggactggaagccaaggacgtccaggcgattcctgcggagacgttgagcgcgattccggaggatcctgaaccgcttggtgtggataagcccctggagagcaactga

SEQ ID NO: 504309 - DNA, 369 bp, Stenotrophomonas maltophilia
atgaatcagattaggaatggagttgttgttctggctatcgcgctgggtcttgccgcatgcggcaagtctccggctgagcgtgcggccgccgaaggccagccggccccagctgcggaaaatccggctgcggagcctgcgccggcagctgccaacccggttgctgaaaagtacgagggcaagatcgtgcgccgccctgccagtgacggtggcaaagaagatggttggttcttcgttgagcagggcaagcgtcggtggatcagcaatggcgcctggctggccgagcacggccgtagtccggccgaagtaatcgagatccccgcggccgagcttgcccagattccagaggatccgaatccgctgggtcagtaa

SEQ ID NO: 504310 - DNA, 3165 bp, Stenotrophomonas maltophilia
atgatcgaactgaacaactctgccttcatcaggccgttgaagctgccgccgagcgcctggcacgggcatattcccttcgctggctggatagtcgaggcactgcgtccggcgatgttcgttgagctgggtacccactatggcgcgtcctatctcagcttctgccagacgatccaggagctgggccttggcacgcgcgcgtatgccgtggacacgtgggagggcgatgagcacgctgcgttctatggaaactcggtccatgcagggctgagtgaataccatgatggaaagtacaacgatttctccaagctgctgcgctgcacgtttgatcaggcactggaagagttcgacgacggcagtgtcgatctgctgcatattgatggcctgcatacctacgaggcggtacgtcacgactttgaaagctggatgccgaagctgtccgaccgtgccgtggtcctgttccatgacacgcaggagcggcagggcgatttcggggtctggcgcctgtgggctgagctctcttcccagtacccgtcctttgagttcagccactctcatgggctgggtgtcctggtggtcggtgagaacgctccagaaggggtaaagaggctcggaacgcttgatggcgatcagcgcaacctcgttgcccatctgttcgcagcgctgggccacgccgtggcgctggcctacgcgcgggactggtggcagaacgaggtgcatgtgcttggcggcaaggtggccaaccttgagggcgaccttgcctatgtgcgcgcggagcacgagcgcagcatcgtcacggtgaacgagaaaagccaacagttgcatcacgccaatgagcagctggtggcactgcagagcgccgccgaggactcccatgggcggcatgaactggcaactgccatcgccgcactggaggcggaactggagagtgccgaatcagagcgggaggtgctgcggctgaaggtagatgagatctcgcatgaactcggcaaggagcgtgagcggaccatcgccgctcaggtcgagtgtcgcgcagcggtgacggcattggctgcgcttgaagcggagcaggtttcagctcgggccaccatggaagcggagatcgctcacgagcgtgaattgcgcgctgcgatcatcgccagccttgaggcggagcgcgctgcccaccagcgttcgatcgcagtgcacgaaagcgagtcggcccagcgcttgcgggagcgcgagcaggggctgctggaagtgggcgttcgccgtcagcggctgatcggcgacatcaaagaccgcgacgatcttattgctgcgctgacacgggatctgtaccaggcgcagcagcggtctgagacgattggcgccaaagcagggcgcgcctttgagcggatctaccagcgttggaatgctcagggaggcttgcgcgcgcgcgcgctgaactggggtatccgcaaggctgaggcgcgtcatgcccgtgcattgggccgtcagcagcgctctgccgaaggaattgcattgacccggccgcaggcaggtttcaatcctgcactgcgtgcggattgtcaggatctggccgactacatcgctgtgaccgagttgtctccgcaggcattggccgagcaggcctctgccgcgcaggcgttcagctaccgcccgcgggtgtcgctgatcattccgatctacaaggttccgcgccaagtactggaggagacactgcagagtgtcgaactgcagacctacggtgagtgggaaacctgcctggcatgggccgatgtggacgacctggaaggatgggaatggttgaagcagcgctgtgtctccgacccgcggcacaaggcgatactcttggccgccaacggcggtatttcagagaactccaatgccgctctcgaacacgcagagggcgagttcgtggcgttgctcgatcacgacgatacgattacgccctgggcgctgttcgacatggtagcggcgatgcaggaagggggcgccgaagtcgatttcctgtactcggacaaggactccatcaacgctgacgggacgtgccggatgaacgcactgttcaagccgcagtggagtccggagatgctgcattcggtcaactatctgacccatctgaacctcatgcggacctcggtggtccgccaggcaggtgcatggaacaaggaaaccgatggcgcccaggattgggacattttcttccgcgtgacttctgcggcacgcaggatcctgcatgtcccgtccattcactaccattggcgcatcctgccgacgtcgaccgcatccgggctgcagaccaagccgtacgcgatcatgggccagttgcgcgcgcagaagaactattttgcaagccgcgggctgcctgcgcaggtgaagcgaaccgatcaggggttgttccacatctcctggccgccgcttgcatcggcttccgaggtggttgtcatccagaccggcaccacgcaacagctcgtgcatacgctgaaccttcttctggtctccgacctttccagcatcaagcacattcatgctgttcacgtgggtgaggcgagtgccgaactgcaggcatttgcgaatctgcccgacagccggttcgtgctccgccggcaggatgcgtttagctggttggccgtggccgattggctggatgctgcatcggcgggcgtcgtgatgattgatggccgggctgtaggcttgtcggaaggattgctgaatgaactgctgggatgggtccaccaccatccggatatcgcctggacctccgcgttggcggtccgcgaggacggtcgagtggaagaggctgggcgggttgtcgccgctgacggcagcagtgcgccactgtttcacggcgcacatccgcacgagtatggctggtttggcggtgcgcagtggtaccgaaacatgcgggctgcttcaccgttcgcgattgcgtttaagatgacgaagttccaaactgcgtcacgttttccttgcggagacgtggaaatgcagcaggcattcacgcgtatctgcactgggagcatcgaatcgggcggcggaagaggcttgatcgatccctttgctgtggtctacatgccttctggcgcgcaggctgcctggtctaacgacggcgaaaagtatcgagctgacccgtacttcaatccggcgttccggcaagtcagtcccctgaggctcaacaaatga

SEQ ID NO: 504311 - DNA, 993 bp, Stenotrophomonas maltophilia
atgcgcgaggatatctaccgcctctttctgcaaggaatcgatttgaacgcttctgtacgcctgcttccccttcttctgctcggcacgctggtcggtacggtcggttgcgacaaagtgccggggccggcggcggccgatcccggtctggagaaggtcaacgcctacatcgagtgctacaacggcgttgaacaacccatccacgaaggcttccagacctacaccggctggatgaaggaccccgaagccggtccgaccggcaaggaaacgcagccgcgctcaccgggcaaggtgctgtcgcaccgcgtggagtactgcggccaggcgctgaccgatgcgctggcaaagaacccgtctaccgcgctggatgcaccggcgcgtgactaccagcaggccttccagtcgctgtacgcgctgatcgaacgcgccgacggctacttcacccgtgaggactatcgccgcgatggcggtgagggcctgcgcagccagcacgcgccgttgatgcaggcctatgccgggttcttcaaggccagcgaggcactggatgcggcactggagaagaacgagaacgatcgtcgcgcggcacagctgaagcagatcgaggagagcgaaggccgttcgctggcctactaccatctgcgcctgctgggcgatggcaagcagctggccatggccttccagggcgacgcaccggatctggcggcgttgcgcgtacagctggccgattaccaggcgctggtgacggaaatccagaactccggggtgggcaaggacgacccgatgtggggccacgtgcagcgttcagcggacaagctggtacgcaccgccgggcgcggcgtggagcgtctgcagcagggcaagccgatcaccgccgaagggctggctgccgagcgcaaggcctccggcagctgggacacctcggcgccggaaggtgcgcaatccactctgctggacgcctacaacgatctggtctccaccagcaaccgcctgcgatga

SEQ ID NO: 504312 - DNA, 1395 bp, Stenotrophomonas maltophilia
gtgatcaagccccgtaccccgcccggcacccttgaactgttgccgcgcgagcagattgcgttccagcgcatgctggacgtgatccgtcgcaactacgagcgcttcgggttcctgccggtggagacgccggtgttcgagctgtccgacgtgctgctgaccaagtccggtggcgagaccgagcgccaggtgtatttcgtgcagtccaccggtgcgctggccaacgccgccgaatcgggtgaccgttcgctgccggaaatggcgctgcgcttcgacctgaccgtgccgctggcgcgctatgtggccgagcacgagcatgaactgaccttcccgttccgtcgctaccagatgcagcgggtgtaccgcggcgagcgcgcccagcgcggccgcttccgtgagttctaccagtgcgacatcgacgtgatcggcaaggacagcctgagcgtgcgatacgacgccgaagtgctggcggtcatccacgcggtgttctcggaactgcgcatcggcgacttcagcatccagctgaacaaccgcaagctgatgcgtggcttcttcgagagcctgggcgtggccgagggcgagcgccagctggcggtgctgcgcgaagtggacaagctggacaagcgcggcgccgattacgtgcgcgagacgctggtgggcgagggcttcgagattccggccgagcaggtcgagaagatcctggcgttcgtggccgtgcgttcgcagggccatgccgatgcactggcgcagctggccacgcttgaagccgacgccggttcttctgagatcctgcgtaccggcgtcgccgaactgcgcgaagtgctgcagctggtgcaggcgctgggcgtgccggaaaccgcgtactgcctgaacttctccattgcgcgcggcctggactactacaccggcaccgtctacgagaccacgctgaccgaccacccgcagatcggttcgatctgctcgggcggccgctacgaagacctggccagccactacagcaagtcgaagctgccgggcgtgggcatctccatcggcctgtcgcgcctgttctggcagctgcgcgaagccggcctgatcgatggcatcgagggcagcagcgtgcaggcgctggtggcgctgatggacgagcagggcatgccgcagtcgctggacatcgcgcgccgcctgcgcgccggtggcatcaacaccgaagtgcagatggagccgaagaagatcggcaagcagttccagtacgccgccaaggccggcatccgcttcgtggtgctggccggtgaggacgagctggcgcgcggcgtggtggcagtgaaggacctgctgcgcgagcagcagttcgaagtctcccgcgacgagctggccagcaccctgcaggtcgagctggagcagtcgaaggtgatgtaa

SEQ ID NO: 504313 - DNA, 888 bp, Stenotrophomonas maltophilia
atgcgggcggcgctgctgatgctcggcagcacgatggccttcggcctgatggcggtggcgattcgttatgccacccgttacgtgccgacccaggaagtggcgttcttccgcaatgccttcggcctgctggcactgctgccgatgctgttgcgcccgggccatgcgccgctgaagacccagcagctgccgcgctatttcgtgcgcagtgcgatcggcctcggttcgatgctgtgcgcgttctgggcgctgggccacctgcctttggcgcaggcggtgtcactctcgtattccacgccgctgttcgtcacgattgccgccgtgctgtggttgggcgagaccgtgcgcgtacggcgctgggctgcagtcgtggtcggcttcatcggcgtgctggtgatcgtgcggcctggtaccgccggcttcaccgcgggcagcctggtggcggtggctgccgccgtgctcagctcactggtggcgatccagatcaagcagctgacccgcgtcgacagcgccgacaccgtggtgctctacacctacgtgttctgggtccccctgtcgctggtgccggccctgttcgtctgggtctggccgaccggcatcgcctggctgtggctgctggccaccggcgtactcggcaccgtcggccagctgttgtggacgcgggcgctgcggctcggcgaagtctcggcactgaccccgatcagcttcctgcagctgccgctggtaacactcttcggctggctattgttcaacgaaagcgtggatcgctggacgctcatcggcgccggcatcatcctcgccgccaacgcctacatcgcccaccgcgaagccgtgttgtcgcgccgcgccgcaagcgcagcggcctctgcagcagccaagcccgccgaatga

SEQ ID NO: 504314 - DNA, 804 bp, Stenotrophomonas maltophilia
atgggagcacccaatcccttcactgatggcctgcggctgccgcgggcatggcaggaagcgttggccgatgcgcacatcgagcggcagtcgatcggcgtgtcgcgcgcggatgtcgcgcgggtgcatcgtcccgggcagaccgacgccttcctgaaatcggaagtgatcgatgccttcagtgaactgggtgatgagatcgcccggctgcgttggctgcaggcgcaggggcagtcggcgccgacggtgattgccacgaccgaggagggcggtcggcgctggttgttgatgagcgcgttgcccggccgcgacttggcctcctcgccggagctcgcgccgagacgggtggcagaactgctggctgacgcactgcgtggcctgcatgccgtgcctgtagccaactgcccgttcgaccagcagttggcatcgcgcctgcaggccgcacaggcacgcgtcgaggcggggctggtcgatgccgatgacttcgacgacgagcggctgggccagagcccgcagcaggttttcgccgagctgcgcgctacccggcccgctcatgaagacctggtggtcagtcatggcgatgcctgcctgcccaacctgatggtgaccgatgggcggttcactggcttcatcgattgtggccggttgggcgtggccgaccgctatcaggacctggccctggccgcgcgcagcctggtccacaatttcggggagagccgctgtgtcgccacgctgttccagcgctacggtgcggtccctgatgagcggcggcttgcattctatcggttgcttgacgagtttttctga

SEQ ID NO: 504315 - DNA, 183 bp, Stenotrophomonas maltophilia
atgggaggcctgaccaaactgacccggctgtcagtggtcagtgcatcccagcacctgcagcagctgcgacggctactaccacagtaccgttgccagctcgacaacatcgcctcgatcattaccgctgaacgcaccaacctgcgtgcgttcgccgactgggacaccgttctggcagtcgattga

SEQ ID NO: 504316 - DNA, 501 bp, Stenotrophomonas maltophilia
atgatggaattcaatttcaccctgaagtaccgcctgccggacgcctacgacgatggcggcatgctggagcagcgacttgtggaatcgggttgcgatgatgcgctgctgggcatcggacgacctggccggatggcgctggcattctgtcgtgaggctgacaatgccggtgccgccctggcgtcggcattgggcgacgtacagcgtgccgtgccgggggccgagctggtcgaagtaagccccgatctggtggggctgaccgatgtggcggacctgttgggggtatcacgccagaacatgcgcaagctgatgctggccaacccgcagtcgtttccttcaccggttcacgaagggacgacgtcgatctggcatctggctgacatcctcgactggctgcaggcgcgcggcagtgggaaagtcacctcggaaatggcggaacttgctacctcggcgttgcagctcaacctggcccgcgaagggcgcaggttgcagccaaaggtgtag

SEQ ID NO: 504317 - DNA, 243 bp, Stenotrophomonas maltophilia
atgtctcgtgtgtgtgaccccgacaaggacattgaagccgcattgcgatttgcggaagcgaggggttggagattgcgggtgggcggcagccatgcgtgggggcggatgtactgcccctacaacgacagcaaatgccggagcggggaattctgcgtcgcgagcatctggagcacgccacgcaacacctgcaatcacgccagagcgctgcgccgtgtggtcgagaactgcagccgtgagcaatga

SEQ ID NO: 504318 - DNA, 1230 bp, Stenotrophomonas maltophilia
atgagcggatcatcgtcgttctcgcgcacacccgccaggctctggccgctgatcgcctgcctgtacgtatcccagggcattcccttcggcctggcgatggaagcattgcccgcctccctgcggcatgccggcacggatctgcaggccttggcctggctgccactcgtgggactgccctgggtgctgaagtggctctgggcgccgtgggtggacaatcattggagcccccgtgccggtcgccgccgcagctggatcctgcccatgcaaggtctggtactggcggcgctgctggcggtcgccctgctgggcctgtcggcgcagacactgccctggatccttggcctggcggtgacggcctcgctggccagcgccacccaggacgtggccaccgatgccctcgtcgcggagcagtttgcgaccgaatccctgcccatggccaatgcgattcaagtggccagcaccatggtgggtttcttctacggcggcccggtctttctcatgctctacgggacgctcggactgtcttgggccatcgttggactggtcctgcccatcgccgcgagcctggtgctcacgctgtcatggtgcgaaccacaggcgcttgaagtggcagcaagaaccagcaaggccagtcagtggcacttcctgcgatcgggccgcaatgcctgggcgctggtcgtcgcggcatgcctgtccgccatcaccgtggtggcatgtcacggtctgggaaagctgttgctggtcgatgcgcaatggccgctggcccgcgttggccaggtcggcatgctggggggcgcgttcacgatcctggtggggtgcggtggcggcgcatggctcgtgcgtcggttcggcgcctggcccgcgttccagttcgggattgccaccgctggcctgtccgccgtgacctgggcctggctcgcaacgcagacgccggccatgcccatgaccgctgtcgtcatggccacggtgctggccagcatcggatcgggttgcgcctcggtggccatcatgaccgccgcgatgaatttctgccggcgacgcacccaggccggcaccgacatgacgatggtgcaaagcgcgcgcgacctcggcgaaacgatggcgtcctcgttcctgatcgccttggccgcgagggtgggctacaaggaagggttcctgctgggcctcgggctggcggtgctgaccatgcttgcgaccgcctggatgatgcgctcgcgtcgtgcgaagtga

SEQ ID NO: 504319 - DNA, 339 bp, Stenotrophomonas maltophilia
gtgaactcgcgtgacgcgctgagcgcgctatggctgctgtccagactgccagcgcaagccctggattggatcgacctgaccggacaagacccggtgtccccctcgtccttcgccgtcggcacggccgcgcaggccagcattaccgcagccgcgctcgccgcccgcgaactgggccacgcgcggggcgcttcgcgccagcgtgtcgcggtggacatgacccacgccgccgccgaatgcaccggctggttcacgctcgacggccaagagcccgaactgtggccgaaacggctgctggcctatgagcaccattcctttgttccaaggagttcatcgacatga

SEQ ID NO: 504320 - DNA, 405 bp, Stenotrophomonas maltophilia
atgagcctcgatcctatagccttcaccattcacgatatccgcgagcttccattagcggtgttcgaccaggctgcggcgcagccgggttatgcgtcccagtgggaggccgaaatggaggtccttttgcagaacggtcagccattcgtcgtggtgtacgacctgctccgcagcgacgaaacccacgaggatcgcaagcatcgtggtgtttggctcaggcacaacaaggagccgctgggccaagtctgcaaggcgctcatcagcataaagccggacgacacgcgccgcgccgaggtcgcagccatgtccgatattgccgtcaaagcccttggtattccacatgaggcggttgccacgcgcgatgaagccctggccgtggcacgtcgattgacgggaagcgaaacctga

SEQ ID NO: 504321 - DNA, 267 bp, Stenotrophomonas maltophilia
atgaagaaggccatcccgttccttctggctgccgtggtgctgacggcctgcggccctgctgactcgccagagaagacggacatacccactgttgaggaactggcatccgattccgtgcgactgaaagaactgcgccagctgtgcaagacggatcgccccaagctaggcgacgtgctttgcaatcgagtcgccgaagccacgcgcaagcgtttctatggcgacggcaatacaccctacaccccgccgaaggaaccgtctaagttctga

SEQ ID NO: 504322 - DNA, 339 bp, Stenotrophomonas maltophilia
atgcgatgcgctcctgtcctgctggccgtgctgctgaccgcgtgcggccagttgtccgacccgcaaagggccgaagacctggccgcgaccttggccgccgatcccgtgcggctcaaggcgcagcgcgcccaatgcgcggccgaccggcaagccgcaggcgaagacacctgccgcgccgccgccgaagccttccggcggcgcttcttcgccggccagaccgggccggacgaataccggacgctggccgaactgccgccgatcccggcgagcttcgacacgcccgaggacgatacgctggaaggcgatgcgccgctcgcggccgcggaggacacgccatga

SEQ ID NO: 504323 - DNA, 705 bp, Stenotrophomonas maltophilia
atgcgattcaagcgaccgcaggtgcgctatgccgacacgccgcagcctgccaccccgtatcaatccgccgcgcaggtgtgggacgaccgcatcggctcggcccgcgtgcaggccaagaactggcgattcatggccttcggctgcctcacgctcgcgctgctgatggccggcggtctggtgtggcgctcggcgcagtccatcgtcacgccctatgtcatcgaagtcgatcagtcggggcaggtgcgcgccgtgggcgaagcggccacgccataccggcccgccgatgcgcagatcgcgcaccacctggcgcgcctcgtgacgctggtgcgctcgctgtccatcgaccccatcgtggtgaggcagaactggctggatgcctacgactacaccaccgacaagggcgcggcggtgctcaacgattacgccagcaagaacgacccattcgcccgcatcggcaaggagtcggtgacggtgcagatcaccagcgttgtccgcgccagcgacacgtctttcaacgtgcgctggacggaacagcggttcatcaacggtgcgcccgctggcaccgagcggtggaacgccgtgctttccactgtcctgcaaaccccgcgcaccgaacagcgcctgcgcaagaacccgctgggtatctacgtcaatggcctgtcgtggagccgcgaactggattcttccgaaggagccaagctatga

SEQ ID NO: 504324 - DNA, 1005 bp, Stenotrophomonas maltophilia
atgaacctgcctttccgcttttacgctttgccgtcgatcctgcttgcatcgactgtcctgttctcgggctgcgcctcgcagggcaagccaccgccttccatctcgctcgatgagctggtgcaggcgcagccgctgccggagccgcccgcgccggtggaagtggtcgccgtgccagagccgctggcactcccggcacagttgaagccgctgcccgaggtggacgcggccccggccgcgccggagccgaccgacgagaaggtgcgcgtgtcccgcgccaatgccgaggcgcgcatcgctccgacccgcgagggttacgtcaatgcgattcaggtgtggcccttcaccgatggcgcgctctatcaggtctatgccgcgccggggcgcgtgaccgtggtttcgctccaacccggtgaggaacttgtcactgtcgcggctggcgataccgtgcgctggatcgtgggcgacacgtccagcggcagcggcgaggcgctgcgcgtcaatgtgctggtcaagcctatccgctcgggcctgaaaaccaatctggtcatcaccaccagccgccggacgtacttgctggagctgacttcgacggaaaaggcgtggatggcctcggtgtcctgggactatccgaaagatcggatgctggctttacagcgccaggcgcaggcggccagcgccgccgcgccggtcgataccggcctgtcgctggagaagatccgcttccgctacgcggtgtcgggcagcaatccgtcgtggaagccgctgcgcgccttcgacgacggcgaaaaggtctatatccagtttccgccgggcatcgcgcaaggcgagctgccgccgctgtttgtgatcgggccggaaggcgacgggcaactggtgaactaccgtttccgctcgccgtactacatcgtggatcggctgttcggcgcggccgaactgcgcttgggcggggatggtggcgacgtggtacgcatcgagcgcaccgatggcgtagcacggaggaactga

SEQ ID NO: 504325 - DNA, 219 bp, Stenotrophomonas maltophilia
atgagcacgaccaagaagctgcggctcgggccgctccccaaaacggagtccacgaagctgaccattttgtgccccgccagcctgaaaagggacttggaccgctacgcatcgctccatacacagacctatggtcaagccgtcgatgcggcgacgctgatcccgcacatgcttgaagcgttcatggccggagaccggggattcaaaagagatcgtatatag

SEQ ID NO: 504326 - DNA, 1176 bp, Stenotrophomonas maltophilia
ttgacaatagctacaggcgcggcggaagtcctgctggttgccaacaaaccgggcctcactgagacagggggcggacacggagctaagggcgttgactttcagcgatggtgggccgttctcaggatgctggaactggagcagtccaatgctccagacttcctgcttcttttcgaggcagttcaggacgtcaccgaactcgattcagtcagcgttccaaccaaggctgccatctaccaagtaaagaagaaggacaatggaacttggtcctggtcgatgctaaccggcatctcagcaccgaagcgaccgaaggctgccaaaaaggttaagagcgctgccagcactcccgccgcaccgaaacctactgccgccccaagcttcgacaaggtcggcgacagcatcctaggtaagctccatctaagcttgacggcgttcgagaagttgccggctgagggtatcttcatctcaaacgctggctgcgacgttccactcgcctccggggcgaatgcagcgacatcgctgccgtgcgctctatcagacttggcgactgaccatgcgcagatcctgaccgacgcgctccacactctgggggctgcgggagctccgattccagacctcaagagggtgcgactagcccgtgtggctattcatcctgacgatccgtcggcgccgacagtgacgaaagcgttggaactgcttacgcaacgcagtcccggacatgctgcacaggctcaagcattcgtagagtcgctcgtcatgaaggtatctgcgttaggtcgccgcacggcgacgtgtgcgacgttcgctgatctggttaaagaacgtggattttcgagggccgagttccactcggcactcagctcacttgcaaccatccctgaccgaaacgcgctctttgagagctggctcacgaagcttcaacaggagggttttgactttagggtgcttacgacgatgcgaatggctgcggctagaactgcggcggaacgactcaccggagcatcgcctgaagccttcgagattgacgcgttctgtgactcctgggcgcaggcaaacgcatgtggaccagatctaaagccctacgtcgatgctgcgctggtcgcgatgaaggctcgtttcgggcagtttagggacgaagagcttttggcgcgctttgtcatgagggcagtgacgatatga

SEQ ID NO: 504327 - DNA, 1629 bp, Stenotrophomonas maltophilia
atgggcaagacgacactgattcggagtctgtttgagaccctaggtgccactccccagggaactctcgagtcatgggataaagatgccgtttcgctcttggaattctcgttcgacgggaagcacttctttgttcttcatcagaacggtcgccgagcgctgttcagtgcagaccgtcagctggttgccacaactagcaagttcgccgaatggacgagagttttctgtgaagttacaaatttcaatttagtattctctggtaagagcgagtcggacgttgttccggcagacgctgcctgtttcttcttgcccttttatgtaaatcaagacggaagctggcagtccgagtggaacactttcactggcctcaagcgcttcgcagcgccatggactgccatcctcgagtacttcaccggcgtttgcccgccggcgtactacgaagcgcgcgcaaagaaagggcagcagtcgcgcgtactcgatgagtaccgtcgagagctaaggttgcttgagcgaacattggaccgtttcagtcgcactgtgccggtgcacgggccgaagctgaacgctgcaaacttcgaggctgaaatcgatcagttgacccgtgagatcaccgacctcaacgctcgccaagagaagctccggagtgatgccgttcgcgagcaggagttgctgaccagcttggaccatcagactcgcttggccgatgaggcgctaaaggcttacaacagtgacgcggcatggattcgaacggcaggaagtgagccgctcatttgccccacttgtcacgcagagcacaaaaagccattcctagatctgttgcagtttgcagaggatgctcgtgtcctacgcgaactagctgcgcgccttcgcgatgacgcggccgttgttcgcgctcggtgccaaaaggcgtttcgcgaactcgctacgctcaacgagagctaccttcggatatctcggctgttggacactagaaagggcgaactcaagttccaagatgtggtcggaggtatcggtgccgagggtgcattcgctgcctttgaagccgaacgaaagcagctccagggtgccattgatgaagctgtcttggccgtcgacaagctggatgagacgatgaaggaactgcgggccatcaagcgtacgaaagcaatccttgccgacttcagagacttttacgccgcaggccggattgcactcaagcttccttccattgacgtatccaagatgaagctcgcggggcggcccgacctttcgggaagcggaggtccacgctccatattggcctactacgcggcgatttggcgcacggcgcacggctctaatgccacatacgatattccagtggtcatcgattcgcccaaccagcaggcgcaagatgacatcaatcttcccgcagtactcgagttcatcgctagggacttgccggacgatatccaacttatcgtaggtcttgagacgacatcagagtttccattcgattatgaactgcacctcgagcgtaagtactcggtcctcatcgaggaagaatgggatattacctacggcacggttgagcccttgctacaagcgatgtacgccaacttgctggcccactcggataaatctacgcctgaaccgcgttcaaccgatgtctga

SEQ ID NO: 504328 - DNA, 474 bp, Stenotrophomonas maltophilia
atgcgcatcaatcgagtaatggccagtgccgtggcctctgtgctggcactgggcgccgtggccccggcattcgccgacaacgaccatcgccgcgaccacgatcgccgcgagtggcgcgaggatcgccgtgagtggcgccaggaccgccgcgactgggagcgcgaccgccgcgaggcccgtcgcgactgggaacgcgaccgccgcgactggcatcgcgaccatgaccgctactaccgcccggcaccgccgcgcgtggtctatcgtccggcctacggcccgggctatggctggaaggtcggccaccgctatcgcgactactaccgcggcccgatctacgtggtgaacgactacccgcgctacaacctgcgtcgcccgccctacgggcaccagtggatccgcgatgaccgcggcaacatgctgctggtcgccatcgctaccggtgtgatcgcccagtacgtgctcagcagccgctga

SEQ ID NO: 504329 - DNA, 1134 bp, Stenotrophomonas maltophilia
atggcgaattccgctgacctgcggcgacgtcgcctgctgcaggcggccgccacgctaccgctgcttggctggtgcagcgcgcaggccgcgcccgcaccgcgctggccggcgtggcaggtactgctcgacagcagcctgagccgcgacggacgcatgatcgatcgcagccaggacgatcagcgcagcacgtccgaaggccagtcctatgccttgttcttcgccctggtcaacaacgaccaggcgctgttcgaccgcatcctgggctggacccaggacaacctcgccgctggtgacatgggcaagcgcctgcccgcctggctgtggggacgcgatgacgccggagcgtggcgggtactggatgacaacccggcctcggactccgatctctggctggcctatgcgctgctggaaggcgcgcggctgtggcgccgtcccgcgctgaacgccatcgccgagggcatgctcgcccaggtgcgggcacgcgagatcgtggacctgcccgggctcggcccgatgctgttgccgggcccacagggattcgtcgaaggggaggccacgcgggtcaaccccagttatctgccactgccgctgctgcgccgctttgcggtggaggatcgcggcgggccgtggcaggcactggcgcgcaacagcgtgcagctgttgcagcagagcagcccgcacgggttcgcaccggactgggcggcgtggaaaggcgatcgcttcgtcgtcgatccggtgcgcggtgcggtcggcggctacgatgcgatccgctgctacacctgggcaggcatgaccgcgccgcgcgatccgttgttccgcacgcagctggcggccctgtccgggccgctgcagcgcctgcgcagtggtgcgccgatgtgggaaaagatcgacacccgcagtggccaggggcagggcgaaggcaactacggattccgtgcggccctgctaccgtatctgatcgcgcagggcgacacggagcacgcgcagtcgctgcgggccagcctgcccagtgccgaacagcagcgtgctgatgcaccggcctattactcgcagatgctggccctgttcggcttgggctgggctgaaggacgctggcgtttcgccgccgacggccgcctgcagccgcgctggtag

SEQ ID NO: 504330 - DNA, 3582 bp, Stenotrophomonas maltophilia
atggcacgcactcggcatccgctggtcaccgcatccggcctggtcctgttgggactggccggtgccgggccctgcgcggcgcagaccttgtccgatacaccgggcggaaccatcgccgagcagcgccagtggttgctgcagcaggtgcgcatcggtgaggccaccggtcgccagagcctgatcgaagacgcgctggcgcggctgcgcatgctggcaccggatgatcgcggcacgctggtggcgatcctggaagtgcagttgtcgcagcagaagctgcaggatgccgaggcgaccctgaagcgcctgcgcgagatcggcgcgggtacccgtgaactggccgccggcgaacgcctctggcaggcctaccgtggtgacctgcagcaggacctgcagcaggcgcgtctgttcgctgccggtggtcgcagcgccgaagcgctggcgatctaccggcgcctgttcaacgatgacccgcccggcctgcagctgggcctggagtactggcgcctgcgcggcgcccaggcggatgggcgtacacaggcgatccgtgcgctgagcgaactgaaccgcagctatccgggcaatgtgccgttgctgcaggcgctgtcgcagatgctgttcgcggccggccgcgatgccgaggcgctggccgtgctgcagcgcatggggcgcaatccggaagcgcgcggcatggcggcggacgccgagtgggcctacctgaaggatcagccggccgatgaccgcagcgtacgcaggctgcaggacttcatcacccgcaacccgacgttcgccgacatcgcgttggtgcgcgaccgctacaccgaccagcacaagcgggtcagcgacccggcgtggcgcgccggtctgcgtggtcagcagttgctcgatgcaggccgcaatgaagaggccgagcgcgccttcctgcgggccctgcgcgattatcctcgcgagcccgacctgctgggggggctgggcatggcgctgatgcgccagggccgccgcgagcaggccatcaactatttccagcgtgcggtgcaggccaccccggccggtgacagcaacgacaagtggcgtgacctgatcgccagcacccgctactggctgcagctggaccaggccgacgcggcgctggcggccggccggctggacgaagccgagcgcctgtatgcgcaggcgcgccgccagcagccccgcgacgtcaatgctgcactgggcctggtcgacgtggccgtggcccgtggtgatgacgccgcggccgaacgccagttgcaggttgcccggcggatggcgcccaacgatgccaacgtgatccgcaagctggtgcagctgtacggccgcaccgacccgcagcggctggaagccttcatcaacgcattgcccgctgcccagcgcaggttgtatgccgaagacctgcgccagttgcagatcagtcgcttgcgtgagcgtcgcgagcaggcgctggctgccggggatgcaggcactgcgatcacgctgggacagcagctgcgcggcgaactgccgggcgatgcatggctggcctatgcgctgggcaacgagctgcgcgccgccggccggcaggacgaagccgacgcggtggtggccgacatggccacgcacaacgacagtgccgaagcgcgctacgcgcaggcgctctatctgtcgggatccgatcggctgccgcaggcgctggcggtgctcgatgcgctgccgcaggcgcagtgggacgatgacatccgcgcgctgtcggcgcgcctgcagcggcagcagctggtcgatcatctgtgggatctgcgtgcgcagggcagggaggccgaagccatcgcgctgctgcagcagcaaccgcccagcaccgacaacgatctgctgatggccgaatgggcgcgcctgcgcggcgaccacgcgcaggcgctgcactactaccagcgcgtgcttgctgcacagccggacaacgtggatgcgcagctgggccaggtacaggcctggattggcaccggcgatctggccagcgcgcgccgccagatgcacgacgcaccgccaacagtggacgatgccgagatcggccagcagcgccagctcgccacgatctggaccgacctgcgcgaggacacgaaggcgttggcgatcctgcgcgcgttgctggcgcgcaagaccgggcccgacgcacagtcctggcgtgatgctgcacggctggtgcgccgcgatgatccacagcaggcgctggacatgtatgcgcatgcgatggccgacaacggcctgttggcccccagccaggccgcgccacgcgacaaccgcgcgctgaccctggccagccgcgagacggccggcgatgactggttgcggcgcagcctgcgcagcgacgtggagaccctgtaccagcaggagaatcccaccctgacggtgatgcaggacaccgggcgccgtagcgacggaaccccgggtatttcgcggctgtcgcgcgatacccgcatcgcgcatctcgacgcgccgttcgccggtggcctgggctgggcgcgcatcgagcaggtgagcttcgatgccggccgcttccagaccgacgggaacggggcctacgacgaggatttcggtagctgcgacctggatctgctgcaggccgacaacagccgcctgcgcgcaccgggttgcacccgtttcgtgcaccagcggcgcacctccggcgccggcttcgccgtgggctggcgcaccttggatgaccgctggaacttcgatatcggccacaccccgtccaactacgtggtcggcaactggcttggcggtgtcaccctcaatggtgacctcgggcgcttcggctggggcgccacggtgtcgcggcggccaatgaccaattcgctgctgtcgcaggccggtgcggttgatccgcgcagtggcatcagctggggcggcgtcaccgccaacggcgtgaccttcagcctcggctacgaccagggtggccgcgatggcgtgtggtcgaactggagctggcatcggctgaccggccacaacgtggtcgacaatacccgtgcacgcgcgatggtgggctggtaccacaagctgatccagcgccccgacatgcggctggatgtgggcaccaccgcgatgtactggcgctaccagaaggacctgggcggttactcgctgggccagggcggctactacagcccgcagcgctatgcgtcgctgagcctgccggtcagcttcgcctggcgcaacgacgtgtggtcggtgcgcctggatggctcggtaagtgtgtccagtgcgcgtacctcgtcgatcagccgtttccccgaccaggcattgatcgagcgcgtgatcgcacagctcgagccgcagtatggccccctgcagctggacgaggccggcctgtacaccggcgacagcagcagcaccggcaccggctaccgcttgtatggtgcggtcgagcgccgcctgggcgaccacttcgtgctgggtgccgccggcactctgcagcgcagccgcgatttctcgccgaattcgttccagctctacctgcgctataccttcaaaccgtggcagggaaacctaccattgcccgtatcgccactggtgccgtatggcgaattccgctga

SEQ ID NO: 504331 - DNA, 2364 bp, Stenotrophomonas maltophilia
atgacccttccgtcctctctgcgttggctgctgctgcccctgctggccctgcccgtggcgtcaggcaacagcgcgcctgctccggcaccggtcgcccctcccaccacagcgcctgccgcgccgccggtgccgagcgtgccggccgcacccgccaccactcccgccgccggtaccgagcccgcgctggcgcagacctggacgggcagcgcctggccctggcagcggcagaacacgttcgcgcagctggggcggcgccaggacacgctgctgtcgggggtgcgcaatgccaccaccttcgagttccaggtccgccgtgaccgcctggtccgcgatgcggaactggatctgagcttcacgccgtcaccgtcgctgctgccgaccctgtcgcacctgcgggtctacctcaacgacgcgatgatgggcgtggtgccgatcagcaacgaccagctgggccgcccggtgcaggccaagctgccgctggacgcgcgcctgattgctgatttcaaccaggtccgcctggagttcgtcggccactacaccgacatctgcgaagagccgacgcacagctcgctgtgggtcaacctgtccagcaacagcacgctgcgcctgggtggccagccgctggcgatgcaggacgacctggccaacttcccgctgccgttcttcgatccgcgcgataccgcacggctggaactgccggtggtgttcgccgccgcaccgagcctggcgcagcagcgcgcggcggcggtgatgtcctcgtacttcggcagcctgtccggctggtggcgccaggcgcgcttcccggtcagcttcggcacgctgccggacaagggccacgcggtggtgctggcggtcaacggcaggttcccgccggtgatcgccaaccatgccccggtgaagggcccgatgatcgaactgatgtcgctgccggaggatccgcagcgcaagctgctgctggtgctgggccgcaacgatgacgacctgcagaaggcggtggccgcgatggcggccggcaacgtgctgttccgcggccgccaggtcagcgtcgacgagatcaagccactggccccgcgcaagccgtacgacgcgccgaactgggtacgtaccgaccgcgccgtccgcctggccgaactgctcgactacccgcagcagctgcacgccaacggcgtgtcgccgcagccgatcacggtcaacctcaacctgccgccggacctgttcatctggcgcaaccagggcattccgctgaacctgcgctaccgctacacgccaccgttcggcagcgatgagtcgcggctgggcgtggcgatcaacgaccagttcatctccagcttcccgctggtgcgccgcaacggcaagcagggcctggaggaaatccgcctgccggtgctggccggcgatgccggtgccgacgacgggcgtctgctgattccggcgctcaagctgggcgaccgcaaccagctgcgcttcgatttcaacttcgccagcgtgatgggcagtgcgcagcgcgaccactgccagaccgtgctgccgcccaacctgcaggcagcgatcgaagaagactcgaccatcgacttctccgggttccatcactacatgggcctgccggacctgtccgcgttcgcactcagcggtttcccgttcacccgcatggccgatctgtccgagaccgtcgtgctggtgccgcccagcgccagcgaagcacaggtcagcctgctgctgaacctgatcggcgggctgggcgtgcagagtggctacccggcctatgggctgcgcctgtccgatgactggaagcaggccagcgcactggatgcggacctgctgatgctgggcgccttgccggcggagctgcgcggcagccagcagctgtcgctgctgatcgacgaccagcgcacgcggctgctcaacggccagtcgccgtcgccgcagcaggcgatggaacaggcccgccgtggcagccgcgatggcgacccggcggtgaccgaagtagcagtgagcgcgcaggcaccgtttgccgcgatcatcggcatgcagtcgccgaagcatgcgcagcgcagcatcgtttcgctggccgccagcaatgccgccgactacggcctgctcgacgaagcgctcagcgataccggcaagcgcgaagccatcgcaggttcggtggcgatcctgcgtacctcgggcatccacagccagttcgtcggcgatcactactacgttggcgcgctgccgtggtggctgctgctgtggtaccacctggccgaccacccggcactgctggcggtgctggcgacgctggtggtgctgatggtcgccttcctgctgtggcgcacgctgcgctgggtcgcggccaagcgcctggacccggggcattga

SEQ ID NO: 504332 - DNA, 2625 bp, Stenotrophomonas maltophilia
atgggtgcccgcgtctattacctggactggggacgcctgcgtgagcgggtgcatgcgtcctggccgacgcgggcaatgctgtggctgctgcaatgcgtgggctgggcgttcctgcgcctggaagggccggcgtggcaggcacaggccccgcgcctgcgctacgccttcccgcagatacagggcgaccgtcgctggcgcccaggtgatcccctgcgattgctgatccaggccatgtggctatcggtggtgcggttggtaccgcagccctcgctgaggcggcaacggttggcccaggcccggcgcgaacgcattgccgaactgcgtggtgcggccggtcgtggccgcctgcgctatctgcgcgcgatgcgcgatgcgcccagtgaattctggaacagccgcgtggcggcctggttcggccgtaagatgggcagcctgtcgccacgttcgcggcacctgctgaccctgctggtcgggttggccacgctggggctggcggcgctgtgcatcacccagccgttcacctatctcgcacagttcgtgttcgttgcactgctgtgggccatcgcgctgctggtgcggcgcatgcaggggcgctatgcgacgctggtgctggtcgtgctgtcgatcaccgtgtcctgccgctacctgtggtggcgctacaccgccacgctgaactggaacagtaccttcgacctggtctgtggcgtggtgctgctggcggcggaaacctattcgtggctggtgctgatgctgggctacgtgcaggtggcctggccgctgcgtcgccgcccggcgccgttgccggccgacatccgccagtggccgacggtggatgtgctgattcccacctacaacgaagacctggcgctggtgcggcacaccgtgtacgcagcaatgggcctggactggccggccgacaagctgcgcatccatatcctcgatgatggcaagcgcgaagaattccgcgcattcgccgagcgtgccggggtcaactacatcacccgctcgaacaaccatcacgccaaggccggcaatctcaaccatgcgttgaccctgatcgatggtgagctggtggccatcttcgacagcgaccacctgccggtgcgttcgttcctgcagatcacctgcggctggttcctgcgcgacccgaaactggcgctggtgcagaccccgcaccacttcttctcggccgatccgttcgaacgcaacctgcaggtgttccgcagcgaccccaacgaaggcgagctgttctacggcctggtgcaggacggcaacgacctgtggaacgcggcgttcttctgcggttcctgcgcggtactgcggcgcgaggccatcgatgccatcggcgggtttgccaccgagaccgtcaccgaagatgcgcacaccgcgctgcgcctgcatcgcaagggctggaactcggcctacctgcgcattccgcaggcggccggcctggccaccgacagcctcggcgcgcacgtcaaccagcgcatccgctgggcacgcggcatggtgcagatcttccgcatcgacaacccgctgctgggcaagggcctgagcctgttccagcgattctgctacgccaatgcgatgctgcatttcctggccggtattccgcgcctggtgttccttaccgcgccgctggcgttcctgctgctgcacgtctacatcatctatgcgccggcgctggccatcctgctgttcgtggtgccgcacatggcccacgccagccttaccaacgcacgcatccagggcaagtaccggcgcccgttctggggcgaggtgtacgaaacggtgctggcctggtacatcgcacggcccaccaccgtggcactgttcagcccgggccgcggcaagttcaacgtcaccgacaagggcggcacccaggccggcgatcgattcgactggcgcgtggcgcagccctacctggtgctggcgctgctgaacgtgctcggcctgtgctttgccgtgtggcgcttcatgcacgggccgctcgatgaacgcggcacggtggtcgtcagttcgctgtgggtgctgtacaacctgctgatcatcggcggtgcgctggcggtggccgctgaagtgcagcaggtgcggcgcacgcaccgcgtcaccacccacctgccgatggcgctgcaggtgcccgatggccgccgcctgcgcggcgtgctgcaggactactccaacgatggcgtaggcgttgaactcggcgaagacgcacagctggccgaaggccagcgcgtgcaggtgctgctggggcggggccgccgcgagttcgcgttcccggcgcgggtgcagcgcacggtcggccagcgactgggcctgctgctgttgttcgaggacgaacgccagcgcgtgcagttcgcccagtgcaccttcgcccgcgccgatgcctggctcgactggcacgccggttaccaacccaagagcctgccgcgcagcctgtggagcgtgctggtcctgggctggcgcggctatcggcggatgggtgatttcgcaccgttcgaccttgaccgcccggcacactggaaccgtcgcctgctgcgatggctggccagctttgctccgcaacgtccgcttccttcacacccggctgacccagccgctgacccagggcttcgtccatga

SEQ ID NO: 504333 - DNA, 756 bp, Stenotrophomonas maltophilia
atgagcaccgtgttgtcgctgcagggcatccatggcggaaccggcgtcactacggtgcttgccgcgttgggccagggcctgcacgcccagggccagcgtgtgctgctggtcgaatgcagcccggaccagatgctcggcctgcacctgggcctgccggccgatgtcgacaacggctgggcgcgcgcgcagctggacggcacggattggcgcgatgctgcctatgccatcgcagcggggctggcggtgctgccctacggtcgtgtcgatgccggggccgcgatgcgcatcgaacagcagctgcagcaggcgccggccacctgggccgaacgcattccgctgctggagacccagttcgactggatcctgttcgacctgccgcagcgcctgccggcgcacgctgcggccatcaaccagcacgcgcgctgcacgctgccgctgcgcctggcctgtgtcgatccggtcagccatgtgttcctgcaacgccagccggatgacacccgcctgctgctggccaaccgctatgacccggtcattccggtgcagcgcgatctgatgcagctgtggctgcacgcgcacggggcgcggctggtgccgcagccgctgcacgaggatgcgcgggtgccgtccgcattggccagcaagcagccactgggccgctatgcgaccgattcgctggctgctgccgatgtggatggcttggtgctgtggtgcctggcggaggccacacggcgccaggccgcggcgagaggacgctga

SEQ ID NO: 504334 - DNA, 180 bp, Stenotrophomonas maltophilia
atgcctgccgacattcttgccgtgccggtcacgctgtccgtggaagaggacgacatcgacctgctgcgccgcagcctggacatgccggggttgccctacgtggacttctcggcccagcaggaacgtgcacgggcgctggcgcgctggccgttgctggctgaactggagccacgccgatga

SEQ ID NO: 504335 - DNA, 1632 bp, Stenotrophomonas maltophilia
atgagtccgcagatggcacccgcatctcccttcgcctgggccgacctgcgcggctggaacctgtatttcctgtccaaggtggtactggcctggatgggcgcgctggatctgaagatcctgcccaacctgctgttccttggcgcactgctgattccactgcgctggcgctgggcacgcatcgcgcgcaccatcgtcgcgataccggtgggcgtggccctgtactaccaggacacctggtggccgccgttccggcgcctgttggtgcagcctggcgtgctggacttctcggcggactactggctcgagctggcccagcgcttcatcaactggcagatggtggcggtgctggcgatgctggtgctggcctacgtactgctcaagccgtggctgcgcatcaccaccctgagcgtgctgggcatgcttggcctggccgtgatggcgataccggtgccggcgggctggaactgggggcagggtagcgccaccgcggccaccgccagcgccgcaggcacctcgggtggcggcctgccgccggccaacaacgagacgctcaatgcatggctggccagcttctaccagcagcaggccagcctcaagaccagcttcccggcaccgggcagcggcgcgccgttcgacgtcatcatcctcaacatctgctcgctggcatggagcgatctggatgaagtggggctgcgccagaacaacctgctcgaccacatggacgtggtattcgacgacttcaactcggcaaccgcctacagcggcccggcggcgatccgcctgctgcgcgccagctgtggccagacctcgcataccgggctgttcgatccggtgccggccgagtgccagctgttctcgaacctgcagcgtctgggcttccagagcgagctggcgatgaaccacgacggtcacttcgacgacttcatcggcgaactgcaccagtacggcgggctgcaggcacagccgatggatatcagcgcgtttcctaaagcgctggtggccttcgacaagtcgccgttgcgccgcgatggcgatgtgctgatggcgtggtggaaacagcggctggccgggtccagccagcaggtggcgctgttctacaacacgatctcgctgcacgatgggaaccgcatcgtcggtgccgatggccgttcgaatgccgccgactacaaggcgcgtgcggaaatggtgctgggcgacatggccggtttcgtcgatgcggtggagaagagtggtcgccgcgcgatgatcgtggtggtgcccgagcatggcgcggccctgcatggcgaccgcatgcagattccgggcatgcgtgagattcccagcccgtcgatcacccacgtgccggtgggcgtgaagctgatcggcatgggcgcgccggcggccggcggcccacgtcatgtccccgagccgagcagctacctggcggtgtccgagctggtgtcgcgcgtgtacgcgctcaatgcccagtcgccgccgagcgagcgcaactgggacagcctgctgaaggggttgccgcagacaccgtcggtatcggagaacgaaggcgccaaggtcatcgagtacgccggcaagccctggctgcagctgcagggcagccagacctggagcccctacccggaggaggcgcgctga

SEQ ID NO: 504336 - DNA, 180 bp, Stenotrophomonas maltophilia
atgaccaccgaccagcaactctggaccctgatcgtcgcctgcgcgctggtgatgattccctttggagccatgctcggcacgctgtggcgcgggctgcgccgccgtgtcgcgcgctggctgccaccccgccatctgcgccgcgccggtgtacgccagcgtgcgccgcggagggctgcatga

SEQ ID NO: 504337 - DNA, 1554 bp, Stenotrophomonas maltophilia
atgaaaggatccggcgtgcctgcgacccaccttgccattgccggattgcccgccgagttcgtcgagatgcgcagcggaggcctgtactgggtggtggctgccggcagcgcgccgacggacctgctcggcgccggcgtgctggccacggccgaggcactggacgaggccgtgctggtcacgctggggcggggggccgaatcgatgctggcgctgctgcctgccgaccaggggccggcccgcctgcggctgttccagcgctcgcaccacggcatgcagcaggcgttgcgcgggctgaccggcgatctgccgcgcaccgcctcggcgcgcacccggctcagcctggtgcagttcccggtggcggcgctggacggctgggatgatgcccggctggcgcgctggtgccagcagctgcaggaatgggccggacaggcgcagcaggtgctgctgttgctgtgccacggcgaagtggcgaccctggccccgcgcctgttgtcactgagccggaactgcgccggtgtggcccagctgcatccgcatcgtggcgctctgcagctgctgctgcattactggtccaacagccatggcgtggtggcccagcgatcattcggcgtcgagcaggaaagccgcgggctgcgccacctggccgaggccgatgccgccgacactgggatcgatgcgaccagtggcagcgaccgcgatgtcttcctggcccaggccgaagtactggaaggtgcgccgccgttgtcggcggcctggcgcctgtatgacggttgggccggattgctgccggccgcgctgcaggcgcgcgagaccaccgtggtgctggccatcgacgagaatgccaaggtggatgcactggcccgcctgctgcaccgcctgcgccgcgaacgtggcaatgcgctgaagctggtggtgcgcgagctgcagccctgcctgcgctacgccgatgagcggctgctgatgcagtgcggttgcagcctggtggtgccgtcagcgacgcctttgccgcgactgctgaccctgctggaaaccgtgcagcggcagcgttggcagggccagctggcggaagaaccagagccgctgatccgttcgcatcgaccgccatcggtgagtggcctggtcaacgccgcacgcttccgccagatcgcaggtgatcgcatcgaccaggacggtagtgcggtggaaagcgccgtgctggcgctgcagccggtggccggcctgcgtgccgagcagaccctgcagcagctgcgcatccgccgccagggcgatctggcctgtgtctaccgcgggcaggtacgcctgttcctgtttggttgccggcgtgatgcggtcgagcaggccctgggcaatctgttccgcctgccctggcgcgagctgttcgatggctaccagcgcttggccgagtacgacattgcagcgatgaacgcccacggcagcgatccggaggccgaggtactgcccgaagcacctgcggccctgccggctgtggccccggcgctcgaggcgcctgttttcaccgccccgaagccgctgcggctgggagatcgcgcatga

SEQ ID NO: 504338 - DNA, 1038 bp, Stenotrophomonas maltophilia
atgccgatgatttcttcccgtggtcgcaaagtgctggccgcaatggcactgctgggcagtgtgttgatggcgcagcaggccagcgcggcctgccgcatccagatcaacggtttcgttgcccaggatgtgcagatggacatgggccagatcgtgattctgcccagcaccccggtggggggcgtgatcaaggaaatcagcgtgccgatcaaccagcagaacagcgtcgcccgctgcgactattggtatggcggcagctcgaccggcgagtatgtcaatgccccgcagaagcggccagtggccggctttgccaacgtctacgagaccggtgttgcaggcgtgggtatccgactgttccgcgactccggcgcgatccagacgtactacccgcattccatcaacttcggtgccaactccaccatctcgctgatcggtggccagttccgcatccagctgatcaagaccgccgcgcagaccggttcgggggtgatcgcacccaatggccgcttcactacctattacttcgatggggatggtcccagccgcccggtactgacctcgaccttcaggggctcgggcaccaccgtggtcagcccgacctgcgaagtgcaggccggcagccgcaacatcgcggtcgatttcggcagcgtggccaacaccaccttcaccggcgtcggctcgcgcgcggtcgaccgtgacttcgagatccgcctgaactgccagggcagcaacgtggccgcctaccagagcaagatcggcatccgcctggatgccgatcaggacagctcgaacatgcccggcgtgctgaagctgagcgcagccaccaacagcgccacccgcatcggcatccagatggtccagcgcgacggcagcaccgaacgcgaggtgcgcttcggccagaccatcagtgtcggcacgaccactaccggtaccagtgtcatgagcctgccgctgcgggcccgctatgtgcagacccaggccggcaccgtcggtgccggcaccgccaacgggcaggcgacgttcacgatccagtacgagtag

SEQ ID NO: 504339 - DNA, 729 bp, Stenotrophomonas maltophilia
atgaaagcattctttccccgggcgctgctgctggcagcgttcgcgctgcccttctgccaggacgcactggccggcgtggtggtcaatggcacgcgggtgatctatccggcgcaggcacgcgaagtcaccgtgcaggtcgacaacgttggcgaatcgcccgccctggtccaggcctggatcgacagtggcgacgccaaccagaccgccgataccagcgacgccccgttcgtactgacgccgccgatcgcgcgcgtcgaaccgggccgcagccaggcgctgcgcctgatcttctccggtgcgcagctgccgaccgaccgcgagtcggtgttctggctcaacgtgctggacgtgccgccgtcgccggacaacgccgacagtggcgaccagaactacctgcaggtcgcgttccgttcgcgcctgaagcttttctaccggccgcaggggctgaagggcgtcgccaacgacgcaccggcagcactgcactggacgctcgccggcgatcgcctgcgggtggaaaacccgagtcccttccacgtcaccctggctgaagtgcacgccgtgaccggcggcaccgaaaaggccgtcgaggacaagggcgcaatggttgcaccgaagcagagcctggagtttgccgcaccggcgggcaccagccaggtccgcttcatcaccatcaacgactacggcggccgggtggaacacacgatccgcctcggcagcaccgggggctga

SEQ ID NO: 504340 - DNA, 1068 bp, Stenotrophomonas maltophilia
gtgctggagcagttggaactgtccgctgcactgcgctacgacaagtatgaaagcggtgaaggcaaggccacgccgaagctgggcgtgaagtggacgccggccgactggatcgccttgcgcgccagctacgccgaaggcttccgtgcaccgaacccggccgagaacggagacggtggcctggccgccttctccacggcctcggatccgatccgttgcccggacggtgaaaatccggccccgggtgcttcgccggacgactgcggctcgcagtcggttgcgatcatcacccgtccgaacaaggacctgaagccggaagagtctaagagctactcggtgggcatcgtattgcagcccaccagctccacctcgctgaccgtcgatgcctgggaaatcaagcgcaccaacgagatcgcccagggcgataccgatgacgcgatccgtgccggcaatgtcctgcgcgacaacaacctgctcaacggcgtcgcaggcaccggcagcatcctggccgtcaataccgcctacatcaacgccagctcctcgcgcgttcgcggcatcgacaccgacatccgccagaccttcgacatcggcccgggccagctggagatggatctgcagtggagccacctgctgaaattcgagcgcaccagcggtggcagcaccgatgacttcctgggcacgcacggcaactgcgacgtgaccaactgcatcggtacgccgaaggatcgcatcaacttcggtaccacttggaaacagggtccttggagcgtgagcggcgttgccaattacatctccagcatggacaacaccgacaagcgtggcggcaagtaccagttcttctacttcgacggcacgccggtgaagaagatctcctcgttcaccaccttcgatctgtccggccgttgggctgttaccgacgagttcgagctgagcgcttcggtcgaaaacgtgttcgatcgcatcgctccgcttgatccgctgacctatggcggcgtgaactacaacccgatgcacttcagcggcgccatcggtcgttacttcactgtcggcgccaagtacaccttcaagtaa

SEQ ID NO: 504341 - DNA, 1251 bp, Stenotrophomonas maltophilia
atgagcggatcaccatcgttctcgcgcacgcccgccaggctctggcctctgatcgcctgcctgtacgtatcccagggcattccttttggcctggcgatggaagccatgcccgcctccctgcggcatgccggcacggacctgcaggccttggcgtggctgccactcgtgggactgccctgggtgctgaaatggctctgggcgccgtgggtggacaatcattggagcccacgcaccggtcgccgccgcagttggatcctgcccatgcaaggtctggtactggcggcgctgcttgcggtcgcactgctgggcctgtcggcgcagacgctgccctggatcctaggcttggcggtgaccgcctcgctggccagcgccacccaggatgtggccacggatgccctcgtcgcggagcagttcgcgaccgaatccctgcccatggccaatgcgattcaagtggccagcaccatggtgggtttcttctacggcggtccggtctttctcatgctctacgggacgctcggattgacttgggccatcgttggattggtcctgcccatcgccgcgagccttgtgctcacgctgtcatggcgcgaaccacaggcgcttgaagtggcagcaagaaccagcaaggccagtcaatggcacttcctgcgatcgggccgcaatgcatgggtgctggtcgtcgcggcatgtctgtccgccatcaccgtggtggcatgtcacggtctgggcaagctgttgctggtcgatgcgcaatggccgctggcccgcgttggccaggtcggcatgctggggggcgcgttcacgatcctggtggggtgcggtggcggcgcatggctcgtgcgtcggttcggggcctggcccgcgttccagttcgggattgccagcgctggcctgtcggccgtgacctgggcctggctcgcaacgcagacgccggccatgcccatgaccgctgtcgtcatggccacggtgctggccagcatcggatcgggttgcgcctcggtggcgatcatgaccgccgcgatgaatttctgccggcgacgcacccaggccggcaccgacatgacgatggtacaaagcgcgcgcgacctcggcgaaacgatggcgtcctcgttcctgatcgctttggccgcgagggtgggctacaaagaagggttcctgctgggcctcgggctggcggtgctgaccatgcttgcgaccgcctggatgatgcgctcgcgtcgtgcgaggcgatcccccgccccgggatcgtga

SEQ ID NO: 504342 - DNA, 1377 bp, Stenotrophomonas maltophilia
atgtactcgcgtgacgcgctgagcgcgctatggccgctgtccggactgccatcgcaagccctggattggatcgacttgaccggacaagacccggtgtccccctcgtccttcgccgtcggcaccgccgcgcaggccagcattgccgcggccgcgctcgccgcctgcgaactgggccatgagcggggtgctccgcgccagcgggtcgccgtggacatggcccacgccgccgccgaatgcaccggctggttcacgctcgacggccatgagcccgagctgtgggacccgttcgccggcctgtaccgctgcgccgatggctatgtgcgcgtccataccaatttccggcaccaccgcgacggcgcattgcgtctgctgaacctggatccggcaaccgccacacgcgccaacgccgagcaggccctgctgggctggaacgcgctggacttcgagcaggccgcggccgaccacgcgctggtggccacggcgctgcgcagcttcgccgagtgggatgccacgccccagggccaagccctggccgcgcaaccactgatgacaatcacccggatcggtgacgcgccgccgcgctcgctgcctgccctggcggcggacggcctgccgctcgccggcctgcgcgtgctcgacctcacgcgcatcctggccggccccgtcggtgggcgggcgatggcctcgttcggcgcggacgtgatgctggccaattcaccgagcctgcctaacatcgccgccatcgccgagaccagtcgcggcaagcgctcggcgcacatcgacctgcgcaccgagatcggtcgcgaggcgctgtggcggctcgtggaagacgcccacgtgttctcgaagggctaccggcccggcggcctggccgcgctcggcttctcgcccgaggccttggctgcacgccggcccggcatcgtcgccgtgtcgctgaccgcctacggcccgcaagggccctgggccgaccggcgcggtttcgattcgctggtgcagacggcgatgggtttcaaccacgccgaaggcgaagcggcgggcgatggcaaaccgcgcgcgctgccgatgcagatcctcgaccaggccagcggtttcctgatggctttcggcgccgccgcggcgctgtggcgacaacaacgcgaagggggaagctggcacgttcaggtgtcgctggcgcagaccgggcactggctgcgcgggctggggcgcatcgaggacggcctgcgggccggcaggccagacctcggccgcttgctcgccgacgaaatctccggcttcggccagttgcgcgccgtgcgccccagcgcgcaactggcgcgaacaccggccggctattcgcgaccgtcggtgccgccgggcaccgacgcgccgtactggtga

SEQ ID NO: 504343 - DNA, 375 bp, Stenotrophomonas maltophilia
atggcagcctttctgcgcgaggcgctgcgcgtcgccgccatggatctcgaaggcacggcacgggacgctggtccggttttcttcgaccgagggctgatcgacgccgctgcagcgcttcaacgactctgcggcgtaccgttggcgcaaagcctgggtgaatcccgcccttatgggcggctcgtgttcctcgcgccgccctggccggacatctattgcgccgacgaggcgcggcggcacggctttcccgaggctcaggcggagtacgcccatctggatgccacctaccaggcactcggctacgaagtcagggtgcttccgcgtgccagcgtgaccgagcgggccgacttcgttctcgaagcgattcgtcgcggctga

SEQ ID NO: 504344 - DNA, 438 bp, Stenotrophomonas maltophilia
atggactctcgcgctgttcctcatgccgctcgcactcgcccagcatggattgctacggccatcgccattctggcgttggccactcgcgccgccgctgcggaagtctgggtcgttaccgactcgcatcatccggtccttggccaggctgaccgacacgtcatcctggacgcgggcgcggcgctcgaagcggaactggccgccaacctgcccaccgatcaagaacgtgccagcgccatcgtccggcaacgcctgaagcagggcggtacagaattgcagcgaaggatcggcaccgcctaccagggcattgccgatgcctggagccttggcgtcaccaaggttcccgccatcgtggtggatcgccgatacgtggcctatggcgagacggacgtggcccgtgcggttgcccgcatcgaccaataccggaggacgcagccgtga

SEQ ID NO: 504345 - DNA, 951 bp, Stenotrophomonas maltophilia
gtgacgaggcgtctgtccgcgccatcccgacgccagcggttggccatcgcagcgctgctgctggggtgttccgcatcgtccttagcactgaacaccgccaccatcgttgcctccaccctgtcgccggattgcctggagtaccgcgtcaccggcatctgctactggctctattgcacctggacgggctgcaccgtgcgcacctcggtcaaggtgcgccactacatccccgatgccgtggtgtcgagctactcgaacaccggcgagaacccctgggtcgaggtgcgggcgatgagcctgccgaacccgaccgcgaaggccggcggcgacggcaccaccaacgaggatcacgagaacaacctggcgaagttcaagaacgccgacgtcatcggccatcccggtggccatgtgttcagccagttcgccagcgcctccggctacacctgcgaaggcgccggcaccgccttcatgccctacctgctgagcacgctcgacacgctggcatggcgctacaacatccccgaggcgctgtacccggaagcactgattcccggccggcgcgagatcggcacgcgcacggccatgaatctctggggcaacgtctatccgcgcggcggcttcttgcaccaggtggatgaccacaaggccgcggccgtagttgcccagcgcgcgggtgacatcgtgacacgccgcaaccagattcacgtgtaccagcccttgctcgccagttcgcgcgatggctactggccggccgctgccctgatggaaaccgatgccgccacgggcaagtggcaggagctgacccccacgctgtccagcagttgcgcggtattcccccacggcaatgccaaggcgcaggcccggcaaggcgactacgcctgggcattgtggcgtccctatagctgctgccagcgccgcggccaggtgttcctcggcagcgtcgatttcctgtga

SEQ ID NO: 504346 - DNA, 1398 bp, Stenotrophomonas maltophilia
atgacgactccatcgccgaacgcccgtcgatttctttgcgtcgcattggccgttgtcgcagcgctgagctactccagcgccggggcgcagaccagcgtcaacgagtacggcgtccagcatcaaggcagcgtgatcggcgacgacgtgctctacagcattgggggcggccgcgcggtgtccatgagcggtgcggccaacatgcactccatcggcgttggcgtcggttggaacagcaacctgatctgtggcgacatgagcatcaccaccacgctgcagaaccagttgaacggcatcaccaacggcttccaggccatcatgtcctcggtgatccagaacgccaccgctgccgtggcgtcgctgcccgcgttgatcatccagcgcgccgatccagggctgtacaacctgttgaccaatggggtgctgcaagccaggttggatttcgatcgcagcaagctgacctgccgtgccatcgccaaccgcatggccgacatggcgggtggacagctcggctgggaccagctcgccgaaggcatggcgctgaagcaggccgtcgcgagcacagatgcggtctcggcgatcgacgacgccgaggcgaaccgtggcaacaatggcgttccttgggtcggcggagacaacgccggcggcgcgggccaacgtccggtgcgcgtggtcggcgacgtgacccgcgccggctacaacctgctcaacggccgtggcgtcggcgacaccagttcgatcccgcaagcgaactgcggcggcaacctggcatgccagacctggagttcgcccgatgccgccgcagcctgggccgttcgcgtgctgggcgagcaggaacagcgcacctgcgatgcatgcaccaagaccgtcaccacgccgggcgttggcctgaccccgctgatccaggaggaatacgaggacaagctgcaggccctgcaggaactggtcgccggcagccggccaaccacggcgcagagcctgcaggctgcgagcagcgcgtcgctgcccatcacccgtggggtgatcgaggcccttcgcgacgagacggaccaggacatcctggcccggcgcctggcctcggaggtcgcgctggccagcgtactggagaaggcgctgctgctgcaacgcacgctgctgaccgggcgcaaggagcccaacgtcgccgccaacgaactggcccagaaggccgtcacccacgaaagcgacatcctcgatcgcgagattcacaacctgaagaccgaactggaactgcgccgcgaactggccagcaactcgccgatggcgatcatccagcgccacagcacccgcgccgccggtgcgcgtggcatctacgaaggcgacccggtacgcaatcgggtcgatgaactgcagcggccgccgtccggcggaagccatccatga

SEQ ID NO: 504347 - DNA, 351 bp, Stenotrophomonas maltophilia
atgaataccgtggtgcggtgcctgcgctggctgtcccgccggcgtgccatcctggtgctggcatgggcggtgtcgctgctgatcgccgcaaccgccgtcaatgtggtcggcatccgcatcgcgggtggcatcgagggctggcagcgatggatggcggcgcaatccggggccttcctggcctggcgcttgttgctctacgccgccaccgcctggggttggctctggatgcgccgtcgcctgcgcgcgcgggaaccggggcgcgctgccgggcagcggctgttgcgcgcagaggttgcggccatcgtcgccgtgattgctctcgaagtcagtctgctgatgcaggcgcggtag

SEQ ID NO: 504348 - DNA, 1524 bp, Stenotrophomonas maltophilia
atgacgctgttcacgaccgactacctggagtactacctgacgctggtgtcctgggtggtccacaacggcatctggtcggtgctggtcgccagcggcatgttcgccgtcccgttcctggcgatcgtcatccaggaatggctgaaggcccgcgcggaaggcgcggacgaaggcaacaagggcatgctgtcctcggctcgcatcgagaaccgcgtcttcgtcgccaccgtggtgatcatgttcgcgggcatccccttcatcgacgtcgatttcaacaccatcaagtacgaccgttcgcgttcgacccaatgccaagtaaatgtcccggagccgaccgatacgggctggtcgcaatcgttcagcacgatcaacaaccagtcggccaaggttccggtgtggtggttcgccatgcacgcgatctcgcgcgcgatcaccggcgcctcggtcgcggccattccctgcggcaccgacctgcggcagatccgcatggacatcgacgcgacccggatcgacgacccggtgctggcccaggaggtcagcgacttcacccgcgactgctatggccccgctcgcgccaagctgttcatgacccggcccagcctgagcgaggagcagatgcacgacgtcacctggatcggctccaactacttcgtcggcaccgccggcttctacgacagctaccgctccaggactccgcgcgatgcctggccgttcgacgccacgcgcgacgccggcctggcccaggtgcccggcgggggcggctacccgacctgccggcaatggtgggccgacggcaaccagggcctgcgggcacgactgctggcccaagtcgatcccagcctgctgacgcgactggccggctgggcgggcttcctgagccaggccgaggtcaacgactcggtgatccgcgccgtcgccagccctcgccagcagaagctcaaccagggggcggtcaacacggactacggtggccagatcgacatgacgctgcccaacatcgtcacgcgcgccgccagtgacgtcgggctgaccgtcgggtcactgggctatttcccggcgatggacgtggtgcggcaggcgctgccgatggtgctgtccctgctcaagatggcgctggtcatctgcatcccgctggtgctgctgatcggcacctatgacctcaagaccgtggtcacggtgagcgtggtgcagttcgcgctgttcttcaccgacttctggttccaactcgcccgctggatcgactcgacgatcctggatgcgctctacggctggggatggggctggaaccggccgcacacgaacttcgatccgctggtgggcctcaacaacaccttcggagacatgctgctgaacttcgtgatggcgacgatgtttttgatcttgcccacgttctgggtggcggcattggcctgggctggtatccgtgcaggcaacgtgcttcaaggattgagtactggcacgcgggatgccggacaagccggtggcaggggcggcggcttgatgatcggtgcgaccaagcagaaatag

SEQ ID NO: 504349 - DNA, 372 bp, Stenotrophomonas maltophilia
atgaagcacaccgcaggcatgaccaccgcagcgcgactcggccgctggctgggcggcgtatggcgcggttggctgcgcgcggagcgtcgggtgcatcgatggctgatggcgcaggcactgccggcgggcggtgcagcggtgctgatctgggtgatcaagctggcgacccttggggtgttgctgtacgtctcggtctgggcggcgctgttgctggtcgctctcgctgtggcagccaggatggcggagcaagcgccgcaaggtgacgatgatttcctcggacgcaaggctgaagagctggatcatcgcgaaagccttgcctacgaccccatcaactacagcgatgacccagatccacgattcgaagacgattga

SEQ ID NO: 504350 - DNA, 414 bp, Stenotrophomonas maltophilia
atgcgaagggtcgtcctcgacaccaacatcgtgctgtcggcgctgatcttcagtgccggacgcctggcctggatacgccacgcctggcagcaccagcagttgcggccgctggtctgccgggagacggccagtgaactcctgcgcgtcctggcctatcccaagttcaagctgtcgacctcggaacagcaggagttgctggcggactttctgccctacgccgatgtggtggaactgccggcgccatggccagacctgccggtctgccgcgacgagaaggaccaggtgttcctggtgctcgcgcatgtcggcaaggcggatgcgttgatcacgggggatgcggacattctcgccatgcgagaggactttcccggcttgatcatgagcgccgaagcattcgcggcgcggcaggcatga

SEQ ID NO: 504351 - DNA, 219 bp, Stenotrophomonas maltophilia
atgcttgccaagctcacttcgaaaaatcagatcacgctgcccaaggcggccgtgtccggcgtggatgcggcggagtacttcgacgtaaccgtcgagagcggtcggatcgtcctgacccccgtgcgggtccagaaggcccaggccgtgcgcgagaagctggagcaactcgggatcaccgagcaggacgtcgaggatgccgtggcctgggcacggcagtga

SEQ ID NO: 504352 - DNA, 1848 bp, Stenotrophomonas maltophilia
atgctttcgctgttccagcgcaaacgggtgccgctggccaccgccgccgcgccacctcctgtcgagcctgccaacgggctgacgccaccgcagtcggccacatcgctgctggcggagccgcgccggcagcggctgctggaacacatctggcagcgcacctcgctgtcgcgtcggcagttccgctcgctgtacctggcgccgctggagcgctacgccgagctggtccagcagttcccggcctcggaggcgcatcaccatgcctggccgggcggcatgctggaccacggcctggagatcgtggcctacgcgctcaagctgaggcagtcccacttgcttccggccggcgcctcgcccgaggcccaggccgcgcaagccgaggcctggaccgccgggaccgcctacgccgcgttgctgcacgacattggcaagatcgcggtcgacctgcacgtcgagcaggcagatggcctggtctggcacccttggcgcgggccgctgcggcagccgtaccgctttcgttaccggacggatcgcgagtaccggctgcatggcgccgccacgggactgctctacacccgtgtgctcgatgccggcatcctcgactggctgagcgactaccaggacctgtggtcggcgctgctgtacgtgctggcgggccagtacgagcatgccggcacgctgggagagctggtcgtcaaggctgaccaggcatcggtggccctggcgctcggcggtgatccggccagggcgatggcggcgccgaagcatgctttgcagcgcaagctgctcgatggcctgcgctacctgctgcgcgaggagttcaagctgaaccagcccggcggcccgtcggatggatggctgacccaggacgcactctggcttgtcagcaagacggtcagcgacaaactgcgcgcgcacctcctgtcgcagggcatcgaaggcattccatcgaacaacaccgccgtcttcacggtgctccaggaccatggcatcgtgcagcccgccccggatgggaaggcgatctggcgggcgacagtcacgagcggcaccggctggtcccacagctttaccttcctgcgcctgtcgccggccttgatttgggagtcgggcgagcgtcccgcaccgttcgccggcacggtcacgacggaagaggccctccctggcgatgaggcagcgccgccggcctccgccggcatcccggccacctcaccgccccctggggtggcggattccccagccgggatcgcggacccggtctcagatctgctgtcggtgctcgatgcgtccgacgcagttaccaccagtacatcgtccgccagcgcggaacccccatcaccatccaccgccgcacctacggcagtgacccatttggcgccgaccagtcctgccaccatgccggctcccgcgaaggccacgccgtccgggaaagacttcatcgtctggctcaagcaaggcatcgagtcgcgcaagctcatcatcaacgatgcgaaagcactggtgcataccgtcgatggcacggcgtacctggtcagccccggcgttttccagcgctacgtgcaggagcatccggagatccaggtgctggcccggcaggacaatctgcacgactggcaatgggtgcaaaagcgcttcgagaagctgggactgcaccgcaaacaggacagcggcctgaacatctggacttgcgaagtcaccggggcgcgcaagtcgcggcggttgcacggctatctgttggcggcgccttcgacattgttcgcggaagtcccgccggacaacccctacctgtccctggcgcggaattcagcgcccccgggcacaacgcatgccagatgcctgcgaccagatgactga

SEQ ID NO: 504353 - DNA, 300 bp, Stenotrophomonas maltophilia
atgcagaagcgatcggtgcaacgcgggagacccgccgggacaagaacctatgaaagcgagccagcgcgcgctttcggcgttgccgtgcgcgaggcccggtccgcgcaggggctggcgcaggaggtgctcgcggaacaggcgggcatcgcccggtcgcacatgggcaagatcgagcgcggcgagcacatgcccacgctggtgttgatcctgcggatcgcgaaggggctggggtgctcggccgcggcactgatggccgcaaccgaatcgcaactggccgaggagcaggacaccaccgaatag

SEQ ID NO: 504354 - DNA, 624 bp, Stenotrophomonas maltophilia
atgatcgctcccgatcccttgaacattgccctgtcggactgcctggcctatccccggttgtcggtgccgatggcggaccatcgtcggcgccatccggaccaccccattcgcctccatgaagaacgcctggaggatctgcatcgaggactgctcacgggggccttcgaggcaggcctctgccagtcgcccgcagcacctgaaggcatcgatgtccgtcccgtctggcgcgacgcgctggcattggccgtgtcggcccatcaccccttgctggcctttgcgtcagtgtccctggagcaagccgccgaccacccttggatcgccctggatgcccgtgactgtgtgggctactgcgggcagatcgacacgctgctgacggcggccggcgcctttccctcggacgttacgacggccacatcgttcgggttgatgatgaccttggtggccgccggctacggcgtctgcctcgcacctgccgcccgcatcgagggtcatcgtgcccttggcgttgtccagcgtcccttgcaagagggctcgctgacgctcaccacgtacttcctgagccgtcgaaatacggacagcacccgcctgggaccgttattccaagcgctccaggcaagcgcctga

SEQ ID NO: 504355 - DNA, 1926 bp, Stenotrophomonas maltophilia
atgctttcggacctcatggcacggcaggccaagtgcaccggcaagccatacgcgctggccgacttcgacggcctctatctctacgtttccgccatcggcaccaaggcctggcacttccgctattcgtggtttggcaagcgcgagcgcatcactctcggtagctacccggcgctttccttgaaggacgcccgcgcgctgcgcgatgaagcccgctcgctgctcgccaagggcgtcaatccccacagcgaacgcaagcgcaagcggcacgcgatcgtcctggccggcgagcacaccttcatggccgtctacgagcaatggctggtccatcgccgtctctcgctggaggaaggacggcagaccagcctggaacagattgggcgcgtcttcaagaaagacgtgttcccgtcgctgcggcacctgaccatctacgagatcacccgcgcgcacctgctggacatcatcggcaaggtggaaaagcgcggttcgctgtcggtggccgagaagctgcggacctggttcacccagttgttcacctacgccacggtggcgattcccaacatgggcgagaacccgtccagggacctggaagtggtcgcactgcccttgccgccggtcgaacacaacccgttcctgcgcatgcacgagttgccggccatgttgcaggcgctacgcaagtaccgcggacgcctgaacacgcagttgggtttgcggctgctgatgctcacgggtgtgcgcaccggcgaactgcgcttcgccactccggatcagttcgacctcgaccggggcctgtggatcatccctgtggctaggctcaagcagcgcaagctgctcaccaggaagaagcgcaagcgtctcatcgacatcccgccctacatcgtgccgctgtcggtgcaggcgcaggagatcgttcgccacctgttggaccagtgcaagccggcccaggtccatctcatccccggcgactggtgcctgaagaacccgatcagcgaaaacacgttcaacgccgcgctcaagcgcatgggctacgaggaccagctcacggggcacggcatccgggcgacgatctcgacggcgctgaacgaactcgggtacccgaagaaatgggtggacgcccagctctcgcatgccgacccggacaggatcagcgcgacctacaaccatgccgaatacgtcgagcagcgccgcgtcatgatgcaggactgggccgatcgcctggacctgttcgagcagaaccaggtcgaggttgccagccggcatctgaccatcacgctccagggcctgccgaccattgccggccaggcggctgtgcagccgccgatggtcgacctcaccgcgccgcaactgatcgtgaccgcgccggcgcccggccaacccgaagcgccggcatcggtgcagcggttgtcagccgtacgcatgcccgagtacgcacggccacgcctgtcggaggtgcagcgcgaacgccagcaggtgctggagaccttcgaggcgccgcacaacctctcagtggcggactatgccaagctcgcgggcaagtcgcgccgctggatcacgtatgagatccaggccggcaacctgctgtcgatccacatggggcatcgcgggcagcgagtgccggactggcaactcgatccgctcaagcgcaggctggtccggtcggtgctgaagcaattgccacggggtatcgacacctgggacatctaccacgccctcctgcgctcgtacgaggctctcgggacacggccggccatcgaagctgtcaacccaacgaacttgcaccttgccgcgcggctggtggccacacagtgcatgcaggcgagcgagccagtcgtgacgaccgagttccctgagcaggtccggcaaagcgtgcagcggctggtacgcgaagccgtcgctgccgatgccgccgaagcgacgaccggagattga

SEQ ID NO: 504356 - DNA, 195 bp, Stenotrophomonas maltophilia
gtggctgcagaccttgccggaactgggcagctaccgttgccgggcctgaagttcgacaaggactacgcgaccgtcgtgctgggcgcccgcaccgaactgttcgggctgcagagcaacttcggcctgagcgcttcggccgggcagaagcgcgcccaggacgcaacgctgttcgccaacttcagcggcagcttctaa

SEQ ID NO: 504357 - DNA, 645 bp, Stenotrophomonas maltophilia
atgcatcgcgcccgtcagcatgctgccagccagacccgcgagcgtcgccaccgcctcgcccacgaagccgcccgcctgatggccgaaggcggcatccgcgactaccaccaggccaagttgaaggccgccagccggctcggcatccacgacgatgcctccctgccccgcaacaccgagatcgaagacgccctgcgcgagtaccagcggctgttctccggcccccaacacggcaacgaactgcagcgccgccgcgaggccgccatgcgtgcgctggagttcctgcacggcttcgcgcctcgcctggccggcccggtgctggagggcaccgccgacgccaacagccccgtgcagctgcacctgcacagcgacgacccggaagccgtgcaccgcttcctggacgaacacggcattcccgccgaatcgcggacgcgtcgcctgcgcatggatcgcgagcgcagcctggatgtgccggtgtgggtgttcagtgccgaggagctgaccttcgacctggccgtgctgccctacgatgccctgcgccaggcgccgttgtcgccggtggatgagaagccgatgcggcgcgcgtctgtcgcgcagttgcggcaggcgctggccgaagcggagatcaccgcgtacatcggcggatga

SEQ ID NO: 504358 - DNA, 2424 bp, Stenotrophomonas maltophilia
atgactcgactccgccgctggctgcgctggatcttcctgattgtcctggtcctggcgctgatcggcgcggccgccgtgggcggtctgtactacgccgtgtcctccaagcttcccgacgtgcagaccctgcgcgacgtggaaatgcaggagccgatgtacgtctatgccgccgacggcaagctgatggcggtgttcggcgagacccggcgtaccccgatcaccatgaaggacgttcccgagcgcctgaagcaggccttcctggccaccgaggacgcccgcttctacgagcacggcggcgtggactacatgggcatcggccgtgcggtgtggctgctggccaccaccaacgacaagcgcgtgccgggtggctccaccatcacccagcaggtggcccgccagttcttcctcagctctgagtacagctacacccgcaagctggccgagatcctgctggcgcggaagatcgagtccgagctgagcaaggacgagatcttcgagctgtacctgaacaagagtttcttcggcaatcgtgcctacggcgtggccgccgccgccgagttctattacggcaagaagctgaacgagctggacctggacgagatggcctcgctggccggcatccccaagttcccgtcctcgggcaatccgatctccaatccggagcgcgcccgccagcgccgcgacaattacgtgctgcagcgcatggcggacctgaagttcgtcagccaggccgaagccgacgcggccaaggccgtgccgatgcacgccaccgcccatgagccgccggtgcaggtcgacgcgccgtacgtggccgaactggtgcgccaggaaatgatcgcccgcttcggcggggatgtggtcaacaagggttaccacgtcaccaccaccatcgactccaccctgcagaccgccgccaaccagtcggtgcgcgacggcctgctgctgtacgaccaccgccacggctggcacggcgtggagaagcaggtgcaggtgggtgccggcgaagacgccgccgccctggccgagcacctgcgtggcctgtacggccaggccggcctgctgccggccatcgttgccagcaccggtgccgatggcagcgccaccgtggtactggccaaccgcagcgagatcgtgctgccggccggtgccgccaagtggaccaacaagaccccgggcaagctggtgcagcgcggtgacatcgtgcgcgtgcgtgccggtgccaaggaaggtgagtggctgctggatcagctcccgcgcggccagtccgcgctggtctcgctggatgcccacagcggcgcgctgaaggcgctggttggcggtttcagcttctccggcaacaagttcaaccgtgccacccaggcccgccgccagccgggttcgagcttcaagcccttcatctacgccgcggccttcgacaagggctacaacccggcctcgatcgtgctcgacgccccggtcgtgttccgcgaccgccgcggcaagacctgggccccgcagaacgacggcggcggtttccgcggcccgatgcgcctgcgtgaggcgctggtgcagtcgcgcaacctggtctcggtgcgcctgctcgacggcatgggcgtggactacgcgcgcaagtacatcagcgaatttggtttcgccgaatccgaactgccgccgaacctgtcgatgtcactgggcaccgcctcgctgaccccgctgtcggtggcccgtggctacgccgtgttcgccaatggcggctcgcgggtggatacctggttgatcgaccaggtgaacgaccgcgacggcaacctggtgttcaaggaaaaccccgccctggcctgccgcgactgtgccggcagcagcgaccagccggtcaaccaggtcgtggacggcttcaacttcggcgccccggccccgaaggtggacccggcggctgcggccaaggccgaagccaagaccgaaaccccggccacgccggccaaccccgatgcccgcaccgccccgcgcgcgatcgacgcccgcaccgcctaccagttggtgtcgatgatgcgcgacgtggtccagcgcggtaccggcgtgcaggccaaggtgctcggccgagaggacgtgggcggcaagaccggctccaccaacgaccaccgcgacgcctggttctccggcttcggtggcccgtacgtgaccactgtgtgggtgggccgcgacgacttccgctcgctgggctaccgcgagtacggtggcaaggcggcgctgccgatctggatcgactacatgcgcaccgcgctgaaggacaccccgatcgcgcagaacgagccgcccagcggcatggtccaggccaccctcaacggcgcgaccgaatgggtgaaggtggaagacatggaccgcctgaccgactacgacctgaacctcaatacgccgcaggccgacgccgccgcgttcgatatcttctga

SEQ ID NO: 504359 - DNA, 624 bp, Stenotrophomonas maltophilia
atgctctatttggtggaacgttaccgcttccctgagcgttcaaccggcgactgtcatgagcaccgcctggagcaaagcgtgtcggccaacagaacctttctagaagaggtcacggacattatctgtctgatcctcagcagtgcggacgtcccgcacgccgacaccctcgcggtatccaggcagttgtgccgccgaatcaaggtccagttcggaggcagcacgatctacctcccgacgaaccggtccaaggcaggagggcacgccagcaaattgggcatggaattactggacttggttgaggatgaggtctgccatcaacttcgccaggcaggcttgctggatgaactggaacgggctgctgtggcagatgacattcgccaggagctactgactcgatgccgctcgctctgcatctacgtgcccagcggtcaaagcgatgccgcattggcgagggcgctacaggcccactctcatctccagaacaacaagagccgcagcgaaatagcgaccatgttgaatgtatcgacccaagcggtctgcaagatgattcggcgcgctgagaagcacctccagacgacgaaagagctaaagggcggtgagcaccacaaggaaagcgcggcgtga

SEQ ID NO: 504360 - DNA, 465 bp, Stenotrophomonas maltophilia
atggcgaagatcatcggaaacactgcggaacgctcaagcgcgggtgcctcaccaggaggtagcggttccagtgcagaagcgggtaacgaagagctggaaatcctgatgggcgaaggccaggtaaaggtggctgatcggcagctctcagtgcgtgagtacacattcgccgaggggctgttcatccaggctaccgctcgaggcttcatggatgacctctacggggtcttcaagcctggcagcaccgtccccagcttcgagcagatcagcgaagtctgcgctcgcaacgctgatgtgattttggaccttatggcgaggtccgcaaacgtcgaacgcagctgggttgagtcgttgagcgaggctgagggggagctgctgatgcttgcctggtggagggtgaattcgggtttttttatccgacgggttctccggcgcgcaatcgcagaggccccccaaagcagcccgtaa

SEQ ID NO: 504361 - DNA, 3504 bp, Stenotrophomonas maltophilia
atggcaagtaagcgcagcctggaactggcgatgcgtatcgcggtggacattgagcaggcgcaaaaggcgctgccggtgttgcagcgtggcttgagctcgatcaaggaatctggcgccgctgcgggcgccggacttgacgcgctggcgcagaagtccagtaaggctgcacagtccattgctcgtgccagcaggagcagctctgactcagcagggcgcattgaagaagccggagcaagtgctgccaaaggcgcagcgggcatggaagcggcgggtagcgccgcgaaatcgatgtcggcagacgttgctgctgcggccgatcgcgtgaggtcatcaggcagcgccgttcaaaagacggtggctgatgaaatccggatgattggagagctcgatgcgcgtctggagcgcggcgctgccagcatggccgatctggctgaaactgagacactgctcgatagggctatgtccagagggctgctcagcaccgaggactacaacaacgccatcaaagcccttgataagcagggtggcgcgctggcgcgcactgaacgccagcgggaacagtctgtcgagggcgctatcggacgttacgaccgagcctcggcgaagctccagaagctggagcaggacgagcgtgcgctcaagacggctgtagattcaggccggatcagtcgcgaccagtacaaccgctcaatggcggacctggctgcgcaacgaaatgccgtcaagaacgccgacgcgatctcgcgtgcaatgggtgctggcgcagtgtctgcgggccagtatcaggctgcgatgcggcagctgcctgcccaaatcaccgacattacgaccagtctcgccaccggcatgcccatctggatggttgccgtgcagcagggcggccagatcaaggactcattcggtggcattggacctgctgccagggcagtggcggcagcgatcaacccgatggtactcgccgtcggtggtaccgctgcggtgctgggctcaatggcgtacatggctcaccgtggctatacggagttgctatcgctggagtcggcgatcattgccaatggcggcagttccggcaggacggcggggcagctcagccagttggccggtgaaattggtggactggtcaaggactacgatcttgcgcggtcctcggtcgagcagctcacccgcagcggccaactgtcgggaaaggcgcttgacgatgccagccgtgcatcggctgcgctggcaacgctgactggagattctattgaatcgaccacgtccaagatttccgagctggccaagtcgcctaccgagacgctacgcaagctcaatgatcaatacggctttctgacggtagaggtctatgagcatgtgcgcgccctggaagaacagggaaacgagaccgatgccgttcgggttgcggtcgagtacatggccgacgtctacaccgaccgcctcaagcgggttcaggacgccacgcgtggcctgaccggcttcgttggggagctgcgccaggaatggcaagccttcacctctgaactcaagagcatctccaacccaactcttgagattgagattgccaaaacgcagcagcaactggccgcgcttcgaggtggagccttcgttgcccctcgctatctgaacgatcagaacagggccaacgatattgccgagctggagcgacggctgacactgctgaagtcgcagaagcaagatcaggatgaacttgcgtcaggcgaggctttcgtgacggagctgcgccgcaagggcgttgccgtggctgacgacctggcgcgctcgctggatagcggggccagcaaggccgaaaagcttaagaaggccacggaggaagtcgccaaccagttccgcacgcttcgcgctatcgcccctgagagcactctgctcaaaggggtggtgtttggcgaggatggcagtgtcgggggcggagcctatgatcggcgggtcaagcagcttcagagccagtatcgagaaacctcgcccaaggcacccaaaaccgacgcgcagaaggatgagaccgctgcacagcgcgaactggagcggctgaagcaacaaatccagttggtcggaacgttggatgagatgcacaagagggctacagagactgcccgcatcgaggctgccattgccgagggtgagttccagaacgccaccgcccgcaccaagcaggagttgctggacaaggccaaggaaaaggacctggccgatcagcgcctggaggcagagcggcaaatgctcggggtccgcgaccgtattgctcagctccaggggaacggcccggatgccgagctggccaagactcgtcgcgaactcaatctgctgaagcaagagcttgaggccttgggtgaaaccgccaaggccgctgatgtggcaaagctgctcaacctcagcgaggcaagcgcccgtttcaagacgctccaggacacctataaccagacgatggggtccatcgcgctggatcaacagcgcatccaggtggagctccaggcaggcctcattaccgaggcgcaggcccagcagagtgttgtcgccatctaccaaaagaagctgggtgcgatcagggagattctcccggagatgcgagccattgccctgacgctgaaggatccggcggtcgcggcggcggtagatcagatcgaggtaaagctccaggagatggcgcaaacgaccagtctgctccagcagtctatacgcaacacccttgaagggtcgttcaagaatctctttatgtcattggttacgcaaaccgactcgctcagcgactcgattgccaacttcttctccagcctggctcaaggcattgccgagtttgccgcagcgcagctggcgcaggccgccgcaatgcgcctgatgagcctctttccaggatcaggcaatggtggtggcggtgacggtgcccagcagatggccaaggccgcaaccgtcgcagccgccgcaggcgcggccattggccttggagccacgaagttggagacctcggcaacaacgctcagctcttccgggcttggcctggtgattggcgcacaggcggtcagtaaggcggccagtcagatgcaggcggctgcggccgctatggcggtgtccagcgcggccagctttgcaaccggtggttggacggggcctggcagcaaataccagcctgccggcatcgtgcatgccgatgagttcgttttgcgccaggaggtgacccgccagtccggcgcaaagacattcctctcagccttcaatcgcgtcggtatggctgcaattcgaggatggcgtgacggctatgcagatggcgggccggtcagcctggggcagcccatgtcggtgtctcagccgatggtgcggatggcggccgctgccactccagccagccaggcaccaagtattgggctgcgcatggtgaacgtggtggaccccagcttgctggagaactatctggacgatcccggtagtgaccatgtgtttgtgaacaagatcagccgcaattcggcatcgatccgtcaggttttgggaggctga

SEQ ID NO: 504362 - DNA, 678 bp, Stenotrophomonas maltophilia
gtggcaaatagtgattcgaagacgcatatccaccacaagaaaggtggtgtcacgctttcagacaggtgtcagacacctgcgacagccgtcggtgctgtcggtgggcgaagccagggccgggatggagccgtgggcggtctcgttgcctcgccgcacaagggttccgaagtgcttgagagcttggggggtgccgttgagctggcgctgcgcagcttacgtgccgaggtgcatatccccacggtcgtccaggcagtggtccagcgtatcgcccgtgaatacggcggggtcaacctttgttttccggctaccgccgaaggcgttgggcgacgtagcgatacgaaggcgcgccgtgacgggttcatgcagtgcgtgaaagaggaggtcattgctcagttggcgaagctgggctgtgaccaggtacgtcgggaatctgccgggggagctgcggtggcagcagtggccacgacattctctggcggctcggtctatatcccctcgatggcagttgcccgccaggcggagcagcatgtggcaattgtggctcgctaccgcgcaggcgaaataacccacgatatcgccgccacctttggtatctccgagcgctccgttcgtcgcatcctgcaacgaacgcgcgaacggaataggcgcagtgtaaacagccgagcaagcgctgattaa

SEQ ID NO: 504363 - DNA, 573 bp, Stenotrophomonas maltophilia
atggcactacgtgcatttcagatatttcgggcgggcacatggaactcacagtccggtctcatcaccgtcgacaaacgggcggtcagtgccgttgcgatcaactacagccaggcactgaagtctgcgcccctggtgatcggacaccctgacgatgagtcgaacacctttggccaggtgcgcggcctggccgatatggatggcgagctgtacgccttcgccgatgtggctgatggcctgatcagttcggtgcggagcggcaattacaagaacgtttcagcctcgatctactttcccaacacgccaggcaatcccatgccgggtagctactacctgcgtcatgtgggctttctgggcgctcaggctccggctgtgaagggcatgcagcctttgagctttgcagagccagcacatggcggcactcctgctgcggcgaacttctccacacccgttggagttcaggttgatcgcacgcaaatgcagctgtacgagctcgcgcgtgacgtgcagcacgccaatccatctatcggctttatccaagccgcgatcatggcccaaagggccatccaacgataa

SEQ ID NO: 504364 - DNA, 795 bp, Stenotrophomonas maltophilia
atgagcagcatcactgaaatccagtccagcatcgaaagcctgggcgcgatcaaagagaagatcaacaccgccgttgccgagcgctaccagcgactggaagccctggcggcagagcgcagtaagatcacctcacaagccatttcgcgcacggactacatcgcgctcatgtggcgcatgctggatttgaaggctgaccactatcgtgcgcggctgacacaaaatctcagaaacagtatcttcgggagccatgaccgcgccgataagaagcccacggttgaaacggcgatgagcgtcaacgcaatgcaggccgacgacatgttgggcacgctgccgggcggtctacgtggagccgtctacggcggggattttgacccggacccgatgagccagcttgccgcaacctacttcctcctggatgaaatgaagctggctacagctgacgccctggatggcatcgccaattggccgaaggctcttccgttgaaagagtccctggcgaagatcggtgacattgaccgggagatgctgaccatcgaatccgagctggagttgctgaagaaggatgcgcatcgcatcggcctggcactaccgcccaagccggtgaaggtcgaaccgattcagccgggtagttgggagtggctgaataagatgattgaagacatggctcgccgtcggcggcaggaagagattgatgatccgctccgcgccaagtcaatcgtcgtgcgagatggcgtccggggctggatgcgcttgaacctggagaccggcctggaggaattcgttcccgagcgctga

SEQ ID NO: 504365 - DNA, 393 bp, Stenotrophomonas maltophilia
atgaacacgatcaacgccaccagctcgccgcagtccaactcgctcaagcgggcagcatcccaagcccatgatgacctgggcaccgtctcttgtgccttgaacggtctgcgcgacgcgcttgaggtccggggcggccatgacgccatcaaccgcgacaaccttgccatgctcttctacgccatcgagccgcgtaacttccccgagggtatgggcgaagaaggtgttgccgaggcgcgcgccgctatcattgacctgatctcccccgagtccaacctgaacggaatttcgcgcgcccgcgtgtggtcgctggtctccctgctggccaagttgcaggaggccgccgtcaaccggctcggggagattgtgcacagccagtcggttgccgaggcgtaa

SEQ ID NO: 504366 - DNA, 225 bp, Stenotrophomonas maltophilia
atgaggcaggccgacgcagggcggcggccacgtgcggcatccccccggttgccgcgcattcactctagcgcgcagacccgggggaagggcaagcagcaaaacgtgatgatcgggtcagtgtgtgaccgcgtccgcagcctggaaggcggcatcgaacaggcgctggaccggcgggcccatttccccggccagcagggccagcaggaacaggcccagcagcagtga

SEQ ID NO: 504367 - DNA, 435 bp, Stenotrophomonas maltophilia
atgatccggcgcgcgctggtgctggtgttcatcgggcttctggccgacaccgcagcggccagcgtgcaggaccatcgctgcctgacgggcggtcgcaacgacggcatccacctgctgtggcgctggctggacgatggcagcgccgacgtgcagtacgccgggcagcgcggccgcctgcagctgcaacgggtgtcgcaggaaacgacggtgctggacgaagaccgcccgtaccagttcgacagcgtctgggaagaacgcatcgatgggcgcctcaacggccgctacctgctgagcacgcagggcgcgctggtgctggacctgagctacgaacgcgcccgtgatggccgtcgcaccaccttccacgatgacggcgaggcgtggcaggaggatggctgccattggccgggaggcgtagcggcgcgcgtggtcgattga

SEQ ID NO: 504368 - DNA, 648 bp, Stenotrophomonas maltophilia
atgactgacggctgggggtttcaatcctgtgcgcgacacctccttgatatcattcccgccatgaacccgataaccgacagtgacgtgcgatcagctctgctgggcaaggtcattgctgagcatgtcgcaaatccgaacacgcttgtggtggaggaaatggggcttgcgcgtggcgcctgccggatcgatgtctgtgtcatcaatggccatctgcacggctacgagatcaagagtgatgtagacaccctgcggagacttccattgcagcagcagttctactccgatgtcctcgacaaggcgacgatcgtggtgggcaagcgccatttggaccatgccctggatacgttgcctgcttggtggggggtcaggctggcatcacgtggagcgcgcaacgcagtgaggctagaactagtgcggcctgcaaaactcaatccatcagtgagcgcgacggccgtcgcagcactgctctggcgcgatgaaatttctgctctgatcggcaggcggacgcctgaaaaatcagcgctgcgcggcaaccgcgcagcgctatgtgaacgtctgtcggagctctacagtcttgcggaaatccgtgcgctggtcagggaacagttgaagcgccggtcagactggcgaggtcgcgaacaaccttag

SEQ ID NO: 504369 - DNA, 297 bp, Stenotrophomonas maltophilia
atgctgaaaatagaaattgattccctgaggttctactcacgactggacgaggatgcattcttctccaggttgagtaatacatcgggcgtggtatccgttgaggggtttctcagaacgatcaacgtccttgttgatccgtcagctgtggatgaggacggtatgagggagctgatttcgctgttccaacgctatggaatagacatgcgccaactgcgggaactggagacggcagaattcagcacatggatgaggaacagatcggcctactggttcaagtcgatgtatccggatcaatga

SEQ ID NO: 504370 - DNA, 597 bp, Stenotrophomonas maltophilia
atgatgaaacgcctgtgttgccttccggccagcgctctccttctaacccttgtgaccctgcaggtacaggcccgcgccattcacgaatgcgtcgccgttccgcaggcatcgactgccactgatatgcctgccggcctggatgagttcgagcaacatctgtggacggcaaacacaggtcaggtagtgcgcaagggcactgacacgctccttctgctgcgcctcttctcggagtcgcagggcgtgatcgattcccagcagttcaccaagatcaccggcagcctgaagggatacacgccttcgtccgaaggaatgccggaggtagtggatgcgtggttgaccagtggcggcgcaggcctcgcgcacaagggagactactggctgtccgattcggcggatgtcgaactacaccagccgcacaagggcgatagtcggatcgaagtcaaagtgacggccgttggatggaacagctatcggaaagaagcccgttctttccatctccagttcacctgtcaactcaaggaaatcccggtcgagaagctcagtgcctggcaaggcggcgacggcaatctctggcgatcctttggacccgccggatag

SEQ ID NO: 504371 - DNA, 609 bp, Stenotrophomonas maltophilia
atgaagcggctatctgctttcagctgtggtgcgtttctgtttgtctgtggtgccgatgcagaggctgcccgcgcgtttgtggttgaagacgctgccatgcgcgatcccagctgccttacggtcgagccgcgccagcggctctttgcctgtcaccagatcgttgccggcaacagccgtgtgatagggctgagacgattccgttcgtcgtggtggaccgaccgttccactttcagcaagctcacgatccagctccccgctgacgcgaaagcaggtgaccggttcgctgtctccgacgatcgcgtgtggctgtttcatagcagtggatccagcgcatttgccggaaagacgggctgctacgcagtgccgatcgcagggcagattatcgttgtttccgccggagattccggcatcgagctccaggtcgatgcaacgctccgctccgcaagcccactgcaatggcgagatcaatgtgatgcaccgatccagctatcagagcgcctgaaagcctcgcccctgcagatgcaggacctcgatgcatggacgggagcacatgaatccgacgcatccccttttgatcaggcacatcctgccaatcgctcgcgtgactga

SEQ ID NO: 504372 - DNA, 297 bp, Stenotrophomonas maltophilia
atggtggcggcggtggtagcgaaacagggggcggcgacggtggtggagacggcggcggcagtgatggcggtggcgatgggggtggtgacggtggctccggtggtggagacggcggcggggacggaggtggtggcggggatggcgacggcgatggggatggggatggagatggagatggtgatggcggagagaatcccagcctccctgagaaccctacgtatcccggcgacgtgccgatgccctacatggatccgcccatcccaagcagctacctcggccagtggtctagcggcctag

SEQ ID NO: 504373 - DNA, 234 bp, Stenotrophomonas maltophilia
atgccctacatggatccgcccatcccaagcagctacctcggccagtggtctagcggcctaggcaatggctcctgcccctcggcaaaagttgtatcagtggccgtgggtggcttcggcaccagcatcaatttcgagttcaaaccgctctgcgatttcgcactgatgatcaggggtcttgtgatcgcatgtgctggtatcgcagcggcctatatcgtttcgggagtgcgcaaataa

SEQ ID NO: 504374 - DNA, 1218 bp, Stenotrophomonas maltophilia
atgatgtatctgatttccgggcaacccggcaatggcaaaacactgcgcgccatgtcgatggcgcaggagttctacgagcagaaccagcagcaggtgaaggacggtagcgcaccgccgcggcgcttctttaccaatatcgccggggctacggccgaagagaacccgaacgccttcccatggctcgaaaagctgccagaacacaacgactggacccagcttcccgatggctcctttgtgctgtacgacgaagcccattctgatggcaatactcaggggctggagcgctatggcaggctgttcccgtccaccggcaagccgggtgagtcggaagacccacgcatccgctcgatgtccacgcaccggcatcgcggctttgatctggtgttcgtcacccagtggcccagcaagatccaccaccaggtacgcagcctgatcggctcgcacacccacatgaatcgcacgttcggcatgcagcgcgctggcgttcttacgtggtcccgtgtgcaggccgatccttacgatgagcgggtgcgcgataaggccgaagaagagatatgggcttaccccaaggcgctctatgagcgctatcgcagcgccacgctgcatacggcaagtcacaagttcaaggtgcccaagcgcgtttggcagggcctgtcgatgactttggccctgatatttggcgtgtggatggtctggttcttcatcgtcaaaccctcgcccgaatccagcaagaaagaagagcagggggccggggttttgccggccgtcggtgccctggcgcccttgggcgcgggcacggcggcggcccggcccctcacccgcgaagagtacgtggagaagcacaaaccacgggtagagttccagccgtggtccgcccctgccttcgatgagcgcaccgtgcaatcgcagcccgagctgtactgcatggcctccggcaccactgagcaggacaccacctgcacgtgcgtaacggagcagggcaccaaggcaaagatttcgataccggtatgcgtggcgatcgcacgcgatggaccggcctacaacccgtatcgagcgccccgacaggagagcgaaccggcgcgggaggatccagcccgagtcgtcgctcagtccggggccccagcttcccatgagccttctccgcactcgctcgttgaggtcgggaaacgcccgatgggcacgttccctgagacgccgccttacccggccagcttctga

SEQ ID NO: 504375 - DNA, 207 bp, Stenotrophomonas maltophilia
atgagcaacctcagccaggtcaacgatgcccgcacgtccaaacggccgcttctgaccgcctcgggcaatctccatcatccgacgccattcctgcgcctgtgccgccagcagggagagccaagccagatcctgcggttcgagctcacggccttcgggtgtgaccagtcggccagccttaaacgaaaaaccggcccaagggccggttag

SEQ ID NO: 504376 - DNA, 1323 bp, Stenotrophomonas maltophilia
atgctcgttttcaacgaaggcgtgccgcgcgcaggcaagagctacgacgcggtaaagaaccacattctgccgacgatcaagaaagggcgacgggtgttcgctcgcctcaacggcctgaaccatgagcgcatcgccgagtacctggacatgccagtggatgaggtgcatcagctgctcacgctggtggataccaaggacgtcgccagtacgtttgcctgctacaaggatgacgccaccggccagtggtgcatcccagatcagttcaaggactcgctgtgtgtcatcgatgaggtccacgagttctacgtggcgcagcgccagccgttgcccgatgccgtggagaacttctgggcgctgctcggccagaatggcggcgatgcggtgatcatgactcagtggatcaaccgcgtgcatcaggctgtgcgtgcgcgcatcgagcgtaagaacgtcttccagaagctcactgcggtcggcatgaaaaaccgctatcgggtgacgttcttccacaccacttcgccgggcaaatatgagcgggtagggggtaagacagagaagtacgacccggagatttacccgctctaccacggctacgccgtggggtcagaaaacaccgaggtatacgaggaaggcggcaccaacatctggaaggcgctggcgctgaaagggtcgattttcggcatcatcggcatcgtcggtgcggcggtcttcatcggctttttcatgaccggtggcggcttggttccggaggaagagaagaaagacgatctgccgggcatgaaggcggaggcgtccgctaccgccaacccggcgccgcaggtgcccggagtgcccgtcaagaaggccgaacccgatccgctggcgaagctcagtcctgagcagcgctacgtcgcccagctgtcgaaagcaaaccgcatccggctggcgcttacggcgtcgttcggtgagcgccaggtcggcatggtcgagtgggtagacagcagcaacaacaccgccgatcagctgagctttgatgccctcattgcgatgggctaccgcgtgcgcgtgttcgcctacggggccaagctgaccgccgaggatttcaccgttatagccaccgcatggccgcgtcaggcgccgcaacgtgatgtggattcgcgcctatatcgcctagacgacgcgagcgcgggcgcgggccttgcgaccgcagggagtgaggccggcgccggcgtccgcgtcagtggcggtcagggcacgcctaccgcgaacggaagcacgctggtgcgcgtcggtgatcgcccgatggggacattcccagagtcgaagccgtacccggccagcttctga

SEQ ID NO: 504377 - DNA, 348 bp, Stenotrophomonas maltophilia
atgatgaactttgccgctttcgtgaccgctcaggccggatggctgcaagaccttactacgtggtttcgcaagcagattgaacggttctgggatgcgatcgttcagttcttcaatgacctgatcatccttgccatcaaggccgttcttgaactggtggtcatggcgtttgagcgcctgccggttccagatttcatgcagcagtacagcattggcgcgctgctgggaaacgccggttccaccgtgggctggtttgtccagaccttccgcatcggcgagtgcttggcggtcatcgcactggggatcgcgttcaagatcacccgcaaaattctgaccttggggaaatggtga

SEQ ID NO: 504378 - DNA, 648 bp, Stenotrophomonas maltophilia
atgtacaccagctcgctcgatccgcaaggcgcggcaggctattcctacagccctacgggcgcaacctgcacaacatccgatgccccagcgccaacccctgcaggagacggcaccgatccgggtggcggcgggggtgaaactggtggtggcgacgggggcggcactaatcccggtggcggcgatggtgatggcggcggcggaaccaatccgggtggcggcgatggcggtggcggtaccggtccgggcgatggtgacggcggtggcgatgatggcggtggtgacggcggcggtggtactggacccggccccggcccgggggagggtgacggcgatggggatggcccaggtgcgcccggagaggatggtgggccgctttacgagcatgacaagaacctgaccattcccaaggtctacgccgagtttgagcagcgggtgaagaaggcgccgatcatcgacgcgacaaagcgattctttacggtttccgtgggaggtagctgcccggtgttcacggttccagcgtcggcgtactgggaggccatgacgttcgacctgcactgtagcggcgccatcttcgcgctgttgcagctgatcggctgggtgctgctggcgatggccgcatacaaggccggggagatcgcgctcacatga

SEQ ID NO: 504379 - DNA, 150 bp, Stenotrophomonas maltophilia
atggactttgaaagcatcatggcctcgctgcagcccgcaacggctgcgctggccgtcctgggggccgcagcgctgtacgcgcagataaagttctgcctgtgggctgcaccgaaggtggcgcggttcttcatcgctcggagggtcggatga

SEQ ID NO: 504380 - DNA, 138 bp, Stenotrophomonas maltophilia
atggatttcagcggaattctgaacggcctgtccgtcgcctcggccaccactgccatcgtcgccgcggcggcgctgatcgcggtggtcggcttctccagctgggcagcaaagaaggtggcgggcttcttcggccgttaa

SEQ ID NO: 504381 - DNA, 255 bp, Stenotrophomonas maltophilia
atgggcctctgcgttgctttcggggaggacggaacgctgatcccaaccggtcagcccgtcgatcagtgcgcggggtacgtactgatgagcagcgcagaggcatccactgtgagcctgattgccgaggcgttccaaccgcccagcaaggaacagttggccgtgtgggcggtgtcgccgatggcgctgattctcttcttcttcgtcgtcgcccggatcgccggttccgtggcgtcgttcttcaacacccaccggtaa

SEQ ID NO: 504382 - DNA, 834 bp, Stenotrophomonas maltophilia
atggcgggcctgctgcaacgcggccgtcagcggcgcaatcgccgcctcgctgcgcaacaggttggcctgggcgttctccacatcctcgggcaggccggcgccggcacgcaggcgggcctgtgcgagccgtacggtttcccgccagttgtcggcctcccgccgcgccacctccagttgccgccggtcgccctgcgcctcgaaccaggtgcgggcgacctccgccgccacgctctggcgcgtcatctccagttccgcctggctggcctcggcccgcgccattgcggcctcctgcagccggtcaagccgaccgaacaggtcgatctcccactgcacatcgaagccggcctgccaggattccgacagcgtgcgcgcaccgtcctgactgggctgctgctggatgccacgggtgtatccagcgccgctggtcacgcccggcagccggtcgagccggcgctcgtcgaagaccgcgcgggcggcgagcaggctggcccgggcctggcgaatgtcgtggttgtgcgccagcgctgtctcgatccagcggccaaggccgtcgtcctcgaagatgccccaccacgcggcaggcatcgattcggcgccgggcgcggtgaattccgcggcctgcggactggccagcacgatggcgggcgcctgcggccggacatattggggcccgacggcgcagccggccagcgccgtcgccagcgccgtggccgagcatgcgcggaagatcgtggtgactgtgctcatgtcgacgctccctcggcccttgcgatctcggccagttgccggctgcgcgcactctgtacgcggtggtcgcgcgcaagccaggtgtag

SEQ ID NO: 504383 - DNA, 3096 bp, Stenotrophomonas maltophilia
atgaggttcaccgacgtcttcgtgcgccgcccggtgctggcgctggtggtcagtagcctgctcgtgctgctgggcctgttcgcgctgggcaagctgccgatccggcagtacccgacgctggaaaccgccaccatcaccgtcagcaccgagtacccgggcgcctcggccgagctgatgcaaggcttcgtgacccagccgatcgcgcaggcggtgtcctcggtcgagggcatcgactacctgtcgtcctcgtcgacgcaaggccgcagcctggtcacgctgcgcatggaactgaaccgcgactcgacgcaagcgttgaccgaggcgatggccaaggtcaaccaggtgcgttaccgcctgcccgagcgcgcctatgatccggtgatcgaactgtccgccggggattcgacggcggtggcctatgtgggcttctccaccggcagcctgtccgcgccggagctgacggactacctgtcgcgggtggtcgaacccctgttctccggcatcgacggcgtggccaaggtgcaggtggatggcggccagaagctggcgatgcgcctgtggctggacgccgagcgcctggccgggcgcggcctgaccgccacggacgtggccgacgcgatccgccgcaacaactaccaggccgcgccgggacaggttcgcgggcagtacgtgatcgccaatgtgcgggtcagttccgacctgaccagcgtggaggaattccgcgacctggtcatccgccaggatggcaacgacctggtgcgcctgcgcgatgtcggcacggttgaactgggtgcagcctcgacgcagacgagcgcccagatggacggcgagccggcggtctacctgtcgctgttccccacgcccaagggcaatccgctggtcatcgtggatggcatacgccagttgctgccggacatcgagaagaccttgccgccgggcgtgaaggtcgccatggtctacgagcgcgcgcgcttcatcgatgcctcgatccaggaagtggtcaagacgctactggaagcggtgctgatcgtggtgctggtgatctggctgtgcctgggctcgctgcgcagcgtggtcatcccggtggttgccatcccgctgtcgatgctgggcgcggcggcgctgatgctggcgttcggcttcagcatcaacctgctgaccctgctggcgatggtgctggccatcgggttggtggtggatgacgccatcgtggtggtcgagaacgtgcatcgccacatcgaggaaggcaagtcgccggtggcggcggcgctggtcggcgcgcgcgagattgcggggccggtgatcgccatgacgctgacgctggcggccgtctatgcccccatcggcctgatgggcgggctgaccggcgcgctgtttcgcgagttcgccctgaccctggccggggcggtgatcgtctccggcgtggtggcgttgacgctgtcgccggtaatgagttcgctgctgctgaagtccagccaccaggacggtgggcagggtcgcatggcgcaatgggccgaacgtgtcttcggtggcctggcggatcactatggacggctgctgggtgggtcgcttcggcatcgctggctcagcggcggcttcgccctgctggtctgcctcagtctcccgttcctgtaccagttgccgcaacgggaactggcgccgccggaagaccaggcggcggtcctggccgcggtcaagtccccgcagcacgccagcctggactatgcggaacgcttcgccgacgaactgcaccgcgtcatgtccgcggtacccgagacgatcggcacgtggatcatcaacggcacggacggcccggccaacagcttcggcggcctgatgctgtccgactggggcgagcgcacgcgcaaggagccggagatcgtggccgagctacagggcgccgtcggcgagatcgccggcagcgacatcttcgtgttccaggtcgcgcccttgccgggcggcagcggcggcctgccggtgcaactagtgctgcgcagcgcgcaggactatccggtgctgtacgaggccatggaggggatcaagcaacgtgcccgcgacagtggcctgttcgtggtggtggacagcgacctggagtacgacagccccgtcgtgcaggtgacgatcgaccgcgccaaggcggcaagcctgggcattgcgctgcaggacatcggcgactcgctgggcgtgctggtcggcgagaactatgtcaatcgcttcgcgctgttcggccgctcctacgacgtgatcccgcagagcgtcggcgagcagcgcctgacgccgcaggcgctggcgcggcagtacgtacgcaccggcgacggtgcgctggtgccgctgcccaccgtggcgcggctggacatgggcgtggagcccaaccggctgaaccagttcgaccagcagaacgcggccaccctgcaggccatccccgcgccgggcgtctcgctgggccaggccgtggccttcctcgaacaggtcgtggccgagttgccacccggcttcagccacgactggcagtccgaatcgcgccagtatgtgcaggagggcaacgcgctggtgttcgccttcctggccgcattggtcgtgatctacctggtgctggccgcgcagtacgagagcctggtcgatccgctgatcatcctgatcacggtgcccttgtccatctgcggcgcgctgctgccgctggcgctgggctgggccacgctgaacatctacacccagatcgggctggtgacgctgatcgggctgatcagcaagcacggcatcctgatggtggagttcgccaacgaactgcaggtccacgaacggctggaccgccacgccgccatcatccgcgccgcgcagatccgcctgcggccggtgctgatgaccaccggggcgatggctttcggcgtggtgccgttgctgttcgccagcggggccggcgccaacagtcgtttcggcctgggggcggtgatcgtctgcggcatgctggtgggcacgctgttcaccctgttcgtgctgcccaccatctacacctggcttgcgcgcgaccaccgcgtacagagtgcgcgcagccggcaactggccgagatcgcaagggccgagggagcgtcgacatga

SEQ ID NO: 504384 - DNA, 1107 bp, Stenotrophomonas maltophilia
atgaacgcccgctttgcctttctcggcctggtactggcgagtgtgatcggcttgtccgcctgctcatcgggctcggacggcgcgggtggctggccggccaccaaggtggcgctggcgccggtcgagcgtgcgcaggcgccgcgagcgttccacggcgttggcgaactggaagcggcgcggcaggtggaactggcgtcggaaaccgccggtcgcgtcacgcgcatcgggttcacctccgggcagcgggtgaagcaaggcgacctgctggtgcagctcaacgatgcgcccgagcaggccgagcgccttcggttgcgcgcgcaactgcgcaatgccgagaccgtgctcgcgcgcacccgcctgctgctggccgacaaggtggccacgcaggagcaactcgaccacgcgcaggccgcgcgcgacatggcgcagggcgaactgcgcgggatcgaggcggtcatcgcgcagaaggcgatcaccgcgccgttcgcgggcacgatcggcattcgccgcgtgcacgaggggcaaaccctcgctgcgggcgatggcatcgccagcctggtcgatgccggcaccctgcacgttaacttcgcgctggaggaacaggcggttccgcacgtgcggcctggccaaccggtcgagatccgggtcgatgcctggccggagcgccgtttcgaggcgcaggtgtcggccgtcgatccgctggtcggcgcgtcgcgcacgctgcgggcgcaggcaagcctgccgaacgtcgacggcgtgctgcaggctggcatgttcgccaacgtgcgcgtgctgcgcgagcagcccacgccggtgctggcggtgcccgagaccgcggtgacctacaccgcctacggccagacggtgttcgtcgccgaagccgcagagccgcagggaatgaccgtgcgccgcgtcgcggtgaagacgggcgaacgctgggatggccgggtcgagatcgtctccggcctcaaggaaggcgaccgggtggtggtgtccggccagctcaagctcagcgacggcatgccggtcgagccggttgcacgcgacgcgctgcacggggacgccgcctcgccccaggcgaagacggcccgggagcaggcgacatga

SEQ ID NO: 504385 - DNA, 420 bp, Stenotrophomonas maltophilia
atgcgaaacatcgttgacaagacactggacagccgctggctgtggattggcgcccgcatcctgctggcggtggtgttcctttcctccgggctggccaagctgctcgacttccagagcgggctggccgaaatgcgcgccgcggggctggagccggactggctgttcaacatcgccaccatcgcggtgctgctgggcggttcggtattgctgctgctcgatcgcgcactgtggctgggcgccggtgcactggcggtgttcctgctgctgaccatcctcgtggtgcaccacttctgggcgctgccggaaccgcaggccaggccggccatgttctgggccctggagcacatcagcctcatcggtggcctggtcgcagcggcgatcgccagccgcctgcgccggcagttggagggcaaggcatga

SEQ ID NO: 504386 - DNA, 462 bp, Stenotrophomonas maltophilia
atgcaaccgaagaagccgatcgatttctcgcgcctgctcaccgtgggcgaggtggcgcatcgcgcgggcgtgccggtttccaccatccacttctacgagtcgaagggactgatcgccagcacgcgcaacgccggcaaccagcgccggttcgcctcggtcgtgttgcgctacatcgccgtgatcaaggtggcccagcgcacgggcattccccttgaggaaatcaaggaggcacttggccgctatccaccgggaagcaagctcacggccgcgcagtggcgggaactgtccacacgctggcgcaccaatctggatgaacgcatcaccaaactgacccggctgcgcgacgaactggacagttgcattggctgtggatgcctgtcgctggacgaatgcccgttgcgcaatcctcaggacgcactgggggcggaagggcccggtccccgcatcctcgaacggccgtga

SEQ ID NO: 504387 - DNA, 888 bp, Stenotrophomonas maltophilia
atgattgtcattaacatatacggcagggtgatgatgtccgggcaatggcagttacaggcttcgacggcgccgatgaccatcggcggcggcgcgatgcgcgtgaagccggaccaggtcatcaccgaagacaacgagccggggttgaaactcgtgctcatgctcggggacggcgctgtccgctatcgcatgccaccgtcgcagcccacccaggtgagcgggccggccctccacctgagcttgagcgaccagccgttcacggtcacccatagcttccatgcccatacacccctgcgctacgtggccgtacgcatgccccagtcgagcctgatgcagtggttcgacacgcaaggcaggcccatggatcgcctcctggacatggccggctcgacgccgttcatccacgatgcgaaggcgggcccggtactgcaggcactggcaaagcaattgctgctatgtcccttgcagggcgcgttgcgcgacttgtacctgtctggaaaggcgctggaattgacggccaacgtgctggcaacgctggacgtccaaccgccctcgtcgacagcaatcaccctgccggtacgccatcgcgatcgcctccatcgcgcccacgaaatactgatgcgcgatatcagtcatccgccgggactcgactggctggcaagccaggtcgggctgagcgtcacgctcctgacgcgtggctttcgccaactgttcggcatgagcatctacgagttcgtgcgggagcagcgtctacagcaagcctatcgaatgctggcgaccggggaatgcagcgtctccgccaccgccggcatgtgcggctataccgactcgcatttctccaaggccttccaaaagcgcttcggcatcgcgccgcacacactctgccgctga

SEQ ID NO: 504388 - DNA, 783 bp, Stenotrophomonas maltophilia
ttgccgctgcaggccgacggtcagcaccgtgtccggccccaggtcgagatcggccgtgccatagaccgaactggtcttctggccggcgacgtcgtagaagaaatcgcgatcctcgtggttggcaacgatgcgggccctcaggctgccgctctcgttgagcgggccgcccacgtcgaccaggccgcgatagcgattccaactgccggccgacaactcgccattcgccaggaactcgcgcggagcgcgcttgggaacgaggttgaccgtcgcggccgggttgccagatccctgcatcaggccgttggcgccacgcaggatctcgacgcgttcgtagataccggcatcctggggcgggctggccacctgccccatctggatggggactccgtcctgctggaacgagtcgatcttgaagccgcgagcgtagtagccggtggtcagcaactggtacggttgcaccgtgatgccgggggcgtgctgcaggacctcgtccaggctttgcaggttctgctggtccattcgttcgcgcgtgatgatggtcacggactggggcgtttccctcagcgtctgcgaacccttcagcagcgatggcgtggtttcccggtcggctgtcaccgtgacggtgtccaactggctgatttcggtggtcgattgtgcgaaggcacctggtgggagcaacagcaaggccgacaggctggaacaactgctcgcgcgcagccatccacgcgttctggagatagacatggcaaggactcaaaagcaactgggaatcaattgcattga

SEQ ID NO: 504389 - DNA, 948 bp, Stenotrophomonas maltophilia
gtgaaccagcccgtgaacgtctgggactgggaccccggcagcgtgcccgaacccggcatcggaccctacgcatcccgtggcccgacccgcacgacgcagtccggcctctatgcggtgggccgattctcgctggccgacccgctcacgctcatcaccggcgtcaggctgagccgctggaagcaggacggagcgggcacgtccaccaagctgggcaacgaactcacgccctacggcggcgtggtgctcgacatcgctccccagtggtccctctacgcaagctacgcgcagatattccagccgcagacccagacgacctgggacgggaagacgctggatcccgtcaagggcaccaacctggaagcgggcatcaagggcgaactgctggatggccggctcaacaccagcctggcgttcttcaacatccgccagcgcaatcgcgcccaggtggacccggcgtacccatgcgcggggatgacatgcttctacatcagtggcggtgaggtggagagccagggcgtggaagccgagatcagcggccgaccgctgcccggcctggacctctcgctcggatacacctacaacaccacgaagtacctgaaggatgcccagtcgcaagggcagccctttgcgagcttcacgcccaggcacatcgcgcgcctgtgggccaactacgcattcccctgggacaacggccgattgagcgccggcatgggcgtgcaggcgcagagtgcatacactgtgcaatcgggcggggtgacgctgcgccagggcggctatgcgctggtcagcgcgcgcgtgggctatcgcatcaaccgccacctgagcgcggccctgcacctgaacaacctgttcgaccgccgctactaccagagcatctcgggcccgcagtggaacaaccgctacggcgagccgagaagcgtcatgctgacactgcgagcgcagtactga

SEQ ID NO: 504390 - DNA, 279 bp, Stenotrophomonas maltophilia
atggacgaaaccacccagcagaatgccgcgctggtggaggaagcgactgctgcggcgcgcgccatggaagaccaggccgtgcagctgggcgaagccgtggcgcgcttccggctggcatcgcagggcgtcgccgctgcgccagcacgcttggcaaatgcaccgcagccacgccaggtcgcggccgccctgcccgtcaccaaggcagtaccgacacggccgctgcgggcgtcggccgcccagccggcgctggctgccgagggcgattggcaggagttctga

SEQ ID NO: 504391 - DNA, 381 bp, Stenotrophomonas maltophilia
atgccgtcgatgacggagatgatctcggcgatcttcttcgacgaggcttcgatggccgacatggtggtgaccacctggccgaccacctcgccgccctgcgaagcgacaccgtgcgcgccgatggcgagctggttggcctggcgggcgtgctcggcgttctggcgcacggtggaggtcagttcctccatcgaggcagcggtctcttccaggttggcggcctgctgctcggtacggcgcgacaggtcgctgttgcccgaggcgatctcgccggcggccgagctgatcgcgcggctggactgcttgatgcgggtgacgatttcactcagctgcgcggcggtggcgttggcgtcgtcgcgcatgcgggcgaacacgccctggtag

SEQ ID NO: 504392 - DNA, 552 bp, Stenotrophomonas maltophilia
atgcagcagatcacggtggcgaccgacgcccagcgtcgtatccgccagcgagagctggccatgctggacgagaaagaggctcaggagcgcgaagaggcgcggaagaacaaggggttcacgcaggtgtatcccttgggttggaagcgcatcattgagcttgctaaaggcaatgctggggccttcggcctgtattcattctttgctgaaaatatcgacccaacctgcggcgcggtggtctgcgatcagcagtttttggcagacaagatgaacgtcaacaggcggacaatcagccgttggttgtcttacctggaagaaaatcgcgcgcttgtccgcatccctgttgctggcaaggtttgcgcccatgcgctggatcctcacgaggtctggaagggctacgacaacgccaaggattacgcagctttcgtgaccaaaaccttggtcaacaaggatggcgatatccgccgccggatcatgtcgatgttcagcggcgagaagcagaacgacgaccgcgacccgaacaccattgacatgtttgaaagcactccccaatga

SEQ ID NO: 504393 - DNA, 351 bp, Stenotrophomonas maltophilia
atgagcaacgaaacgaaggagaaaatctttatgaaaaaaacgttcgctcttgctgccatgatggcggcaatcgctccgaatcttgcttcagcagcggatgagatgatccagaccaagtacgcttgcgaaggcggaaagacgttggatgtcgtgtacgtcggagactatgccgtgatgctgcaaatggatgagcttgtcccactgaaacgcgccaagagcgcatcaggagtgcgctacatctccgctagcaaaaactacacctacgaactgtggggtaagggcaacgacatgaacctttcgacccacgatggcgggaaggagcaaaccgtcctcagtagctgcaagccataa

SEQ ID NO: 504394 - DNA, 975 bp, Stenotrophomonas maltophilia
atggcggcctacgcgatcatgcgatgcaagaagctggcgacgatgggcagcgtggcggcggcgttgcagcactgctaccgcgagcgcgaaacgcccaacgctgacgccgaacgcacgccggacaacgagcaccgggcggccacctcaaccgatgcggcgatggggcggctgcgcgagttgctgccggagaagcggcgcaaggacgcggtgctggcggtcgaatacgtgatgacggccagcccggaatggtgggccaaggccacgccccagcagcaggccgcgttcttcgaccaggcgcagggctggctggcggccaaatacggcgcggatcgcatcgtgacggccagcatccaccgcgacgaggccaccccgcacctgtcggccttcgtcgtgccgctgacgcaggacgggcggctgtcggccaaggagttcatcggtggccgcgacaagatgcgggccgaccagaccagctttgccgaggcggtgagggatctcgggctggaacgcggcatcgagggcagccgggccacccatcagcgcgtccagagctactacggcgccatcgagcgccagccggggcacgccaccatcacgccgcaggccatcgagccgcgggtgctgcgcaaggggattttctcgaaggacgtggagacgccggaggccgtggccgcccgcgtgaccgctgccgtcagggaagggtatggcccgaccgtcgcagcggccgcaggagcgcgtcaggagcgcgagaaggcccggcaggcacaggagacagcccggagcctgcgtgaccgcctgaagcccgttctgggcgctctggggccgcttaatcgcgatatgcaggccaaggcggcccagatcatcaaggccgtgggcgagaagctgctcgccgaacagcgcgaggcgacacgccagcggcaggcccaacggcttcgcagtcgcggccgggatcgcgacgacggcgggctgtctcgttga

SEQ ID NO: 504395 - DNA, 729 bp, Stenotrophomonas maltophilia
ttgaggaaatttagatttgtctacgaatttgagatgtttgatgggctaagtgcgctgtcaaagatcatagatgtgctgggtggcatgggctgcccgccagaattttttctgcgcggaaatgaagttggcttaaaggctatagagaaagaaatagcaaagaggaaagtgtggccaagtgggttggcctcaagcggatacgaccttcgtttcggcttgattccggcgtgggggcaatgctttgtcctgatgcaagagacgtcggagcataaatatgtggatttggacttgaagcttgatccccttcttaatgtaagggggatgattcaggcatgggttgccgacgtagattatgatttctggcagaatgcgaccgacccgcttcagtacgaaagtgctggtcgatctctctcgggtctctcaatgaaatccaatggactgcctcctcctcttcagcaattggaaatagacacgtccaagaatcccgggcgaaaggtgttcaagcagggatatatggaggcagttggaaacatcatgtggctgagtgatgccttctggggaaaaacgggtgctgactgctctcgcagcctcttgatgctgcaagctgcaggcatgaaagtatatgaatttggaggttttcataagatcgttgcatctgatgatgtctttcgcgatgaaacaacttcgaaaacccagaatctcctcaggagagcgctatttggcgtggagtga

SEQ ID NO: 504396 - DNA, 702 bp, Stenotrophomonas maltophilia
gtggcgtttgcgcctgggtgccgggttgcgtaccgccgcctacgatgcccaccggctgttcggcctgtggctggcgccgctgctgttgctgatcgcggtcaccggcgtcttctcgggactcggggcgctggccacggtccagttggcaccgcttaccttccccgacaagcctggccaggtcatgcaggcattgatgcagccctatgcgcgcccggccagcgggcatcgtgcgcccatggccagcatggacgaattgatgctgcgccatcatcagatgaatcccgactttcgtgtccagggcatcagtgtccaccactggggcgacgcgcatgcctacgccacgctgcgcggcacacggcgctggcaattgagcacggccatcttcgagcgctaccactatgcgctggccgacctgagcctgttgcggcacgacagcgccgcccgacaaggcccgttcacgcaaggcttcatcgccatccagcccctgcactttgcccgctatgccgatgcggccagccgctggcttcatgccctggcgggcttggccggcgcagtgctggcgggcagtggcacctggctttggctcaagcgacacgccggcgatggcgccacctcgtacctgcggccatggctgagcggcatgaccctcggcctggtgctggcctgcagcgccatgtttgccatcacggcgttgacgcctga

SEQ ID NO: 504397 - DNA, 1224 bp, Stenotrophomonas maltophilia
atgatcggcagcgatcgtccccgcctggatcaccccgtgtcgtcgagctggcttgcttccctgctgcgccccgcaccggactcggcagtggccgacaacctgcgccgcggcaaaccggcctgggccgatgccatccacctgctgtggacggtgtgggtgttcatgacgccgctgttctccgggggctacacactgcgctggctgtggttcaccctggccagctatccgctgttcctggtgctgtatgcgcgcctgctgctgtcgccgcggcaccatgcgccccgctatgcactggcgatgaccgcgctggcgatcgtgctggtgccctggtacccatcgggcatcagctacttcatcttcggctgcgtgatgctgcgggtctgcgggcgcagcagctggtggcgctatctgttgctgctggccgcgctcaacgcgatgttctacctggtggcctaccttgcgcactacccgtggcagagcctggtctgggtgccggcggtgtcgttcatcatcggcatggtggtgaacgtggagacggtgaacaaggaaaaggacgccgcactgcagctgtcgcaggaggaagtgcggcggctggcgaccaccgccgagcgcgagcgcatcggccgcgacctgcacgatctgctgggccataccctgtcgctgatcaccttgaagctggagctggcgcgcaagctgcacgaccgtggcgatgcacgtgcgcggcaggagatcggcgaggccgaggacatcgcgcgtgaggcactggcgcaggtgcgcagtgcggtcaccggcatccgtgccagcgacctggcgggcgaactggcctcggcacgcctgctgctggaatgccagcaggtgcacctgcactatgcgtcgccaccggcaatgccggtggacgtcgaacgtggcctggcgctggtactgcgcgaagcggccaccaacatcgcccggcatgcgcaggcaacgcaggcgcgggtggatttcatgctggaaggaaggatgttggcgatgcagatccgcgacgatggccgcggcggtgtgcaggccgaaggcaatggcctgtgcgggatgcgtgagcgggtggcggcgctgggcgggcagttgcaggtgcagtctgcgaagggcgagggcacggtgctgaccgtgcgcgtgcctgtgggcgcggccaccacaccgctgccgccgggcgcgccgccgacgctggcagcgggcggtgccgcatga

SEQ ID NO: 504398 - DNA, 297 bp, Stenotrophomonas maltophilia
atggcctggttgtcgctgctgctgttcctgccctggttcctgctgctgggcagcctgtactggctgttcccgcgccagccgcgtacttcgcgccggcgcctgttcgatggcaccaccctgctgctggcattcgcgctgagcatcgtctcgatgctgtgggggcaccgcatcggcgtggtgcagaccggcgctggcgctatctggccacaggtgctggcggtgctgtacgcctatggcgcgtttctggcggtgctggtgctggcgttgctgctgcggccgcgctggctggaccggtaa

SEQ ID NO: 504399 - DNA, 408 bp, Stenotrophomonas maltophilia
atgtccaagacgctctacccctatctgaccgccacgctgggcgacgccgccctgcatctgccgctcgaactggcgcagccgttggaagccgcctttgccgccgccaacgatgcgcccgcgccgatcaacctgcccgtctgcctgcgccgcatccaggccggagatgccgccgacggacagccgtggcaggggccatccagcacgcccggccacgccgtggccgccgcacgcagggatcgcgccgccgtgggcctggtgtcgctgctggagctgtaccacgccaatgagcgcgtgcgcgtggatggggaagagaaggacgatatcggcgacggcgtgcgcgaagggctgatgctggcctgccggggactggcggagtatgtggcgttgcaggtgcagggggctcaataa

SEQ ID NO: 504400 - DNA, 219 bp, Stenotrophomonas maltophilia
atgaggacccacagaaggagcctccgttttgaacacctcagcgatctgtccaagcgcctggtttcgattgatccgcccggcctggagttcaacggcaatgactccatactgttgcggtcgattacccgtacccgacacgccaatgtccggtccaccggccgcaatgagttcacgctggacctggacattactgagcgtcgcagcggcttctccgcgtag

SEQ ID NO: 504401 - DNA, 291 bp, Stenotrophomonas maltophilia
atggcgattctccaggcaacagaaacattcacgcgatggctgcgcggactcaacgacagcagggcccgcggcgtgatcgtggagcgcctgcagcgcgtcgcccgcggtctcgagggagatgttcgatcagtgggtcatggcgtgagcgaactgcgaatcaaccatgggccgggatatcgcgtgtatttcacgcgtcgcgggagatccatcgtcgtgctcctgcacggtggcgacaagtcgagccagcgtcgcgatatcgaaaaagcggtcaggctcgcggagctgctgtag

SEQ ID NO: 504402 - DNA, 294 bp, Stenotrophomonas maltophilia
atgagcaagctgaagacgattcccttcgaccccgccgactatctggctgatgacgtcgcaatcgccacctatctgagcgaggcgttggcagcaggtgatgcgggccacttccaggaggcgctcggaacagtggcgcgcgcccgcggcatgggcggcgttgccgaggtgtccggtcttggacgcgagagcctgtacaaggcgctgcgccccggagcacacccacgcttcgataccgtgcaacgtgtgctgtcagcgcttggggtgcacctgatcgtgcaggccggcaaggcctga

SEQ ID NO: 504403 - DNA, 588 bp, Stenotrophomonas maltophilia
atggctctggaactgtcggaactgaagaatgaactggcccggcttggtgccgaaaacgacgcccgtgaagtcgaacgcggccgccgcatgctcaacatcacaccggatacgggcgaattcctggcggtgctggtgcgtttcggcgcagcgcggcgggtgctggaggtcggcacctccaacggctattccacgctgtggctggctgaggccgccgccgccatcgacggccacgtgaccacgctggagttcgccggggacaaggtggcgatggcacgtgcgaactttgcacgcagcggtctgggcgagcacatcacgctggtgcacggcgatgccgggcagtggttggctcaggctggtgaggacagcatcgatctgctgttcctcgattcggaccgcgggcagtacgccggctggtggccgcagctgcgtcgcgtgctgcgcccgggcggcctgctggtggtggacaacgccacctcgcacgcggaagagatggaaccgctgcgggcgctgctggaggctgatccggacttcagcaccagcctggtgccggtgggcaatggtgaactgctggccgtgcgcaacggctga

SEQ ID NO: 504404 - DNA, 1071 bp, Stenotrophomonas maltophilia
atgaagagattggcttgcctgcttctgctgctcacgatgccgatgcttgcgcacggtgcgcatgcagccgcctccgcggcgggggtcaatgcgggcacgctggatgacttcctcgatcaggtcgagaaaagcaacgcaggcgtcggcagcgtatccatcttcaggaatggccacgaggtctacaacagaagcttcgggcagaacagcctgccgcccgtcgcgcacgacgacagcacccgctaccagatcgcctcggtgaccaagatggtcaccgccatcctggcgttcaagctggtcgaagaaggccggttgagcctggacgatcacctgtcggacttcttccccgacatgccgtcggcgcagcagatcaccgttggccatctgctggcgcattccagtggcctgggcaacttcgcgataaaggacggcgcggtctgggtggtggacgaggttagccaggcacggatcctcgacgagatacgaaggcagggcactgcgttcgagccggggacgcgcgtggcctactccaactctgcctacctgctgctgcggatgatcctggaacagcgctacggcaccgactaccagcacatcgtcgaacagcagattgcagaaccgctggcgttgcagcacttcgctgcagcaccgtcgcacaccgccaacaccttcaagtcctatgcatacgcagggcagtggaacgagatcaaggacatcgcgtacaccaacgtcatcggcgtgggcgacatcgccggcaccacgcgcgaactgaacgtgctgatcaacgcgctgttccacaaccggttgctgcgcagggaaagcctcgaccggatgacgccggttgccggcgcgggctggggaaaaggactggccgagttcccgttcggtgagcagcgcttcctgggccacgctggcgatgtactgggctctcattcgcgcgtcatctacaaccctgccgatgatgtgtcgatcgcgtactccaccaatggcgagcgcattccaacctctgacttcctgcagaccctcgttggcattgtctacggcagtggcttcacgctgccggccttgaagtag

SEQ ID NO: 504405 - DNA, 474 bp, Stenotrophomonas maltophilia
atgcgccgtacaccactcgccatgatcttctgcagtgccctgctgctggcaacgccggcaatggcgttcggagctgaaggctcgacgcctgcgcgcctggccgatacagcagtgcccgcgccactggagcgcgtgctgcgcgactacgagcaggcatggcgcaccggtgatgccaaggcactggccgcgctgttcgccgaggatggctttgtgctgcagagccaccagccaccggtgcgcggacgcagcgcgatcgaggccgcgtatgccggccagggcagcagcccgttgcggttgcgcgcgttggcgtatgcagtggaggggaacacgggttacatcatcggtgcctacggctacggcaacaacgtgggcgataccggcaagttcacgctcacgctgaagcgtgagggcgatgggccgtggctgatcttttcggacatggacaacgccaacgcgccgccacgggcgcggtga

SEQ ID NO: 504406 - DNA, 810 bp, Stenotrophomonas maltophilia
atgcaggcaatggccgaccatacgatacccactggcgctgccggttccgaggcgggctggaccttcatttcgctgcgcccgcggggccagaatgcgacgctgcgccgcgccgttgctgggctgggcgggcatgtcgtggccctgccgccctggcgcttgcaacgcctgcagggcacgccagtggtgcgccagctgcaacgcgcgctgaactgcgatcgggtggtgttcaccagcccggctgcggtggccgcagccgccacgctgctgccgctggccgaggcgcagcgcagtccttggctgacggtgggcgaaggcaccgcgcgcgcgttgcgggcgcagggcattgaccaggtgcatgcaccgcagcggatggacagcgaaggcctgctcgccctgccggttctggcgcaggtgcagggcctgcgcatcggcctggtcaccgcccccggtggacgcggcctcattggtgcgcagctgcaagcggccggcgccaccctcgaacgcgccgacgtctatcagcgccgtctgctgggcctgccaccgcgtatgttggcccggctggagcgttcagcgtatccctgggtgcttgcggtcagcagtggcgaagcgcttcagcatttctggcgccagattccgcctgtgctgcagcaccgcctgcgggcacatgccagcatcgtggtcgccagcgaccggctgggtgaacaggctcgcggcctgggcctgcaccgggtcgtgcgcagtgccgggccaaccactgaacaattggtcgccgctgcacacgccacgctcaccggcccagcagcgacctga

SEQ ID NO: 504407 - DNA, 468 bp, Stenotrophomonas maltophilia
atgaagcacgtccccgtcctcctggccactgcactgctggccgtgtgcgtcgatgcctccgctgccagcacgcccaccaccgcccagctcgaagcccacacatggcagctcacccgcgccacagatgcaaagggcaggcgcatcggcgcgttgttcgtccgcggtcgcgcgccctatacgctgcacttcgggcacggttacctgagcgagttgaacctgtgcaacaacgtcagcagccagtaccggatgcagggcaacgcactgatcctggagaacggcatccagacagtggccggatgcatgcgtggtgacatcgtcgtgcagcaggaacgtgctggaacgctgatgagcagccggagcccggcaccgacgcttgagctggatgaccgcggcgcgctggtactgcgcaacgcgcagggcgacaccgcggtgttcgaaccggcaccgctgccaacgaatggaaggtag

SEQ ID NO: 504408 - DNA, 534 bp, Stenotrophomonas maltophilia
atgaagattcttgccctctccggaagcgtacgccggcggtcgaccaacaccgctctgctgatggcgctgaaggccatcgcaccgcccggaatggagattgaggtctacactggcatcggcgaactgccggtgttctccccggatctggaaggcgccgacgaacctggcagcgtgacctgcttcaaggcggccatcgcgcacagcgatggcgtgctggtatgcagcccggaatacgtgcgcggcattcccggcgggctcaagaatgcgattgactggctggtatccggcgaccagatcgtcggtcggcccattgcgttggtgcacgcgtcccatcgtggcgaggacatgctgcaggaactgcgcgcggtgctgtccacggtcagtgccgcgttcagcacaacgctgttcctgcgtgtaccggtgcttggcctggagcccgagcaggtgattgacgtactgcagtcgaaggtgcaccgcgccgacgctgatacgttcctggcgcggtttgccgattactgccggtcaatcgtgtag

SEQ ID NO: 504409 - DNA, 1122 bp, Stenotrophomonas maltophilia
atgaacctgttgttcccgctgggcctggccgcgctcgccgcatggctgctgccgttgttgatccacctcgcccgccgccatccgtacacgccgctggatttcgccgcgctgcgctggctgcgcgcgcagatccgaccgcgccagcgcatccgcttcgatgactggccgctgctgctggtgcgcctgctgctgttggccgcgctggcgctgctgctggcgcgcccggcgctgacgggccctgcgccggtccccgctgcgtggaccgtggtggccccaggactggatgccgccgcactgcgtggcaccgtcaacgatggcaactggcattggctggcaaccggcttcccctccatcgaccagtcaccgctggcctccaatgcctccctgcccagcctgctgcgcgaactggatgcccagctgccggccggtaccgcgctgaccgtgcacatgcccgatccgctgcccggcctggacggcgcacgcctgcagctgtcgcgcgatgtgcagtggcgcccccatgccgtggcggccacagccacacaggccgccacgacgccgccacggctgcgcgtgcacgccaacgcgcccgccggggtgcagcgctggatcggtgcactgcagcgggcctggggcgtgcaggcaccctcggcaccgttgacggccgatgccttgcccgaacgcggcgagatcggtgtctggagccgcagcgacgcactgccgccgcactggcaggcgtggctgcgcgacggcggcagcgtactgagcgctgcgaaacctgccaccgaggccagtgtgctgctgcgcagcgccgatggcgcgccgctgctctggcagcagcgcgtcggtcacggacgcttgctgtcactgcccggtgactgggacatcaccacccatgccgcgttgcgcgacgcgcagctgccacgctcgctgcttctggcactgcaaccgccatcgcccccacgcgtgggggatgcaacagaccacgcgccccgccagaccgctctgccgcccgcaacgccgccgctgcgtgagccgaccgcatggctgttgctggccgtcgtgctgctgttcgccgttgaacgctggatggccagcagcgcccggcgcagggtggcagcatga

SEQ ID NO: 504410 - DNA, 1809 bp, Stenotrophomonas maltophilia
atgaacgcctccggttcgagcctgtggattgcgctgctgctcgccctggtcgtggtcatcgccagcgtgcgccagttgcgtggaagcacaacgcacccaggccgccgctgggtcgtcatcgcgctgcagatcgccgctgccacgctgctgtatttctgcctggtgccacctccccatcagcgaccggccgccggcctggtcgtgctcggcgccgaggccgacaaggtgggcgcaccgccggccagcgaaggtccgctgctgctgttgccggaagcgggcgatgtacctgatgggcagcgtatccccgacctggccaccgggctgcgccaacaccccgcctccacgctcaccctcgttggcgccggcctggtcgcacgcgatcgcgacgcgacgttgccgggcgacgtgcgctggcaggcagcacccgcaccgcgcggctgggtcgcgctgcagccaccggccgacgttgctcccggtggccgcttcgaggtacaagcgcaggcgcgtggcgcggcaaaggcgaaggccgagctgctggacccggccgacaccgtggtcgatcgcgcggacgttgccaaagacggccgcgtccagctcactggcatcgcccgcgccgaaggccgcagcgtattccggctgcgcctgctcgacaccgaaggccatgtggtggataccgtaccggtgccgcagcagaccctgccggcagcgcccctgcgcctgttggtgcgtgccagcgcgcccggcccggaactgaagtacctgcggcgctgggccgctgacgcgggcctgcgcgtgcaggtgcaggccgataccggtgcagggctcagcgtgggcgatggcgtggtttcgctcgatgctgcaacgctggcgcgcggcgacctgctactgctggacgaacgcggcctggcggccctgagtgcaggccagctggccgccgtgcgtcaggcgctgcgcgacggtctgggtgtactggtacgcagtgcgggggcaccttcggccagcgcgcgccagcgcctgcacgatcttggcctgcccgtgcagggcgatggcagcagccacaccctcgaacttcccggcgacggtgacaccgcggtccttgccgcgcgccgtggcccgcttgccgccggcacactcccaaccggctacggcgaagaggccgaccgcagctcgcacagcgctgcgctgccttcgctggaagcactggcattgcaggcaccgggcagcaacgcactgctgcagggtcttgatggcaaggccgtcggcggctggcgctcggccggcaagggacgcatcggcctgctgcccatcaccgacagctggcgttgggtgctggcgggccgcgatgaccgccacggcgaactgtggagcggcgtggttgccacgctggcacgtgcgcagggcagcggtgatgcgctgtggtcaccacaagcgattgcctgggccggcgaacggcaggcgctgtgtggcgtacaggcgccgctgcaggccttcgacccgcgtggcgacggcgtaccgctgatcgtcgatggtgcgacatcggcgctgcgttgtgccggctggtggccacgtggcgcaggttggcagcgcctgcagcatggggacagtatcgtctggcgctatgcattcgacccgaaggacgcgcccgcactgcatcggcaggcgatgatcgatgcgaccacgcaggcgctggcccgcagcacgcccgcgaatgcacaggccacgcagccggtggctggctcgcgctggccatggtggctggccttcgtgctgtgcgcctcgctgctgtggtggctggaacggcggcggtga

SEQ ID NO: 504411 - DNA, 2067 bp, Stenotrophomonas maltophilia
atgcccctttcattgctggtgattggctgcgtgctgctgctcgccctcgccctgtccgccaccgaattccatcagcgacagctcgatcatcgcgccctgcgaaggcttcgaggctcgcaagcggcgcgccagctggacagcgccgaatacgacgctctcgagcccttcagattgaccggccagctcggcccgtccaacagcgtgtaccgcatcgaaggcgagcacagcctgcgcgaggtcgacgcacacacgaagatcgagcgactgggcagcgtgccggtgctgctgccgtatggcatgcggcgccatctgtccgcgcggaaccgtgcggatgtcgtgctgggtcgctcattcgccctggtcgtctggctgaacggccatacgatcaccggcgagcgtgaacgtgaaacgcaggcgcagactgaccgatgtgtctggctcgagaggggtacccggcagcccacgcccgggccctgcacggtggacactgcgcagggaagcccacgcacccggcgcgaggagacggaggcagaacgttccctccgccaaccccgctggctgggcatatcaagcgcagtgtgcatcgtgcttgcatccaccctgttctgggtgggtggtcagatgcgttggggatcgtcctgggggctgctggccggtggcgcggccatggccggggtcgcagtggcgctgcggcggcagagaacgcgcccgctgccgccgccggcgcaggtggtaaggatcgagggtgtcctgtccggcccggtactgcagggcaatggtcagatcgatggtgacgtgccacgggtcttcgtcgataccgtcgaagtgcacgtccctcgccactggtgcgaacccggcgtgctgccctttggtcgcaccgtcaccgccgacgtgcgcgaggaggatcgtgcactgctggcggtgtcacccggcccgtcccgggtcaaggaggcgctgcgtcaccctcgtcttccctgggctaggcacctgctgtggctgactgtggcggtcatcgtcacgctgtggtccctgggcaacggcgaaggcgtcattgaagacctgcgtgcctcggcggatgcactgcggccgtcacgcgtccggaccgatgcagtgccctctgatctgctatccgatccccccaggcgcggtgacaaggtgcagctgaccggcctggccacctgtggcgtgcagcggtcctgggcaggagacagagaggcacctgcgatcctcgactgcgggcaacgggtctggacaacatcccccgttgcgccaccgccggccgcgctgccgcccgccatcgcggcccttggcgatgagtccctgttgaaggttcgtgtatcactgcacgcacctgacgccctgtttctgagcgcacggcaggatgccaggcatgccgtgctggggagccgtcagctggtggatggactggagctggcatgccaggcgggcctgccggactgtggatacttccgcgagcgcgtgatggaactgctggcgacgccggttgcacggcgcagcgcagcacttcctgacgaggcggtcccgccgggagatggctggagggggtttgcagcgtccatgcaacgaatcgacgcttcaggcgacgcggccctgcacctgaccacgcccgacatggctgccctgcacgcactgcagcgcgccgtcagccgcagtattgccaggcagcagctggctgaactcacccatgcctatcgcgatgccccgcccggggtgatcctgcgggagcaccggccccgcccgacccttgctggggctgccgccagcgatccctggcaggcgctgggcctgacaagcgaccggctggtacacccgcagcctttcgacatggcaggctgggtcgtcaacgcttcgcagcaaggccacgcattgcatgtggacatcgacacagcctcgggatcatccccacttgccagcgccttggtacgcagcacgtggcggctgctggcggtgctgttgctgctcgtccagttgcgcatcctgatgcgatgtgggctccgggcagagcagcagcgtcgcgcattggccagccacatgcgcgacgactga

SEQ ID NO: 504412 - DNA, 315 bp, Stenotrophomonas maltophilia
atgcgcctcagtcccctcgccctgctcgccatcctgcctctggccgcctgcagccatgcgggcagcagtaccgcgcatgagaccacgccgccatcggcggccgacggtccgcatgagtgccagcccgacaagcttgaagccttcactggcaagaccgccgacgaggccaccgtgaagcagctggtcagcgccagcggcgcgcgcaatgcacgggtggtcaagcctggcatggcggtgaccatggacttccgccaggaccgcgtgaccgtgcaggtggatgcgcagaaccgcatcgaacgcgccagctgcggttga

SEQ ID NO: 504413 - DNA, 1992 bp, Stenotrophomonas maltophilia
atggacaccacgatgctgatcccgatgttggaacggctgggctggaccagcctgcagaccgtgctgctggtggccctggtgtatggcctgtgccgcgcgctgccgtcgctgtcggcggccacccgctgccgcctgtggtggctggtctcgctgcaggccgtgctcggcctgttctggagccagccgttgcagctggcctggctgccggccccccaggccgtggcgatgactgcaaccgaagtggtcaccgagacactgcacccgctggccccgcaggcctcggcgcaggtgctggcggcgatgccgatgcctgcggcggacgtgccggcggtggcctggtgggcgatcgcactggccgcgctgtggctgtccggcgtgctgctgatggcgttgcgcaccttcggtgagtggcgccgctgccgcgcactgctggctgcggcctatccctgcgaggaccaggcgctggtgcaggccctgcagctggcctccgatgcgcacggtgtgcgccctgcaccgcggctgtggatgagcactcaggtggactcgccgcagctggtcgggccgttccgcccggtgctgctgctgcccgcaggtgacaatgcgctgcaaggcgacgcgctggacctggcgctgacccacgaactacagcacctgcagcgtcgtgacctgcagtgggggctgctgcccgcattggcccagcacctgttcttcttccacccgctgctgcgcctgtcggtgcgcgaatacgcccaggcccgcgaggaagcagtggatgcggccgtggtcggccagcacggcgccagccgccaagcctatggccgcctgttgctgcagctgggcgtggccccacagccgcacctgggcgtggccagcgccgcaccgagcaccaccagcctcaagcgtcgcctgctctcgctgcagtcgcaccggtcctgcccgcgcctgctggcgatggcgttgaccgctgccgtggtggtggtgggcgtggcgccgatgcgcctggttgcggccccggtgccgccggcaccgcctgcgccgccggccgcaccgaaggccgtggttcccccgccgccggcgccgaaggttccgcctgcaccgccgatgtcggcgcgcgcgccggcggtgccggtggcccctgcgccgcccgccgagcccgccgacgttgaggagctgtccggcccggacgatgcggatgtggcggttgacgtggatgtcgacgtcgacccgggcatcgacggcggccgcagcacctcgcgcagttcctccatcaccacctacggccgtctggatctgggccagtccccgtcgcaggcattcgtgctggtggatggtgattcgaccttcgccaacggcggcatcgacgatgtgacgctggcacgcaaacagctcggcaagggcccggcgctgtggttccgccagggcgacaagcgctacgtggtgcgtgatccgatgatgatccagaccctgcagcgtgcctacagcggcgcggtcgatctgggccgccagcagagcgaactgggccgccagcagagtgcgctgggtcgcgagcagggcgaactcggcaagcagatgggcgagatggggcgtctgcagagcgaggaggcacgccgcatcgcactggccgctgccgaggccgcgcgcaacgcgatggccgcgcatgacatcaaccgcgaggcggcggcggaagcggcgaaggcggcgcgcggtgcgaccagcgatatcgccgttgcgcgagaggctgcgcgcgaggccgccgccgaggcacgtcgtgcgatgcaggaagcccgcagcgaggccgcgcagtccggccgtacccgtgacatgcagcgcctggccagacagcagtctgaactggccaaccgacaggcggcactgggcagccaacaggccgcgttgggcgagcgtcaggcgcgcgtgcatgcgcaggcatcgcagcaggcacagcaggtgatcgcgcgcgcactggccagcggcaaggccgagcgactctga

SEQ ID NO: 504414 - DNA, 354 bp, Stenotrophomonas maltophilia
atgcaccgatcccacgccaaccccgcttcgccacgtgtactgcgtgtggagtgcatgcgcctggactgcggaggcgctgccatcgtggtggagttggaccgcatccctgaacgggcgtggatgaagtcattgaagcgggcactgcaggccgacgatctcttcgagggcgcacaagccaaattcgacggacgtttcgtttacgtcgtgggcgtcgagggcagcgagcatcgtgcgcagcatcgggtggtgcaggcgcttgaaatgccgcaggcaatggtcaatacgtcgcgctcacgcattccggtggcggacgcgcggcatgccggcagggttgacgctcaggttggccattga

SEQ ID NO: 504415 - DNA, 396 bp, Stenotrophomonas maltophilia
atgcaacccgatatgaaccagcggaatcgatacagtctgctgctggtggaagaccaactggaccttgttgccctcatgggacaggcgcttgaagagggcggtggccaggtaacacacgcctacagtgtgttcgatgcattggggctgctggatacgcagcgattcgacggtgccgttctggatgtggagcttcgtgacggtgtggttttccccgtcgccgatcgcctggctgaactcggcatcccctatctgttcgtttctgcggtgtacgaccagctggtgccgctgcgccatcggcgtgccacctttgttgccaagcctttccatatcgagcgattgcaggaggctgtgcagcgtgtgatgggaaacgacggcgcacccgccatcactcactga

SEQ ID NO: 504416 - DNA, 399 bp, Stenotrophomonas maltophilia
atgctgttcgacaagtatcgacagttctacgcgcagccggcagacctgccattggcaaggcaattcatgcatgcacgcctgtcagaaggcgattcgcttgtactggtggccgaggcagatggggaccgccttgtcgggttcacccagctgtacccgctgtttgactccatcagcgcacgcccaagcttcgtactctatgatctttacgtcgacagaccagcacgtcgcactggtgttgcccgcaccctcatgatcaacgccgttgaagaagcacgaagacgcggcgcagcgcgcatcgagctgcagacggcgaaggacaacgcggctgcgcaggcgctctatgcaggactcggatggcagcgcgatgaggatttcttcatcttcgccattcatccttga

SEQ ID NO: 504417 - DNA, 630 bp, Stenotrophomonas maltophilia
atgattgccttgtcagagccttactcagcgctgctccgcctgcagttgtgccccgaagatctctccagatggctgtccgcgcccgtgcccacagcgtcccgatggtccgactggcgatgcatcgccgggcagtggcacctgggaaacggtgaatacctggcctcttcaagcgacgaggcgttggatcacctgcttgcggactgccaggcgctgctggcccgctaccccgacaatcgcgccgcattgaaagccttcctggcctctgcacaggctgagaacatccgggtcgccgcccatgaccgcagcagcacgcactttgttgcaggatcgctgacctattcagaaagcctctacgatctcattgcgtttcttgcggtggcacgaagcgccgccgacttcctgaaggcaggtgaccagggggtggcgctgatccacgactatctctgggccgagaacgatcagcgggagaccattgccgcgattgcgctggcaggccacggcgaatccagcttcctgtcttccactgacctggataccgccaccgcatccttcgagacattggtggaggccatgctggaagaccgggacgacccggagtttcatccgcgcaaccagctcgatcgactttga

SEQ ID NO: 504418 - DNA, 984 bp, Stenotrophomonas maltophilia
atgagcatcagcatcaacgacgtcgcacgcgtggcgggggtctccaaatccacggtgtcccgggtgctcgggggcggtccggtcagcgaggacgtgcgcggcagggtcgagctggcgatccggcagaccggctatcgacccaacctgcaggccaggcggttgcgctcccggcacaccggcatcatcggcctgatcgtcgcggacatccgcaatccgttcttcacggcgctgatccgcgcggtggaggaggtggcctatcgcgaaggattgcgcgtgaccctttgcaacaccgacgaggacccggagcgggaggcgctgtatctgcagttgatgcacgaagagcgcatcagtggcctgatcttcgcgccgacccggaccacggtgggccggctcgaacggctcacgctggattatccaacggtgctggtggaccgcgccgcccccggcgggtcgatcgacagcgtggtactcgacaatccggcagcgatggcgggcctggtcgagcatctggtcgagcgcggctatcgccgtatcggcggattgttcggcagcaccagtaccacggcggccgagcgtcgcgacggctatctcgctgcgatgcgcacccatgggttgcagccggactaccgcgaggttgaacccacggccgaagccgccatcgcgacggtcgggcagtggctcgccacgccatcacgccccgaggcactggtgaccagcaacagcctgctgttgatgggggcattgaaagccgcccgcagcgctgggctggcgattcccgaggcgttggcgctggccggcttcgacaacgaacgctggaccgaactggtcgagccgggcatcaccgtgatcgagcaaccggttgaggagatggggcgggccgcgatgtcgatgctgcttgaacgcctgcgcacgccagcactgcctgtgcgccggctggtgatgacgggtcggtgcgtgggcagagggtcgacggctgcgcgatag

SEQ ID NO: 504419 - DNA, 1254 bp, Stenotrophomonas maltophilia
atgacccgctcttcccgacacatgttgccgatggcgatcgcgcttgccctgccatccctggccgccaccgcagacgcgagcgacgtcttcactcccaggctcgcctacaccggcgaggcggccgccacgcttgacggcggcaagcgcagcggcacggcctatgccggccagctgatgttcggtgccgacgtggacctggacgccgcgttcggctggcggggcgcaacgatcaaggcttacggcatcaaccgccacggcaccaatctcgccaacagcagtacgggcaacagcacctcggtgcaggagatctacggtggccagggaacgcgcctggccaatctgacgatcgagcagaaactgctcaacgaccgactggtgctggaagcagggcgaagcgtcgccaacatccatcatctcggttcggagtggtgccagtacttccagggcaactcggcctgcggcaacccgacctatgtgttccgcaccagcagcttcacatggtggccggtatcgagctggatggctgatgccacggcatgggtgacgccggatgtctacgtacgcgtgggcgcgtaccaggtcgacccgagccaggccgaagatggccagcacggcctgaaatggagcacgaaccaggccaccggctgggtcgtgccctacacgatcggctggcgcagccccgcgtcggcgcgcttgaaggcccgctacgaactgggtggctggcaggacaactcgacctaccgcgacccgctgcgcgatgccaacggcatgtcggcgctgctcagtggccaggagtacgcgacacgtcatggtcgctccggtgcgttcgcccgcttcgagcagcagctcagcagcgatggcagcggtcgtggcctgaccctcttcggtgccgcactcaagggtacctccggccagttgatcgaggatcacttcctgcaggccggcctggtgcagaaaggcacgttcgccagccggccgcaggacagcatcgccttcgtcgtgacccagcagaagtacagcagcatcgcgctggagaacctgcgcctcgcccgtgccgcggcgggtggcagcggtaccccgcacgggagccaggtgatgatggaactgagctatggcatccaggtcaccccgcagcttcgggtcgcacccaacctgcactacatcgtgcatccggaccagttcaacgaacccgcacgccagcatgatctaccgaatgcgctgatcgccggcctgcgggtcgattggagtctgtag

SEQ ID NO: 504420 - DNA, 1215 bp, Stenotrophomonas maltophilia
atggacgtaggaatcctgggtggcggcatcgcaggcctgagcgtggcccttgccctccacaagcaagggcacagctgcttcgtatacgagcgccgcaccgcaccatcaaccatgggcgccggcgtgacactctggcccaacgccggcttcgtactgcaggaattcgggctgctggaggacatgggtgcagtcggcggccggccgacatccgtgcaccgctggaatgcagcgggtgacccgctgggtggcctggatatcacgttgctagaccagatcatgggatacccgacccatacgattctgcgcagggacctgcaggcggttctgctggatcatgtgatgcgagcgcgtatcccggtggcgttcgggcattgcgccgaaacaattgagctggatgccagcggcaaggccgtggcgcggttcaacaatgggcacagcatccgcccggatctgctgctcggcgcggacgggcgcatggattcggtggcgcgcaggttcgtcgcgggggacaacacgccgatctaccagggcttcgtgaactggatcggggttgcacagggcagggcactggcaagcgacatcaggatcgatgactactggggtgccggggatcgtttcggctgcgtcgccgtccgcgaagatcgggtgtattgggcggccgcgcaggcgcgcccactccctgcggcgtcccccgccgcgggcatgcacgacgaagtgaggtgcttgtttgcaggatggcccgagcctgtcgaccgcctcatcgaggccacgccggcgcacgccgtccagcgggtcgccgtgcacgaccttgagccgctgcacacctggagccgcgcaaacgtgctgctcattggggacgcagcccatgcgccgctgccaacatcggggcagggagcatgccaggcacttgaagacgcctggcacctggcacgctgcattggcgggggcgatggctgcctggaagaggtactgctgcgcttcgccaccatccgcggccccaagactgcccggctggcagagcagggccgcatgttcgcgcgcggcctgttcgccaacgaccctgaaacctgtcgtatccgcaacgagcgcgccagggcatccgacccaatgcgcgacgcgctggccatggcggcaggatggtcgcagggcctgccgatggccgaccgcgttgaaaggctggcggcaaacagtgcaggcagcatgtatcgcctatga

SEQ ID NO: 504421 - DNA, 936 bp, Stenotrophomonas maltophilia
atgcgcagtagtttcgacctgaacaccgtccgtgtgttcgtggccgttgtagacgagcagagcttttcgggtgcggcgcgcctgctggccctgccttcatccaacgtcagtcgccatgtcgcttcactggagcgcaacctgggcgttcgactgctggagcgcagtacccgccacctgcgcatgaccgaagccggcaccttgctatacgcgcgcgccaagcccctgctcgataccctgctgtccaccgaggaggagctcggcgcggtgcagcgcgaactgaagggtcctctgaggatgtgcattccgaccgaagcgccacggctgctcgcgcccatcctcgccgagttctgcagtctccaccccggcattgaattggagtgcgacacgcgcctgaccggcctggaagtgctgcgcgaagacatcgatctctccctgttcttccaccgtggcccgcaggatgacagtgcgttcatcacccgtgttctggcgacattgcccagcattgtggtggccgcgccggcgttgctggccaggactggcgtgccgcatcgggtgcatgaactcaagcgcttcccttgcatcaccaccgcaagtgccctgaaggggcagccctggcagtttctcgacgccacgggaaacatcgtgaaggtgtctgtgcgcagccgctatcgggtcaacagtggggagttggccgttgcgggcgcacgccaaggcctgggctttgccatcgttgcggcccatccgtgccaggacgacattgccgacggccggctgcaggaagtgcaactggatctgctacctgcgccgctgcaactgcttggagcctatagccatcgccattcggtcatggcgcgggtccgggcgttgctggaattcatccaggcccggctgcaaccggcagcgcctgtgttgcgtcccgatcaatccgggcggtga

SEQ ID NO: 504422 - DNA, 225 bp, Stenotrophomonas maltophilia
gtgaacctctccggcggcggcagcggggcatcggcaagcgccgggcccgcagccagtgcagcaatgagcgtgatgagagccttcatttcactgcacacctcgatcaagtggccgccgaagcggaaactaagcggcgtgtacgtagggcgctaccgccgcagcaagcacatcgattccccacgcggagcctgcgatttcctcgggctggcttctcttgaagcgtga

SEQ ID NO: 504423 - DNA, 870 bp, Stenotrophomonas maltophilia
atgtccgcacctacgtcactgcgggcgcaggccttccttgatgccttttcgctggaggtaagcgccaaggccatgccggcgctggctgccgaagccgcccgcattccgcgtggcacgacgatttccattccctggctggccagcgaggacgacgacgcacgcctggcagcggcgcgcagggtgcgtgaactgggcttcgagccgatgccgcatctcccggcccgccgaatcgggtcgcgtgccgcgcttgagcggttcctgcagcgtgcctccagcgaggccggtgtcgcccagtacctggtgatcgccggcgatctggctacgcccgccggcccatttgcagatagcgcttcgatcatccagacagggcttctagagaggggcggcatcaaggtcgtcgccatcggcggtcatcccgagggccatccggtgatgggcagtgacgagtgctggcaggtgctggatcacaagtgccgagccatcgaagcacgcggcatggcgccgatgatcatcacgcagttcgccttcgatgccgacgtcgttctggcctggttggacgcgctgcgcgcccgtggcatcgatgttccggtactggtcggcgtgccgggtccggcaagcatcgcgcggctggcacgctacgccgcaatgtgcggggtgggtgccagtgcatccatgctggcaaagtacggcatctcgatcggacgactgctcggaaccgcggggccggaagtattcgtggaccacctggtgagcggtttgactgaggcccacgggttggccagcccgcacttcttcccgttcggtggtattgcccaatcactggactggatcaaacggcatcgggcgcaggcgtcggttgcccgccgctga

SEQ ID NO: 504424 - DNA, 486 bp, Stenotrophomonas maltophilia
atgaacccacagggcaccgacgccaccctgccggccgtcctgcagccgttgcagcaatgggcggccagcgagcggctgagtggcgccacccgcatcgcccagtcgcgcatcgacgccttcgccgatgccacaggcgaccacaactggatccatgtcgatccggcgcgggcgcaggcacagctggcgggtgggcgcaccatcgcgcatggcttcctgctgctctcactgaccgtggaagacgacgtcgccgccctcgccggcttccccggcatcgcccacgtgctcaactacggtttgaacaaggtgcgcttcctggcgccggtgccgagcggatcggaggtgcgcgtccgctcgcggctgctctcgctggagctgcgccagcccgggcagtggctgctgacccagcacaagagtgtcgaacggcttcccgatggtgatatggcactggttgccgagcagctgtcactgatcgtgatcgcagcctag

SEQ ID NO: 504425 - DNA, 183 bp, Stenotrophomonas maltophilia
atgaaagtcaccctcgccgcctctgctctcgcctgcactcttctgctttccgggtgcaccaccagcgggtggttgcatgctgccagtggcgtgatggacgccaaggacgcatacgaaaaacaggaaagactggatcgcatcaatcgcgcgaacgcggcggccgcccgggcgcgcagcaactga

SEQ ID NO: 504426 - DNA, 927 bp, Stenotrophomonas maltophilia
atggtcacccaacgccaactgccatcgcttgccgccatccgtgccttcgaggcggcggcgcgactgggcagcttcgcgcgcgccgccgaagagcttgacaccagtgcggcgtcggtgagctaccacgtgcggcggctggaggcccagaccgggatctgcctgttcctgcgccacgcacagcacgtggaactgacggtggcgggtgccagcgtcgcccaggaggccacccgggcattcgatgcactgcgcgccagcttcatgcgcgccgctgacagggatgcggcgcgactgcgcctgtccgtgctgccgacgctgggcaccagttggctgacgccgcggctgggcacgttccgcgcccgccaccggcaattcgtgctggaactggacctgtcggcagcgccgcaggatctggccgccggccacttcgacgccgccatccgcaatggccagggcgaatggccgggtcttcaggcaactcccttgtttcccagcgtgttcacaccgttgtgtgcgccggcgctgctgcacgaggcgcgtgggctgggcagcagcgcgctggagattcccctgctcgggcggccggactggtgggccctgtggtttgccgcgcacgggcaccatccaccgccggcaccggagagtttcgtcgcgccctttgccgtcgagcatctggatgtcggcgccgcgatcgccgggcaaggcatcgcccttggttcgccgatcctgttccaggccgagctggacagcgggcggctggtgcaggcgcatccgggcgtggccagcgacggtcgcggcttctggttcgtggcacccacggcgcgaggtggcagtgccaaggtcattgcattccgtgactggctggtcgagcaggccgccgaggcgcggcacgcagcccgccattacctggcccgggcggtaatgccatga

SEQ ID NO: 504427 - DNA, 156 bp, Stenotrophomonas maltophilia
atggtcagtgatcttccggatgcgtctgtccttcccgacgatgtgccgaacctggagacccggtcgttgcaattctatgcccggttgatgaaagcgtggatcgccatgggcctccgcagcccacgcatcgaagtcgcgggagatacccatgtctga

SEQ ID NO: 504428 - DNA, 531 bp, Stenotrophomonas maltophilia
atggacggcaccaccctcattcgtgacctggcggcacccctggcgctggccctgttgtcggtcgccatgaacgcagccggttccggcgcgcgccaagcagtgaaggcacaaccgggcgaaatcgtcctgttgcgcgatgtgtcggcgcgccccgcctaccggatggcgccaccgggcatggcgctgattgccgatccaaagcctcagcgcgagatcgccgccgcgcttggcacccgcgccggtagcggcgcaatggacgagctgagcgacgaggactatgcaggcatgggtgcagggcacgccgctccggcttcggcgccgggggggacgacggtcgagcgcgtcacgcagcaggcccttggtggcacgctcggccgcagcagcgacggcatggccggcagcagcctcggcggcgccatgagcggtccgctgggcgcggtgggcaacagcacacgcggcattggcgatacggtgcgcggcgccctcgcccagttcccgctgcagggtccggccccggcaggtggcaagtga

SEQ ID NO: 504429 - DNA, 885 bp, Stenotrophomonas maltophilia
atgcgcatcggattcctgggacttggagtgatgggaacgcccatggcggcccatctggctcgcgcaggttacgaggtacgcggctggtcgcgctcagaccgcaaccatgctgccgcgcgcgccgccggcatcgacgtctgcgaggcagtggacgaagtattcgcggcctgcgaccacctcatcctgatgctggccaacgacgatgccatcgacagcgtgctcgaccgccatagcgcggcgttcggcgagcgggtcgagggccgcctgctgatcaacatgggcaccagctcggcagcgtactcgcaggcgctggccgagcagatccgtgccgcgggcggccgctacgtcgaggcgccggtgtccggctcacgcgtacaggccgaagcggcgcagctggtgatcctgctggccggtgcggatgccgacctcgcggcagccgccccactggttgcaccgatgggcaggcaaacggtgtgctgtggtgcagtgccgtccgcgctgcgcatgaagctggcggtgaacctgtacctgatcaccctggtcaccggcctggccgaagcggtgcacttcgccgaagcccacggcatcgagctggaccgcttcgcgcaggtgctcaacgcagggccgatggccagcgaagtatcacgcatcaagctggacaagatggtccgtggcgacttcagcgtgcaggcgtcgatcaccgacgtgcgcaagaacagtgggctggtagccgctgccgcccatgaggtcggcatgcatgcgcccttgatcgacgccagcgacgcgctgttcgcacaggcactggcgtccgggtcgggggcgctggacatggcggccgtgctgcaggctgtacgggccgggccaaccggcacgggccggcgctga

SEQ ID NO: 504430 - DNA, 1161 bp, Stenotrophomonas maltophilia
atgatccgcagtgtctgcctggctctgctgctgttgctccttccttttcctgcgatgccagcaccagcccctgcaccggttgaagcacgggtacccttcgcgccgacgcccttcgtcggcagcgacggcctgcgccatctggcctacgagctgcacatcaccaactactacggcgataccggtgcgctgctgccgcaatcgctgcaggtgttcggcgacgattccagcattccgctgctgagcctggatggccctgccctgcgccactgggtacggccatcgccttcagaggatggggcgatatccattgcaccgggcaagcgcctggtggtgttcctgtggctgtcactgcccgccgccgatcgcgtgccgcataccctccggcaccgcatgctgctgggcaccgagcaccacggcagcgtggcgctggacggcgcccttgttgcggtcagcgcggcgaaggtgatggcgctcggcccgcccctacggggtggccgatggcttgcccatgaagggcccggcgcggcgcagtcacaccattggggcagcctggtggcagtgaatggtgacctgaccattccgcagcgcttcgcgctcgatctggtcggcgtcgacgaacaggggcgcgccgtgcgcccaacggccagcgatctggagcacacccgccattcggattgggtgggctacgcagcacccgtgctggccgtggccgacggcatcgtgcgcgcgacacgtgacgggcaacccgaacatgcgcccctgaccgcgcaaccggaacccgcctcgctcacggcggatggcttgtttggcaactacgttgtcctggaagtttcaccgggcatctttgccagctacgcccacctgcgcaccggcagcatcaaggtggaacccgggcagcgcgtccagcgcggacaggcgctggcccagcttgggcagtcgggcaactccgccgccccgcatctgcacttccagctctccaacaaggcaacgttcgaaggctccgagggcatcccctatgtcttccaggctttcaacgatttcggccctgaaagcgaagcgcagctgttcggccaaggggaggcctggacacccggcgcgaccgcgcagcatgggagtcagctgccgctgaacgacatcgtcattgagttcccgccgcgctga

SEQ ID NO: 504431 - DNA, 456 bp, Stenotrophomonas maltophilia
atgcctgccagcgcgaacccggcgccgcccatactggcgggtgccggtgccgccgcgctggtgtggttccgcagcgaaggcccgcgtcacgcaggccgcgcgggggctccggcatcactggccctgattggcctggccgtctgggcggcggcactccccaccgccaatcctgccaccctgcagcgcctgcttgccttggctgcggcactggttgtcatcctgctggcgctgcgcctgcacgccgtcgtgggcatggcgcgcaggctgcaggcccgggttgaggcgacgcccatggcatcgcgctggagcaagctgccggcttctgtatccgcgctgatggtgcagcagttgcacgacctgggcgcagtcgagcccagccttcagcgcacgctggtgctggccaccctggcctgggcagcggacgaggaagcgcaggcgatggagcaacgacgatga

SEQ ID NO: 504432 - DNA, 774 bp, Stenotrophomonas maltophilia
atgacgctgccctggatgccgccacttcccgcccttgccatgacgctgcagaacgcaatgaaacacgatctccgctcccgacaggcacccctggtgctgattgccgaagatgaaggcgaaattgccgacatcctcggcgcctacctggctcgttcaggactgcgcagcacccgcgctgccgacggcgaggccgccctcgccagccaccgccagctgcgccccgacctggtgctgttggatgtgcagatgcccaagctggacggctggcaggtgctgagcgaactgcgccggcgcggcaacacgccggtgatcatgctcaccgcgctcgaccaggacgtggacaagctgaccggcctgcgcgtgggtgccgacgactacgtggccaagccattcaacccggccgagatcgtggcacgcatccaggctgtactgcgccgcagcgcccgtaccgtggtcgaagaacccagcgggctgatccgccaggggccgttcgagatcgatctgcgcagccacgaggtgacggtgcgccttggcgagcaggttcatgcactgaacttcaccctcaccgagttccgcctgctggtgcacatggcccgcgccccacgccaggtgcatgcacgcgttgacctgctgcatgcctgcctgcccgaaggcgatgcgcaggagcgcaccgtcgacagccatgtcagcaagctgcgtcgaaagctggaagacgtcggcgtgatcggcattcccgccaccatccgtggtgtcggctatcgtttcctggactga

SEQ ID NO: 504433 - DNA, 609 bp, Stenotrophomonas maltophilia
atgcaacccgagatcccggcgccggcccgtggccgcccgcccaccatcactcccgagcgtctggctgacatcggcatcaagctgggcctgccgaacctgaccatggccaacgtggccgccgagctggcggtgacccaggccgcgctctacaagcgtgtggccaacctggaggccttgaagcggctggtggccgatacggtgttccagcgctggcagattccgcgcgcgtcggtcgaggcgccgggtgggctgcagggctacctgatggtcttcgtggaatcgctgtgcgaggtggtgaaagcgcaccctggattgccgccctacctgttgcggcgctcggtggcgaccacgccgatgctggaaaagatcgcctcgcaccaggcccatgtggccgaagtattcggcctgccgttggacaaggcgcgctgggtgctggccacgattgcgttctactgcattgccggtgcggacacggtgtatgggctggtggatgacgaggccgaagcgttgaccgggcggcgcgtgcaggacgaggaagtgattgccgagttcaggcagggcatgcgtgcgctggtgatcggctcgctggacgtactcggcgtccggtag

SEQ ID NO: 504434 - DNA, 2424 bp, Stenotrophomonas maltophilia
atgacccgccctgtcccacctgccgccctgcgccggctggcccctgccctgctcgccgcctgcctgtgcacggccctgcctaccatggcgcagagcgctgcatccgcgctcgtcgagcttcacctgcccgccggcccgctgcatgcgtcgctcaatgcgctcgcgcgccagagtggcatccagctgttgttcgccgccgacagtgtgagtggccgcagcgcgccggcactggatgggcgctatgcaccgcgcgatgcgctgcaacgcctgttgcagggccacgacctgaccctgcaggaacgcgtccccggggtattcgtggtcagtgcaactgccgcacagaccaaggccaggcccgacgcaacgatacgccccgccgcaccggccaatccgacctcgctggcccgtgtcacggtctcggcctcgaccgctcgcatgccgcagggcgagacggcgatgcccaacaccatcacggtgctgacccgcgaggacatcgcccagcagctggcattgggttcggatgtgtcgcgggtgctctcgtcacagatcccggcgtttgccccggcgcgcgagaagatgtccaactacggcgaaaccatgcgtggccgcggcatcctctacatggtcgacggcgtgccacagtccacccccctgcgtgacggctcacgggattcgcacaccatcgacccggcgatgatcgagcgcatcgaggtcatccacggcgccaacgcgctgcagggcatcggcggtaccggtggcatcgtcaacatcatcacccgcagcgcgcccagcgagccgggtgccttcctgctcgacaccaatgtcagctacagctccgccctgcccagccgccacgacgacaatggccagcgcggctcggccctggtgggcgtgcgcggcgaacagttcgacctggttgccggcctggcctatgagaagcagggcctgtaccacgacggcgagggccgatcgatcggcaccaacgcgcagggcgagctgatggactcgacctcatcgaacgtgttcgccaagctgggctggaacattgccgaaggccagcgcctgcaggtgatggccaaccgctacgagctgcgcgggctggacaactacttcgcggtgaatggcgatttccgcaccggccgcccgacgatttcggtgcgcggtgacacgccgctggacccaccgatgaaccgctcgcgctcgctgaccgtggactacagcgccgcagacctgctcggtggccgcttccaagcgcaggcgttcgcggtcgacttcgagggacgctatggcgccagccagtgggacccgtggggcaataccggtgccaatgccgcctgggaccagacccagaacgaatcggacaagcgcggcttcaagctgacccagagctggagccgcatcgccgataccacgctggatgtgaccttgggcctggacggcctgcgtgaccgcacccaccaggtgctgctggccagcggcatgaactgggtaccgctgactacctaccagagcctgtcgccgctgctgcagctgcactggtggccaaccgaccacctgatgctgtccggcggcctgcgctacgaaaagggtgagctggaggtgggcgactacaccaccctgccccgctatggcgcgcgcaaggtgaccggcggcaagccgaccatgagcgaaaccctgcccaacttcggcgcggtctggtacatcaacgatcgtctcaacgcctatgcctcctactcggagggatacaccgtggccgacgtcggccgcgtgctgcgcgcgatcaaccgcgacggccagcgcgtcgagagcctcatcgacctgtcgccggtggtgtcggacaaccgcgagatcggcctggagtatgacgatggccgcttcagcagtgacatcgcctactacacctccgaatcgaagctgggttcggtgctggtctatgacccgggcatcgatgcttacgcagtgcagcgccaggcgacccgcgtggagggctttgaaagcaacctgcggttgcggcttggcgacagccggctcggcctgggctatgcccgtgccaacggccgctacgacgccgacatcgacggtcgcctcgacagcgacctggccggcgtcaacatcgcaccgaaccggctgaccgcgttctgggaacagggctggacgccgcagttcagcacccgcctgcaggccagccatgccttcgaccgcgatttcgacctgcgcggcgcacgagtggcagagttcaagggttacaccatggtggacctggtcgcgcgctacacgctgggcaagcacgcgctcacgctgggcgtgcagaacctggcggacaagcagtacatcagctactactcgcagaccacgccgtcgaacccaagttatttctccggccgcggccgggtgctgacgctgggctggcagtaccgctactga

SEQ ID NO: 504435 - DNA, 534 bp, Stenotrophomonas maltophilia
atgaagcttcctgctgctcttttcctgctgctggccgccagcgccgcgcaggcccacgacatccgtcagcacgcaccgcacgtgcatggccaggcgaccgttgatgttgccctcgatcagggcactctggatgttgcccttcaggcgccgggcatcggcatcctcgattacgagcgaccgccggccagttcagccgagcaggtcgcgctggcacgcgctacgtcgctgctgaagggcggcagctgggtaaccctgcccaccgctgcagactgccgtctgatcagcagtaaagcagatgccgagggcttcgatgcgcctgccgccgcgccatcggcaggacagcatctacacgcgggtttcactgccacgctgcagtaccgctgcacgaatccggccgcgttgcgcgccatcgtcatgcggttgcccgtgctgttcccgggcctgcacgaagtcatcgtcaacagtgcgacagccaacggccagaatcgcaacgtgctgacccccgacaacctgcgcgtggtgctggccccgtga

SEQ ID NO: 504436 - DNA, 2346 bp, Stenotrophomonas maltophilia
atgaccaggttgcactgtcgtctcctgattgccttcgccgctaccgcgatgcttgcctctggtgtggcccttgcggccacgccgaaaactgccgccgaacgtgcctatgccgcggtcgatccgttcatcggtaccggcggggaggggcacacgtacccgggcgcgacggttccgttcggcatggtccagctcagcccggatacgcgcatccagccgagcgagaaggcctatggctgggcagccgggtaccgctacgacgacagcagcatcgtcgggttttcgcacacgcatttttccggcaccggccattccgatctgggtgacatcctggtaatgccgttcaccggcaaccccgggctggagcgcggcgacccggaaaagccgcgcagcggctacgcatcgcgtttccaccatgacgatgagaaggccgagccgggctactacgcggtcaccctggacgactacaaggtgcgcgccgagctgaccaccagtgcgcgcgtgggcgtgcatcgctattcgttcccgaagggtgccgacgccaaggtgctgctggacatgcgcaccagcatgtacgactacccgggcaagatcctgtggtcacgggtgcgggtgcgtgccgatggcacggtgaccggcttccgcgaaacgcgcggttgggcgcccggccgtcaactgttcttcgcaatgcgcttctcgcgtccgatgtcgggccacgaattgcacagcaccgagcaggacatcgtctacaaggggttcccgccgccgggcgagaaggatccggcgcagcgtgcacagatcgagggccggcaactggtcggcacgttcgcattcggcaagctggatgcaccgttggtggtgaaggtggcgatctcgccggtcagcgaggccggcgccatcgccaatcttgatgcggaagtggccgacttcgatttcgaccgcgtgcgcgtgcaggcgaaacaggaatggacgcgggccttgtcggtacttgatatcgatgcgcccgagcacgcgcgccgcagcgcatataccgcgctgtaccacaccctgctgggcccgacgctgttcatggatgccgatggccagtaccgcgggccggacaatgcggtgcacaaggctgatggcttcacccactactccacgttctcgctctgggacacctaccgcgcgctgcatccgttgctgaccctggtgcagccggaaaagcgcaacagcgacttcatcaattcgatgctggcccaccatgagcacagcccctacggcatgctgccggtgtggtcgttccatggcctggaggactggtgcatgatcggctaccacgcggtgccggtgatcgccgatgcctacgtgaagggcatccgtggcttcgacgccgacaaggcactgaaggcgatggtggagaccgccaattacggcccgtatgacggtatcgcgcaataccgcgaattcggctatgtgccgatcgacgaagaaggcgaggccgccagcaagacgctggagtacgccttcgacgactggaccatcgcgcgcatggctcaggcgatgggcaagaccgatgtggcggcgaccttcgacaagcgtgccggcaactggcgcaatgccttcgacaaggacaccggcttcatgcgcgcgcgcaagcgcgatggcagcttccgcacaccgtttgatccgagcgccagtggctatggcaccgactacaccgaaggcaatgcctggcagtattcgtggtatgtgccgcaggacgtggctggactggctgcagcacatggcggcagtgacaagctgctggcgcgcctggatgaagtgttcaatgcaaaggttgatccgtccatcttcgagcacatggaagacattaccggcctgatcggctggtatgcgcacggcaacgagccaagccaccacgtggcctacctctattcgtacgccggtcagccctggcgcacgcaggcgcgcctgaagcagatcatggacacccagtacgccgatcgccccgatggcctggccggcaatgacgacgtgggccagatgtcggcgtggtacgtgttcaccgcgctgggtttctatccggtggcgccaggttcgggcgagtacatcctgggccgtccgttcctgccgaagaccgcgatgcgtcttccgaacgggaagaccttcaccatcgtggccgaggggttggacgacgcgcatacctatgtgggcagtgtgagcctcaatggcaagccgctgcagcgcacgttcctgcgccatgacgagattctgggcggtggcgaactgcatttcaccatgcaggccgagccgaacaaggattggccggggcagggcgcacaggcaccgtattcgatgagccggtaa

SEQ ID NO: 504437 - DNA, 2289 bp, Stenotrophomonas maltophilia
atgtccatttcagtccgcagttcgctcgccctgggaattgccagtgcactctgcatcacactgtccgcccaggcgggaaacctcatccccggtgagtccgccacggtgaacgcgggcgatcctgtagaggcttggacactgaacggcgccacattgatgctcgcgccgggcgcgacgacacgagacatagccgcagggaacggctcccgactgcaggtcaacggcgcgtccatcagcggcaccgcacagctgagcgatggctcggttggaaccttcaatggtgcgctggttaacaactcatccggcgctgcagccatcgtgcactcgggttcagagctgcaggccatgaattccgagttcaatggcagtggcgatgcgatccgccttaccgaaggaggcattctcagtcttgtgggttcccgggtgacggcatccggctccagcctgtttggttcagcggggatcagcttccgtcgtaccgctcaggcaagcgtcagtggcggcagcctggtccagggtgacgatcacgcagtgaccatcaccaatgacccacggggatccggcggcccttctccgggcaggagcctgttgtcggtcgacggctcgcatctggccagctcaaccggctcggccatccatgtcaccgagtgggtgaccccggcgcagttcggcgcagacatcgtgcttcgcaacggtacgacggtctcggcgggcaacggcgtgctgctggacaccaacggtgacgtcgatgtcagcttgaccgtggacgacagcgtgctgaccggtgacatcgtcaacggcgcaggagccaccacccaagttcgcctgcagaaccaggcacgcctgaccggggcgatgagcaacgtcagcagcctcgcgctggatgcatccacctgggtcatgaacggcgattcctccctgggccgtctggacctgggcaatggcacggtgtcgctgggcgatggcagcacgttcaacaccctcaccgtggccggagacttcatcggcaacgatggcacgatcgtgttcaacaccgtgctggccgatgacagtgccgccactgacaggctggtcatcgagggcgacaccgttggtactgcgaacgtgcgcgtgaacaacgtgggtggtgccggtgcgcagacccgccagggcatcgagctgatctcggtcggtggcgcctccaatggccagttcaacctggccggtcgtgccgtgggcgggcagtacgagtacttcctgttcaaaggcacaggggccgatggcaactggtacctgcgttcgcagcttccgacccagccggacccgtgcgaaaccgacccgacgctgcccgaatgcaacccggtgctgcccggcccggatccggacccggtgctgcgtcccgaaccgggcgcctacctggccaacctgcaggccgcgcagaccatgttccgcattggctatcacgaccgccatgccggccagaacgcaggccgtgcctgggcgcgcgtggatggctcccgcaatggcttcgatgcgatcagccgccagcttgacatccgcggcaacagccaggcgctgaccgtcggtgccgatctatggcgtcacgattcaggcagcagcgtgggcgtgatgctgtccagcggcaatgccaccagcacctccaccaatgaactgaccggctactacgcgcgcggcaaggtgaagggcgaagccctgggcgtgtacggcacctggcgcggcggcaacgatggcgacccgtatgcgggtttctacgtggatggctcggtgcagcgtgcacagttccgcaaccgtgtggaaggcatcggcctggacaccgagcgctatgacagccgcgcctggcagggtgcggtggagaccggctatgcgttccgcgcgggtggcgccagccatggtggcatctatctggagccgcagctgcaggtgggctacagccgctgggacagctaccgccacgccgaagccaacggtacggtggtgagtgccgagaatgccgatggcctgttcggccgtgcgggcgtgcgcctgtccggcgtgacccgatggggcagcggcaccaccgatgtacagccgtacctggccgccaactggctgcatacccgaagcgaatcgcagatccgcatggacgatgaggtggtggacgcgcgcattccgcgtaatcgcggcgagttcagtgccggtgcgtcgttgaagttcgccaacggcgtgggcgcctggggcggtctgtcgctgcagaaggccagtggcttccaccagaccagtgcacagctgggtgtcagttacagctggtga

SEQ ID NO: 504438 - DNA, 12390 bp, Stenotrophomonas maltophilia
atgtcgcacccactcacgaccgcattccgcccgtcctcaccgcgccgcaaccaccccatggcgtgggctgtcgctgttgcgctgggtacggcagtggcgccggccagccaagcccagcaggcgttcagcccgggctggtttgccgaccgtggcgcggcgcagggtgcggctgcacagagtggacggatgcccaatggcgtacccatccagttccagttgcccgcgcagcagcaggacgccgcgcggcagaaacttcagcagtcgatcgacaacctgggcaccgcagcgcaggccatcgcgctgcagcaacggctgcaggagcaggcccgtcaggcacggcgcgacgctggtttcgtggttgccgacggccttggcaaggacggcctgaacgttgatgagaatccgttgacccgcggctggatcaacgcgcgacaggccagccagtcacagggcagtgacggacgcgtactcgtcagtatcgaacagaccgccgacaaggccatcctcaactgggaaaccttcaacgtgggtggcaataccaccctgaacttcgtgcagaacccggattgggcggtgctcaaccgcgtcaatgatcccaatgcgcgccccagccagatcctgggtcaactcaaggcggatggcaccgtcttcgtggccaaccgcaatggtgttgtctttggcaacaatagccaggtgaacgtccgtaatctgttggctgccgccgcgcgcatcagtgatacgcagttcaacgagcagggtctgtacagcgtcaatgcgagttcggatgcacttatcgatgccttcggcaaggtaatggtcgagcgcggtgcccgcatcgccacgcacgagcccaacacggccacccgtggcggcggctatgtacttctggcaggccgcagcgtggaaaatgcgggacagatcgaaacgcgcaagggccaggcgcagctcgccgccggcgacagtttcgtgatccgccgcggcgtcggcacggcacagaacacgtcctccaccacggcgggcaatgagattgcaccccgcttcgtggcgggtagtacggctggcgatgtccgcaacagtggcttgatccaggcgcgcgaaggtgacgtcaccctcgccgggcgcacggtgcagcaggcaggcgtggtggtggcgaccagcacgctgaaccatcgcggcacggtgcacctgttgacgtccgctgctgacaagaagggcagcgttaccctcgccgagggctcgaccacggcgatcctgctggaggatgacggcaagacgacggcgttggacagtcagcgccaggcattgctggagcagtcggcgctgcaggacggggtgcgcagcaccgtagcgcagggcgcgttcgacaacctgtcccgcctgcaggaccgccgtgaccagtcgcgcgtggagatcgtgtcgggtggaaccgtggaagcccagcgtggatcgctgacgctggcgaccggcgggcaggtggtggtggatgcgcagcagcgtgcgctgctggccgacggagcacggttggacgtgtccggcgccactggcgtgaatgttgcgatggaaagcaaccagctggaaatcaacgtgcagggcaatgaactgcgcgattcgccggacaaccgcgatagcggcaagctggcaagcaccaaggtgtgggtcgatcgccgcgggcttgtccagctccccgccggaaccggcggcagtgaaggtgagcgctggtatgccgccggtggcttgctggaggtgggtggctatctgggcaaccaggggcattcgatcggcgaatgggcggcgcagggtggtaccgtgcagctggccgccagcgaagtggtcagcagcagcggctcccgcatcaacctctccgggggaagcctggacgtagccagtggcacgatcaggcaaagctggttgcgtggcaacgatggccagctgtacctgctcgatgatgcaccggccgatcgtggatttgccggcctgtatcgaggctacgagctggagcaggcgcgatggggcgtcaccgaggcatggcgcaaccccctgattggtgcggaatcgcgctacgagaacggatataccgtggggcgtgacgctggccggttgctggtctcggcgcccacggcggtcctggaaggcaaggttgatactgcggtattcaatggttcgcggcaggtccgtgcgcccggcagcaacagtgatggctatacgcagtcgcagacagcggtggggcggggggcccagctctggcttggacgtttcgatggcagcggccgcaacgccgcgttcgactcgcaggtgcgcatcggcaaacccgccgcggctgcgggcagctggagcctgcagggcgcattggatgaaagccggcgcaacaccgtatggctggatgccgaccagctgagcgcgcagcaatggggccggctggatctggccagctcgcgcagcatcacgctggaaagcgccctgtcgttggccgaaggtgggcagctgaacctggtggcagggcgcgtggacatcaatggctcgctgcgcatcgccagcggaaccctgactgccagcaacctcctcgccgatgccaccggcaggatgcaggtggtgcaggccaacggacgtggcgtgatcacgctgggtgcggaggcggtcgtcgacctcgatggtcgctggaccaaccagcgccttgacgaggctgccggaggtgtgcgtccgtggatcaatggaggccgtgtcaagatcgagagcagtcacgacgtgatcgtcgcggcgggcagccgcatccgtgtcgatggcggcggcagcgttgatctgaacggcaaggtgagcggtggcaagggcggcgacatcgcattgctggcggacagcagccaggtaagcaccgatggcagtggacgcctggagctggcaggacaactgagcggattgggcagcagtggggccggtacgcttcagctggcgaccggcggccatgtcgtactggcagacagcgaacctggcgagggcagcttgtggctgtctccagcgctgctgcacagtggcttcagccgctacgacatcaatggtcatgccgggttggacgtcgccgcgggaacgcggctgaacgtgctggccccgagcctgcgggtgcgcgagggtgcggccagcgcaacgtccgcggacgaagggctgcaggcgtggacggctccgctgtatgaggcccagcccgccacgggtggggtgacgcagcgccgtggtgccagcgtgctgctgcggtcccagcgcaacaccaccggtggcgatgtccgcattggtgagggcgccgtggtccaggtggattccgggcagtcgatcgagctgcgcggtgccggcaacctggacgtggccggggcgttgattgcccgtggcggcagcatcctgctggatgacgtgcgggaccgcctgcagcgctaccagattggcggcgtgccactgacctaccgcatcggcagtggtgcggtgcttgatgtgtcaggggacggtcatgccgagcgggacgccagcggtcgctatcagggcctcgtgcacgcaggcggcagcatcggcatcggcggcactctcgattgggagtcgcgggacggactggagaaccgtccacccgatgccttcgtggtaatcgagcgaggcgccgtgctggacgcatcgggcgcccgcgagacgctgaccgtgcaaggcaagggtgaccagaccgttgccagcaatggcggcacgatcaccctgcgctcggccaatggcctttacctggatggcacactgaaggctgccgccggtggcgcgggtgcccagggtggcacgctgggtatcgcgttcggtggcggtctgtacgaacctggcgccaacgcgggtgccgcagaaaccgggccgcgcgcgatcacgcttgtgcagcaggatggcgccgccaaccctggcggcccggaagccctgcagttcgggcgcgcccagctctcggcggcacaggtccagtctggcggtttcgatcacctttcactgtttgccgacctccgcgcgcaaggcgatgtggatctgcgcctcggccagagcgtacgcctgtatggcctgagtgacgcagcgatgggcatggccgaaggcagcgcggcgggcgccggcctgcatttccaggccccctaccttcgtctggcgcaggcgcgctggttccgtgagacctccaacaatcccttcgttgcgccgcgcgcgcctcgtgccaatggacagggccatgccttcacggcatcgacgcagctgctggaggtacgtgacacggtcgatctgtctgcattcggcaatgtgaatcttgccagcgcgggtgacctgcgcctgcttgccaaggtcagtggcaacagcaacttcttcgacacgcagctgctcgggtcgtccagcatggacatcaccgctgcgcagatctatcccgttgcaggcaccaaggggcgcatcgcggtctcgatctacgatgtgctgggtggtcgcaatgactggacggactccaacggcatgctgcgcatccgcgccagcggggccgttccggccgtggtcgattcggtgttcggcacgcttgcacttgtcgcggcgaaggtcgagcagggcggggtggtgcgtgcgccactgggccagctcacacttggtggcatgggcccgcagggaaccggctcccgtatcgacctgctgcccggcagtgtgacatcaagcagtgcggctggcctgagtgttcctttcggaggaacggttgacggccagcgctggcgcgtcgacggcaacgacttcacccccgggctgatcggcatgatcaacagtgcggcgtcggcgggcatcaacctggtcgggaacacgatcgacatcgccgacggcgcgctgctggatctgtccggtggcggcgagctgaccggtgccggctttgtcagtggccgcggcggttcggtggatgtgcgcaggcacgcgctggcggaggcgaatcccgcctataccttcagtgccagcagcaatggggtctacgccatcgttcccagccatggtgggcaggtcgcgccgctgggcctgtccgatggcagcagcgatcctgccatcggccagcgcataacggttcctgaaggcgtacccgggctggctgcgggcacctataccctgctgccggcttcctacgcactgcagcctggcgcgttccgggtggaggtgggcgcgcagggcacccggcaggcaggcgctaccgcaaccggcaccgggtcctggcgggtgagtggacagcaggcgcagggccttggcccatcggcatcgccgctctggacggatctgctgctgacaccggcggaggtggtgcgccgacattccggttacaacgaaaccagctacaaccagtttgtactggatgatgcgagcaggcgcggcgtggcgcggggcctgcagtcggtggatgcgggcaccctgcagctgaacctgggagcaggcgcgggactggcggcggaaagcgcgctgcggatgcagggtgccacccggtttgccgcagccgctggaagcaagggtttcggcggtacggtgtcggtggtgaccagcagcggatcgctggagatcctggcagtgggccagcgtgcagtctcaaccagtggagcggcgctgttcgccgacgcgctgacggcgctgcagccatcgcgcttgatgatcggcgtcacgcttcgccccaacgatagcctgttggggacgctcaacgtctcggcaccgggcaagggtgtgctcgtgcgctctggcgcatctctgctggcgcccgaagtactgctgggcacaggcactggaggggctggcatcgtcgtcgaacagggtgcgacgatcagctcggtgggtcgtggccgcccggcatacgatgcaaccgatggctacctgatgaagctggatgcgaacgtcggcctgcttgcggtctccaatgggcagaccaatctgctgtcgggcggagccggagcacaggttgcgatcgacatcggtgcctgtcagagcggaagctgcagcgggcagacccggttgctgtccgaaggcagcatcaacgccagcaccgagggcggcttccagcttcgcgacaacgtgagttacggaacgcgccggctggggctttcgatgacatccatcaacctcggtgatgccactgccctgcaggcggcggcaattcaaggggcgcttccacaggggctggcactgaaccagcagacgttgcagcagctgctgcgcggcaatacggcggcaggtacgccagcgctggaaacgctcagcctgaccgcgcgtgattcgatcaacgtgttcggaaacgtcgacctggatacgcgtaatccggccacaggcaacagcagcctgcgcgagctggtgctgggtgcgccggccattcatggctatggcagcgccggcgatcaggcgcggattttcgccgacacgctggtgtgggatggcacccaggcactgacgacgaacttcaccgacagtacaccgcaggcgccaggagcgccgatggttgatcgtcttggccatggcctgctggagatcagtacccgttcgttgatcctgggccgcgcgccctacacgcgacccagttcggaagtgcccgcgaaccgccagatcctcggcttcgatggcgtgactctgcgcgcttccgagcaggtgcagtttgccggcaagggcgggctggacgtgtatcagacccaggggccataccaggcaggcagtggctggcagtacagcgggggtgcactggacatacaggcgcctctgctgaccggcgcggcaggcggtcgcctgcaggtgcgtaccggcggcgatcttcgcatcagcggagctggccatactgcgagcaatgatctgctcggtgccgaactggacctgaaggcgcgcaacatcctgatcgactccacgctggcccttgcatcgggccgtctgcaggcgacggcgaccggcaatctgacgctcggtggcaacgccgttgtcgatgtggcgggacgtcgggtgcgcatggatgacctcgacaagtacagctggggtggcgatgttgaactcaccgccgaacagggggatgtgctggctggagccgggtcgcgcatcgatgtgtcggcgctgaacaaccgcggcggccggatcagcatcaacgctctgggcgaaggctcaggccgggttgaactggtcggaacgctgcgcggcagcgcgagtgggcggctggcaatgggtggcagcaccgtgccgtatgacagcggcgagctgatgttgcgcgcacaacacctgggcgatttctccgaactcaaccgccagctggacgagggtggcttccatggcacgcgcagcttccagctcaagcggggtgacctgaccgtgaccgacacggtgaaggcccgcaacgtggcactcagcctcgatggcggcagcctgcgggtgaatggacgcatcgacgccagtggcgagcaggtgggcagcatccgcctgtcggcgcgtgaccgcctgcaggtggacgccgagctggatgcacacggcagcggtctgcgcgtggacagctacggcaagatcatcgacagcaccaaccgcgccctggtggagttgaccagtcgcgaaggcgaggtggtgctgggtagccgtgcacgggtggatctacgtagtggtacagcagtgccggcaggcgcggcgccgggccagaatgacggtgtggcacgcggtaccttcactctcaatgtgccgcgtcgtggcgttgacgacgcagccgtgcgcgccgatgcgggcgtcgaggtaatgggcgcacgcgacgtgctggtcaatgccttccgccgatacaccgacgcgcccttggcgctgacacccgatgtcaatggtcagcggccgcagcagatcacccagcagtggctggacacggtggtcgacccgcacaaccaagcctggatgaatgccgccctcggcaatgccgaccttgccgcgcgcctgggcgcgctgggcaaggttcggctacgaccaggcgtggagatcgttggccaggtgtccagcgacaatccccgcggcagcctgaccgttcgcggcgacctggatctttccggctaccggtacggtccgcaggccaaccgcagtgatcccacccgtcgcggctttggcgagtcggccgcgatggtgctgcgtgctgcgggtgacatcaacatctatggcagcatcaacgatggctttgcgccgccaccggccagcccggatgaggcaggttggctgctgggtgaaaccgccgataccaacaccacgcgcatcacgccgctgggtggcgacatcgtggtacccatcgatggcgtgacgctgcaggccaggacgcgcttcccgaagggagctgtcctgaactatgcgattcctttcgcacagaccgatttgcctgccggcacggtgctgccggcggaaatgcggctgggtgggcgcctgctgttgccggcggggatggtgttgccgtccgcggtaacgaccgccgatggcacggttctggccgccggtacgctgctgcagcagccgttgcagctggtcgccggtgaccgcctcggcgcgggcttccgcctctccagcaaggcaaccctggctgcgcagcagtggccggcgggcgcggcactgcccgaggccatggaattgtccggcgcgatcgcgctggcccctggttcgctcattccttccatgacagcagtgaagctggccgatggaaagccggtgaacctgcgtccggccgatgccagcggcagccaggggcgcaactgggcgctggccccgatgctgccggaaggtacgacttcctgggacgtgttggccgtggccggtgccgacacgaccgcggccgacccgcgcctgcgccgccccggcgcggatggtgacgtggtgttggccgacagccactacggcaccatcacgaccgtccacaagaccagcgagtgggtgggtgacaaggtgttcagcgagcagggctccatcgacatgtggggtgatgcatcgcgtgcgggcattccgatcaaggatgcggccgccgaactgggcatgagcgaggaggatctgtgcagcttcggcccctactgcgagcctgctccccggctggtggacaaacagggctcgctggactggctgggtgacgaatccgcggtgggcaggtccgccaaggagttcgcggcgatcttcgggatgaccgaggcggaattctgcgccagcgccggctactgctacggtggcggccagctgatcgagaagaccacctacggcgcgaagaccgccacgccgttgtggagcgtactgcgtaccggcaagggcgatctgcagcttctggcggcccgtgacgtgcgcatgatgtcgggctacggcgtgtacaccgctggtgccccgacctcgctcggcaatgggcgtgaggcggccttcaacccacagcgggcggccgcgccgggccaggacaatctgctggggccgacgcgcttcgacacgcgttacgacgcggcccttggcgcctggcaggcgtggtatccggaccacggtggcaatctgaccatcgccgccggtcgcgacgtccgtggggacctgtgggatgcggaaggtgaagttggcttcgaaacgccgctcggctcgtacggcgaagtcgccggctacgctgccggtgcggtgggcaactggctgtggcggcagggcaacgacgccagcgcggcagcgaagtcctccgccacaagctggtggatcaatttcggcgcctatacctcgcgcccgtcgctgaccggcccccgcatggtcggtttcgtggggttcggcacgctgggcggtggcaatctgacgctggaagcgggaggcaatgccggtgcgacgaagaacttcggcgccatgagcagtcgtgcccgccattcggatggcgtggtagcggttgttggttcgaccggacgcgttgatgcggacggcacggtgcacctgaccggcggtggtgacctgtcggtgcggctgggcggagcgctgaacccgaacctggcagcaacgacaacgtcgccggcggcgaacaccccgaaccttcccctcgcagggacgttggtgaatctgcgtgggcatatgcaggtggaggcagcgcgcattggtggcgtcgccacgaacgagagccactacgtggccccttatgcgggcctgcggcaggaagatccgttccgcgcccagatgggcgaggcgatgggcgggccggtcctggtcctcggtgactcggtggcgaccctgcaggcgcgcggcgacgtggtgctggccggtgtggccgatgccggccgggtgccggttgccaatttcaacgccctgtcgcttggggacggacgtaccgcagcggccagcagctggttctccctgtggacggccaatacggccgtgaacctgatcgccgccggcggtgatctggcgcccggccagcagagcggcaccaccggcccggtgctggtgaacggcgaactgtttgccgagcagctcccgctgctggaaggcggcgacgtgcgctactggttgtatccgtcgcagctgaggatgctggcggccagcggcagcatccgcttggggaaaaccacacaggtaaccgggtatgacgtgctgctggcagcgccgtcggccaatggggcggtggaggtgctggccatggactcgattctgggccagccgcagggcgcccagatcagcagctccggcgcggacatacgattgccatcgccgttcgcaccgggctacaccgcagtggcgggcaccaccgtgatcgggaatgcgtccgccgacggcgtgacggtggatccgcaggcgcagttgccactgttcgcatttgggcccaatgccctgcttggcagtggaatacgcagcgccgccagcgcgccagaccgcttctatgctgtgaggggtgacattgttggcctgcgcaccggaagccagtggtcgttggccaaccctgccggtgcgcggagccagctgaactggatcgatgtagcatcgccggtcagggtcaaggctggcggagatatcctggtatcgagcatcggcgcgataaacaattcgcctaccgatgttacggtcgtccaggcgggacgtgacgttgtacgcagcacggtgcgcgtggccgggcctggcaacgtggaggtgagtgcgggccggcagctgcgtttcgaggatgagggcagcgtgaccaccaccggtggcctgatccagggcgatacccgcccgggcgcgagcgtgtcgctcaccgcaggaaatcgggacatcgatttcgatgcactgcgcgcacgctatctgcagtccgggagtctggcggatccggcgcagccgctggcatcgcagcccggaaaagtcgtgaagatctacgacaaggagttgaagcagtggctgctgcagcggttcggcatgagtgtcgagggggccgatgcattgactgcgttcgacgcgcttccgagcgaacagcagcgcatcttcctgcgccaggtctattacgcggaactgcgtgagggtgggcgcgagtacaacgacgccgagagccctcgattcggctcctacctgcggggacgcgaagccatcgccacgctgctgcccgacagcaatgccaatggggcgagccttgtgcgcacgggtgacatcgtgatgtatggcggttccggcgtgcgcacgcaggctggcggcaacatcgagctgatggcgcccggcgggcagatcgtggtgggtgtgcagggcgtcgtgcccccgtcgacagcaggtctggtaacccaggggcaaggcgatatccggttgttcagccaggacagcgtgctgctgggcctttcgcgcgtgatgaccacctttggcggcgacatcctggcctggtccgagcagggtgacatcaatgccgggcgtggttcgcgcaccacgctggtgtataccccgccgcgtcgtgtctacgacacctggggcaatgtggtgctgtctccgcaggtgccggccagcggcgcaggcatcgccaccttgaacccgattgccgaagtgccgccgggcgacgtcgacctgatcgcgccgctgggcaccatcgatgcgggcgaggccggcatccgtgtctcgggcaacatcaatctggccgcgctacaggtgctcaacgcggccaacatccaggtgcagggcgagagcaagggcctgccggtgctggcaacggtcaacgtcaatgcgctggcatcggccagtgcggcagcgaacagtgccagccaggccgcacaggacgtgatgcgcaagagccaggacgacgcacggcgcaaccagccgtcggtgatcagcgtgcagatcctcggtttcggcagtggcaccagcagcatcaacccgccggcgcgtggcaacacggccaacagcggctatgacgccaacagtgctttccagttcccacaggccagccgcgacgagggcacgcagcgccggtag

SEQ ID NO: 504439 - DNA, 1137 bp, Stenotrophomonas maltophilia
atgaacaagtacaagaccctggccgcgctggttgccaccgcgctgctcgccaccgccggtgccgcttcggcccagtcgctcgtgcagggcggcggcgcttcgctgccggccaagctgtacaaaggttcctcggacagcatcctgccgtcgaccttcagctatgaagtgaccggttcgggcactggcaagcaggccttcctggaaaacaaggctcagctgttcaataccaccggcaccgtgcatttcgccggtagcgactcggtcctgaccgacgctgagatcaccgcctacaccgccaacttcgccccgacctacggtccgctgatccagattccttcggtcggcacctcggtgaccatcccgttcaacagtgccggtggcaaccttgatctgagcgtcagccagctgtgcggcgtgttctcgggcaagatcaccaactggagcgacgtcgacagcagccgttcgggcccgatcaccgtcgtctaccgcaacgagaagagcggcaccaccgaactgctgacccgcttcctcgccagcgcctgctcggccgctgacactgccggaaccaacctgatcggcggcaagttcagcaccacccaggagttctggaagcagttctcggccctgccggtcaacttcgtgaccgcgtcggcgctgggcagccagccgctgtacgacaaggtctatgccaccaccggcggcatcggctacatcggcccggacgtggttccgaacctggatgacgcgaccaagatcgccaaggtccgcggctactcgccgaacgatccgagcgttcaggcgacgctgaacaccgtcgccccgccgaccggtgccgctgccaacgatccgcgcaactgggtgccggtcttcaccaacccgccggccgtcggctacccgatcgtgggctacaccaacttcgatctgggccagtgctacaagaccaccgctgtggccaccgcgctgcgcagcttcctgctgggtcactacaacggcaacaacgatgccgcttcgcgtgcccacggcttcgttccgctgaccgccacctggcgcgatgcgatccgtacccgcttcgtggttgctggcagcaccgctggtctgaacaacccgagcacctgcgccggcctcggccgtccgtaa

SEQ ID NO: 504440 - DNA, 681 bp, Stenotrophomonas maltophilia
gtgttcgacgtcagggggctgaatggacaccatgcgatcagaacgtggaggctggccatcgccggatggctgctgctggcctttgccgcggcagcccaggacggtgtccatgcctacgacatccccgcgcagccgctggaacaggcggtcgagcgcttcagcgtcatcagcggctggtcggtgatgtacccgggcgagcttgccgcgggccgcaacagtcacgcgcttcgcgaaagccttgcgccgctgccggccttgcaggttctgttgcaagattccggcatcaaggccgaggtgatcggcgaacagcgggtggtgctgcgtcggagcacgtcctcgacggccgaacccggcgttggcgcggaacttcccgataccgagcggcgccgtcgctacgctggcctgcagcaacgcctgcgcgctgcgttctgtgacgatcccgacctggctccaggtcgctatgccgcgaccctgcgtttcagcgttgccagtgacggccaggtgcattcccctgaactgctttccggcagtggcaatgccggtcgcgatgcgcgcctgctgcaggcgctgcaggcactgacggtggcagccgatgccgccgcgctgccgcagccggtgacgctgcagatccgcccttccggcaccgagcacgactgtggccggcgctcgccccttccatga

SEQ ID NO: 504441 - DNA, 1641 bp, Stenotrophomonas maltophilia
atgaaaaagcgggcttcggcccgctttttctttgcctgtctcccagcgcagccgcaacgctatgcttcgcccatggacaccctgcgcctgctcgacctggatatcgatcgctcggcgcaacgcgtcagtcgcaacggcgagatcctgcccgtcagcggcctcagctggaccctgctcgacgtactcctccagcacggcaacgacgtcgtggatttcgacaccctggccgcccaggtctgggcaccggcggtggtcggcgaggatgcggtcagccagcgggtgaagctgctgcggcaggccttgggcgatgacagccggcgcccgcgctacatccgttcggtacgtggtcgtggctaccagctgtgtgcgtcgccgttgccggccagcgtgccgcctgcgccatcctcgcgcgcccgcaggctcggctggggcgtggcggctgtcgcggtgctgggcgtggtggccacgctgctgctgtggccccggtcgacgccacagggggcagggcagtcgctgctgcagcgcgccgagtactacgcggggatcggccaggccagcaacaaccgcgtggccatcaccctgtaccggcaggcgctgcaggcagatcccgaatccacgccggcacggcgcggcctgtcccgtgcgctggcggcgcagggctgcctgttcaacggcacgcccgagcagctgcgcgaggcgctggcattggccgagcaggagctccagcgcacacccggcgatgccgccgcgcacgctctgtgggggtatgcgcaggactgcattggcgacatgcgccaggcgatcaccggctacagccgcgcgatcgaactcgagccgggcgacgagcgtagccgcgcatcgctggcctacctgcagcaggaacgcggccagctcgccacggcgctgcaggccaacctgtccctgaaggcgcccgagcgcatccgcttccgtgacgtgcaggtcgcgcgcgagctcgaactgctcggcttcacccaggcggccgcggatcgccacgcgcgcaatttccagctgtatcccgacaacgtgttctccaacatcgcctggccgcgcagcctgtacctggccggcgcgccacagcgggctcggcaggcgctggatgaagcgctcgcgcgtggcacgccgcatccgcagctgctgcgcctgcagggcgaactggcgttgctggccggcgacgctgcaggcgccgccgacgcgttcgagcgtggccgccagctgcggccgcagcaatcgctgggccagaccctggcggcgttgcatggcgcgcaggctgcggacgccacctggatcgaccagcgcctgcagcagctcgctaccagcgcgggagcgggcgacggctggcccgatgcggcgctggagcgggcgctgctgctgcaggcccagggccatgcaggcgacgcggtgacggcactgcagcaggcggtcgatgacggcttccgcgacgtggcgtggctgcgtgccacgccgctgttcgtccgcctgcgcagcgcgcccggctggccggccctgctgcagcgcctggacgccgacattgcccggcaacgtgcgcaggtgctggccgccagctggcgacccgacgacctggccgcgctcagcgcagcgccggcagcagaaactcggtga

SEQ ID NO: 504442 - DNA, 1065 bp, Stenotrophomonas maltophilia
atgcgttcgatcctgcctgccctcaccctgctctgcgccatctgcagccagcccttcgctgcccgcgccaccccaccggaccagccccgtctgcaggccctgcagcaggccatcgccagcgatgaactgaaacagatccgcagcgtgctgctgcaggtcgatggcaaggtcgtctacgagggctacttcaacggtgccgacgcgcagaccctgcacgacgtgcgatcggccagcaaaggcgtgaccgcgctgctggtcggtgcagccattggcgaaggcaccctgcccggcgtgcaggcccgggtgtatgactacttcccgacgttcactgcccagcacgcggtcgacccgcgcctgcgtgccaccaccgtgcaggacctgctgaccatgagcagcctctgggagtgcgatgacgaaaacccgttctcggccggccacgaggaacgcatgtacgtgtccgagaagtggctggacttcaccctgggcctgccggtgaagggcttcgcgccgtggatgcagcggccggaggacagcccgcatgggcgcgcgttcgcctactgcaccgccaatccgttcgttctgggcgcggtactggagaaagccagcggccaaccgctggccgactacgccgcgcgcgtcctggagcgaccgatgggcatcacccgcagccagtggaaccgctcgccggagggcatcggcatgggcggcggcggcacccgctaccgcacgcaggacctcgcccgcttcggccagctggtgctcgatggcggccgctggcagggccgccaactggtaccgaaggattacatcgaggcgatggtgcgaccgcagacgagcacctccgacggcagcgactacggctaccagtggtggggcctgaagctggacgtgcagggttcaccgcgcacggtgtgggcgatgtccggcaatggcggcaactacgtgttcgtgctgcccgagcagcgcgtggtggcggtggtcaccagccaggcgttcaaccgcaacttcgcccatccgcagtcgcggcgcatcctcaccgagtttctgctgccggcgctgcgctga

SEQ ID NO: 504443 - DNA, 1014 bp, Stenotrophomonas maltophilia
atggacatgagcaccgatcacgacaccactcccgacggcgacctgctggacggcgcatccctcgacgaacaccagatactggaagcgcgcgcctacgacgcgttccacgaaggcgacctgccgcaggcggtggcgctgttcggcgaactgatcgccatcgctcccgaggtgccctacctgcactacatgcgcgggctggcgcacaagtacctgcgcgactgggcggcctcgctgcaggacaacctgcgatcggagcagctgcgcggggaattcgatgtcgccaccgcctggaatgccgggatcgcggccaccggcatggcggactgggccgaagcacgacgccagtggatccgctgtggcattaccctgcccgagggcgaaggcccgatcgagggcagcttcggcgtggcctgcatgcgcctggcgccgtggtccgatgccgaggtggtgtacatgagccgcattgatccggtgcgtgcacgcatcgacaacgtaccgctacccgaaagcggcttccgcttcggcgacatcgtgctgcatgacggtgcgtcgaccggccgacgtacgtacggcgaacacgaggtaccggtgttcaacgcaatgcagcgcctgcagcgatcggacatggcgaccttcaccgtgttcgtgcagtgcgattctgccgatgacatcgctgccctgggggccatggacctgcccggcatcggcatggtcgaggactggaccgcgaccgtgcgccggctgtgccgccgctgcagctatggcaccccgcatcaacatgacgacgatgcagaggccgtcgaagaaggtacctgggcgcgcgagcgcgatctgggcattgccgcgcagggccgggctgcggtggagaagctgctggcgacgtggaccgccgcggccccgggacgcgtgctggaggccatcgaacagcgagagcatgcgctgagtgaccccgagccgggccaggtgtggtggctgggcgaggaagaagaggaagagcgcgtcaacccgggttga

SEQ ID NO: 504444 - DNA, 510 bp, Stenotrophomonas maltophilia
atgacccatcgcctgctgctgccgattggcggcatctccctggccatgctgcttgcagccaccaccgtggctgcccaggattacgacgcagcgcacattcccgcacttcgctgcgaatcccagttcaacaagaccgagcaatgcccgatcgagggcccgatgcgcctggccaggcaactatcggtcacccgctgcgtggaaaaccagaactggggccagagccgtcgcatgctctgggtgaccgatggctgccgtgccgagtttgtcgccgatgaacatggccgctggccgggacgcggcaggggccgtgatcgcgacgatgagggtgaacgcctggtctgtgagtcctacgaaaagaaggacaaggaatgccgcatccgcgtgcgtcatgaggtgcgcatggtcaagcagaaatcggtgacgacctgcatcgaagaccacaactggggctgggaccgccgcggcatctgggtcagcgatggctgcagggccgagttccgggtgtattga

SEQ ID NO: 504445 - DNA, 633 bp, Stenotrophomonas maltophilia
atgggcgagtgttgcggctgtggcaagaccctggacgtggcggcgatgcaggcgcggcaccggcgcgtgctgtggatcgtgctgctggtcaatctggccacctttgcgttgatggtcgctgccgccgggtacagccattcgtcctcgttgctgtccggcgccctggacaacctgggtgacgcggcgacctatgcgttgagcctggcggtggtcggcgcaggcctcgtggccaaagcgcgggttgccctgttcaagggattgctgatcctggcggcggccctcgtggtggctgcgcagatcggatggcggttgctgcacccggaggtgcccctgtttgccagcatgggcctggcggcgctgctcaacctggccgccaacgcggcgtgcctgtggttgctgaccccttatcgcaacgacgacatcaacctggcgtccgcctgggaatgctcgcgcaatgacctgtatgagggcgcatcggtgttgctggccgcgggcctggtagcgctgttcggtgcgggctggccggatctgctggtagcggtcgcactgctggtgctgttcctgcgctcggcgttgcgggtcctgcgctcggcctgggaggaactgcgcagcgcgcgcctgctggcgtcgtga

SEQ ID NO: 504446 - DNA, 207 bp, Stenotrophomonas maltophilia
atggtcatcactgtccaatgcaatgcacggcactggtccgtgctggatccacgcgccggtgaggccagcagctacgcgcggggtgccgatgcgttcgatgccgccgcagcacttgccctggagcatcaccgtcgcaccggccagcgcagcacggtgcgggtcgaggcgctgggcagcgcggtggatgcgttgcacgtcggcggctga

SEQ ID NO: 504447 - DNA, 2040 bp, Stenotrophomonas maltophilia
atggacgacctggcctggcgcgcgcaggcgcgcagcgcactgcaggaacaggactacgcagcgctggatgcactgctggcaccacacgaacaggcctggctgaacggcgctcggccactgcccggcatccgctggcgcctgcgcaacctgcaggacacagcgctgcccctggatgagcgcctgcagcaggcgcaacggtgggttgccgccgatccgcacagctattacgcacgcctgcgcctgggtgcctgctgggaatcggccgctggcgccctgcgcagcgccgacgtggccgcactggtggaagacagccagtggctggccgcacagcaggcgcgcgaccacgccgtgcatgcctatctgcaggcgatcgcgctgtcgcagcgaccggcgctggcgctggatggcatcaagcgcatcaccagctacctgcgcgaaccaaactggttgcgcgcgctccaggcagggcaatcgccggagtccgatgaagccgccctggccgagcactatccgcaggcgtggccgcaggcattgcagttgctgtcgcgcttcggtgcgcccctgcagcacctgccggaatgcctgccgccgctgttgcgcgatcgcagcgaggacgatttcgatgcccctctcgcgtactggatgcgcctggtgctggaacagcgtccggacgacctggggacgctggaagacaccctctactacctgtacccgcgctggggcggcagccacgaggcgatggaggatttcatcgaaggcagctggtgccgcggcctggatctggcacagcgcaacgcattgcgctggtgcaaggaacaggactggatgggcgagctgccgcgccgcggcgatgccgaagcggtggccgtgcacgagcgtgcgtatgcgcagatcctggactggcacctggagggctgcgtgcgcgctgaagtcctgacccagcgtgccgcactccgctttcatctcgggcgcatcgaggagatcgaagaccaggtgcaatgggatgccggaagcatgcagtccgcgcttgaggacctgcaggaggcctgggcactggatcgtgacatggtcctgcacggtggtttcagcagcctggaggcctgcacctggttcgctcatgttgaaggggccgaaacgctgttcgcgcaggtggtggactacgccgcccgcgaaggtgattccgcgctcggcctgctctgggccgccaccgccatcgagcatgggctgctcggccaggcagccgatccggcacgtgcgcagcccttgctgcagcgcgccctgaaactggccgcgcagcagaagacgtccacggtcacctttgcgtccaacctgttctgcgatgtctcgcaggacgcaggcctgtcgttgttgcagcgcatggccgacgacggcgacgccggtgcgatggccgcgctgtgcgacctgtacaagggccggctgggcggccgcgaccagccggacttcgttgatgcccagaaggccctgtactggcaggagcgtgccgtcgaaggcggcgacctgatcgccacgtacaaccttggcgtgcgcctggttgccgccggtggcgctgacaacgaagcgcgtgcgcgcgaactgtacctgcgctgcctgcgcgaagccgacgccggtgaacgcgtgtggggcccgacctgccgcaacctggcctgcctggccctcgatggccagaacgacgcgcacaagcgcgaagcggtcgaacgcgccctgattccgctgtggtggcgcggtgaggacaacgacaagctgtgggccgccggctacctggccgacatctaccacttcggcaacggcgtgccggccaacgccttcctggccctgacctggctgcagcgcgccagcgagatcgatagggagtacgtggatgtggtgcgcatggcgccgctgatcaacggcgaaggccgctggttcggcgccagccgcgcgcgcaaacagcaggcgcaggaccgccagcaggtggacagcgccacctgggccctgaccttcggccagcgcagccaggacagcgaccttaccgcagtctga

SEQ ID NO: 504448 - DNA, 783 bp, Stenotrophomonas maltophilia
atgaacacccagccgtttgaaggtcgcaagcttttggtcgttggcggcaccagtggaatcggtctttcggtcgcagaaatggtcgcagagcagggaggttcggtcgtggtgatcggcagccgtgctgagaaggcggaggaggcacgcggctcgctggcgtcgatcgctggggagggcagggtctccgcgtatgccgcagatctctcgaagacctcggccgttgaggcgctgctggccaatctgaaggccgagcacgcggacattgatttgctggtcaactcggcagggatctattacccgaagtcgttcctggagcactcgggggaagactatgacaacttcctgagcttcaaccggtcgatgttcttcatcacgcagcaagtagcagcagctctggtggcccgtaagaagccaggtgccatcgtgaacgtcaccgcggtcgctgctcgccaggccatgaagaccgtcccggcatcggcgtactccatggccaaggttgggctcgacgcgatgaccaagcatctggcggctgaactggccgagcaccagatccgcgtgaactcggtcagccctggcatcgtggaaaccaagatcttcgaacgtttcatccccagcgatcaacttggtggtgcgcttgaaagcttccacaacgtccaccctctcggccgcaacggatcgccccgcgacgtagcagaaaccgtgaccttcctgctgtcggacaaggcttcctgggtaaccggcgctgtgtgggacgtggatggcggcgtcatggctgcgcgctaa

SEQ ID NO: 504449 - DNA, 342 bp, Stenotrophomonas maltophilia
atggaaaagaagtggctcaatgaactgtcgggggtcatcaaacgtgtcacccgattcaacaagacgaacgcgcccgtcgcgtcggcctttcacaagttggaaacggccaccagggaaggcaatgtcctcgacgccaagacgcacgagctgatctccttggcggtagcggtcaccacccgctgcgacggctgcattgccgcccatgcaggggcagccaagcgggccggcgcgacgaaagaagaagtagccgcggcgttgggcacggctatcgctttgaacgctggggctgcttacgtctactcgtcgcgggcgttcgaagcgtttgaagagctggaagcctaa

SEQ ID NO: 504450 - DNA, 564 bp, Stenotrophomonas maltophilia
atggccgtcggaacacgcgaagccttggtgcaaaccggcgaaagcctgatgcgcacgaagggctatgcagccttcagttatgcggatctggccgacacggtgggcattcgcaaggcgagtattcaccaccatttcccgaccaaggaagacctggggacggcgatcgtggaagagtatgtcgagcgcgtacgcaatgactttgcggtcattgagcgctcgaataccacggcactggggcgggtggagggctttgtaaaggcctttcaggccagcgccactggcggactgctgccgttgtgcggtgcactggcggcggaaatgtcggccctgccggcgggccttcagcagctgactcatcgcttctttgacatgcagttggattggctggagtccgtattcaacgccggcattgaggcaggtgagtttgcccgtggatccggtgctcgtccgaaggcgcatgcgctgttgagcctgttggaaggcgccagcttcattggatgggcgaccaaatccgccggcgcgctcgatgaacgcttgatcctgcgaatgatccaggaagcgtaa

SEQ ID NO: 504451 - DNA, 672 bp, Stenotrophomonas maltophilia
atgaagtcggtgaaagtcgaggtgtgggcggatttcgtgtgcccttggtgctggatcgcaaaacggcggttcgaaagagcagtggctgccgtttcgggccaggtgaacgtcactgtgtctgagaaggcttaccgcttggcgcgcggcgtggcaccgatggcgttcaagtcagcgctctaccagaagttcggcggaacctcaggggccgagcgaatgatggcagcggtgcgagagcacgggctttcggagggcctggactatcgcttcgacaccatgcggtttggcgacacgagcgcagcgcatgcgctggtcaagagcattgcctcgccgacccaggccaagcagatgagcgaacgcctctacaaagcggtcaccaccgacgggctggacatctttaaccccagtgtgctgctggcgctggctgaagaactcggcatctccgagctggaggtcaacaacaccgctgctgcaaatcagatcgcccaggacgaggcagatgccaaccaggtggccaacggcgtgccgctctttgtcttcaacaacaaggtctatctgtctggcgcccaggaaagcgctgtgttcgaacgtgcattgctcgatgcggcggtggatgcgccggtatcgatgaacgaatcggcggcggaaagctgcggcatagacggctgccgctga

SEQ ID NO: 504452 - DNA, 561 bp, Stenotrophomonas maltophilia
atgaacaatcatctcaacggcatcgacgtggcatccctgcaggcgtttgctcaggaagttgcagagaccaccaatccggaaaggcgcactgcgcgtttcaatgtcaagaccaagtgggagaaccagacccgcacggtggcgaccgtccagcgttactccatgcgtggcgaggagtacccgcgtcacttcgaaatcgcggcagatgagccgttggagttccttggccagaacactgcacccaatccccaggaactcctgatggccgcgctcaatgcgtgcctttccgtcggctacgccgtcaacgcggcagcaatgggcattgcgattgagcacctggaaattgaaaccgacggtgcactggatctgcgcggagtgcttgggttggacgagaacgtcaacccgggctacgacgaggtcacctacacggtgcgcctgcgcacgaatggcacccgcgagcaggtggaagaactgcaccgcatcgtgactcgcacctccgcgaactacgccaacttttccaaagccattcgcatggtcccgacgctcgaaatcctgggccagtga

SEQ ID NO: 504453 - DNA, 1737 bp, Stenotrophomonas maltophilia
atgatcctggacttcaaggccaggctctattgccaagagacccggttcccccggcgaaacgtggacccgagtgatccactatgggttcagcgcattgaagagttcttctctcgcacccctctccttccgccccctaacgatcccaccgagtatgcggccgcgttcgaggcgatatatccgcaagagacccatcgtcggcaatacatcgctgacgccatcagcaagggcactccctgttttgggcaccgcatgctggccggtctgataagcgcctcaaaagccccctgcgtctttacgaccaattttgacccgctgatcgaagaatccagcctgctagcggcttcgctaatgcccccaggcaccgcaggcaagccgacggtggcgactttagactctgcgaacctcgctacgcgctgcctggatgagtctgactggccgctcatcgccaagcttcacggcgactaccgttcaacatccctgaagaacaccacgaacgagctggcttcccaagaccatgacctgcgccgggccatggttgaagcctgcaagcgcttcggcctcgtcgtagtcggctacagcggccgcgattcctccgtcatggaggcgcttgagtccgccctgacctacgagaaccccttcccgagcggcctctattggtgcgcgtcttcccgcgccaagctcctgccggctgtgaaggtgcttttggaaaaagccgcctctaagggcgtcaatgtcttcatcatcgagtccgcgacgttcgatgagttggccggcgatctgctcaatcaaatcaatcttccagccccactgctggaccatgtcctgtcgttccagcccgcacagctcgcagcgcctgtcccggtgcgtacaacggaagctctgaagttccctgtgcttcgcctttccgcgttgctggtggagagtctccccttcacggccagaaggatagccttgggccgcccgtcctccatcgttgaggtgcgggaaatgctcaaaacgagtaagtgccgcgcggcggtttcaatggtgggaaatgagctcgcagccttcggaaaagactcagaaatcctcgcgtcattgcacagcctgaagccagtgctaaacgggcactggacgctggaccccggccgagacagctgggcgctaggactcacctacgacgcccttctgcgcgcgttggctcggcggcgaccgttgattcccagactcaagcgctccggtcactctctgctggttgcgagcgcgagagacggcgaaacggaagagcagcggcagcgtcgtgaaagtcagctttcaaagctcaaggaagcctatggcggaaagctcgccggacagatccacgggcgcaactacaacgaagccatctcggttcggctggaagagatcgaggggcggtggtggtgtgggtttgacccatacaccgctgtggaagtgccgcgcaacgagcggactgatccctcaagtgcagccgaaagcgacccgctggcttggtcgtcacagcgccggccagatcccaccgctgactggagaagagagcggtgggcaaccaagtacaacggcccttgggccaacatcatcgacgcgtgggcgaccttgctcacttctccacccggcatcacctttcaagcgttcggaatcgaagctcaagagggagtcgatgcggctttccgcatttcaccactcaccggcttcagtcgtcctggacatcacgacaagtactttgaccggaggcagtga

SEQ ID NO: 504454 - DNA, 393 bp, Stenotrophomonas maltophilia
atgccccttaccctgcagattgaaggcagtgcgatccacgacatcggcagcctccatgccgaactcaaccgcgtgttcatggcaagcgaggactggcagctcgggccgaacctggatgcgctggacgacctgttgcatggcggttatggcgcgttggctggccacgatcaggtcaccctcgtctggcgcgacatcgcacatagccgcgcggctctgggcgtcgatgccacccgccgctggctgcaggcaaaactcgacgggccgggtcacttcaacgcgcaggccatcacccaccagctgcaggccctgcaacggggcgatggccagacctacttcgagatcgtcatggagatattcgccagccaccggcagatcacgctcatcccggcctga

SEQ ID NO: 504455 - DNA, 1377 bp, Stenotrophomonas maltophilia
gtgaacgaatcacccctggctgagtcgcgcgcgccggctgtcgaggtcgatccagcaccggaagctgcagcgcgcttcggccgactgcgtgagcgtaccgacgagctcgaactgttcatctctggcctgctggcgttcgcactgttggcggtaccaggctacctgttcgatgcgtgggcacgcagcagcctgcacacggaaggcatgtacttccaggttctgtggtttggtttcagcatcagcgtgggcatgtgttacgtgctggcggtagcgctgatcgcgcacctgaccgtgcgcggctactggataggcctgatcgggctgaaatcgcacttccccaagggcatcgactgggaacggctgccgcagatgggcccggtatcccgcgccttcctcaaggcccgcgacggcggcctggacggcagcatcgaacgcgctgatcgtttggccaccatgctcttttccaccacgctgctggcggtgcagacgctggccggcaccctggtgatggccgtgctgacgttgtgcgtggcgatggcgatcagtgcgcttgccggcggttccgaccgtgtggccatgatcgtggtcggtaccgtgctggccagcctgcttgtgctcgcactggttcctgcactgctggagcgtgtcattgcgcgccggcagcggcgcgaccaggcctatcacggcctgcagcggtggctgcaacgcttcctggcgggcctgcaacggattcccctgctgcgcctgatgcagaccatgcagctgaccctgcagagcaacctgcgctcgcgttcgttcatggcggtctatctgctggcggtgatggtggccatggtgctgggcgcggtgcaggtgctgggctcggtgaagttctcgctgttcaaccgctaccaggtgatgaccgacgaggccgtcgaacacggcatgttgagcgcgcactacgaatcgatgcgttcggcgcacgatcagctgctgccgtatccgatgatcccttcggacacgatcagtggttcacgcctgcgtgtgttcattccacaccgcccccagcgcgacaacccgctggcgcgccagcactgcactgcctcgcccgccgcacgcgatgaagcgaccggcgcaaaggccgccagcgcagcggtggagtgcctgtcgcggttgtggcgggtgcagctggatggcacgccggttgacctgcacgacttcatgccgatggagcgccgcgatctcgacatgcgtggcctggtgggctatctgcccatggcgacgctggcacccggacgccatgacctgagcctcgtctggaatgccgaagggggcgaacgcggcccggagcgacgccgcgagtaccgcattccgttctggtacgcgcccgacccctga

SEQ ID NO: 504456 - DNA, 1224 bp, Stenotrophomonas maltophilia
atgatcctccccctacgctccctgttgctggcgctcgcgctgggcatgagcacagcgaccgcgatggccgcacccgccgcagacgagcagcttgagcaggtcatcctgctcagccgccacaacctgcgcgcgccggtggtggcctccggcgcgctcgccaacgcgacacccgagacctggccgcgctgggaggtggcaccgggcgagctgaccaccaagggcggcgtgctggaggcatacatgggccgttacatcggccagtggctgcgccaggctcagctgttgcgggcctcgggttgcccgcagccggctgacttccgcgcccatgccaacagcttgcagcgtacccaggccaccgcacagttcttcgttgccggtgccttcccgggctgccacgttgcgatcgagcagcgcatgccgctgggcacgatggatcccttgttcaatccggtgatccacaacagagacacggtcttccgcgagcgcgcgctgtcggcaatgcagcaagcgctgaccgacgtggacctgacgccggcactggcggtggtggaggcggtcacccgctacccggagtcggcggcgtgtaccggccgcggcgactgccatctgacgctggccgataccaccttcagtgcggagccgggcaacgagcctcgcgcttcgggttcactggcgctggccagcggagtggtggatgcgctgctgatggagcactaccaaggaagtggcattccgcgcgaaggctggggccgcttgaacaacgaggcgcaatggcaggcgctggcgcagatacgcaatcgctaccaggacatcctgttcggtactcctgaagttgctcgtgatgtggccgcaccgctgctggcacgggtagacgcgctgttcaaggatccggcgtcaccgaaggtgaccctgctggtcggtcacgattccaacatcggctccgtgctggctgcgttgggcatcgctgactacacgctgccgggccagtacgagaagacgccgatcggaggcctgttgcagttcgagcgctggcgtgggcgtcgcagtggcctggagcgtttccgcgtgtcctacgtctatcccaccaccgggcagctgcgcgatgcgctgccgctgaccgaggtgcagccgccgggccgcgtcgcactgtccttgccgggctgtagtgcacagggctgcagcagcgcgcagttccagctgctgctgcagcgggcgatgcgctga

SEQ ID NO: 504457 - DNA, 804 bp, Stenotrophomonas maltophilia
atgtgcggcttcgaacaggccgccatcgggcgagcgcagtcgatagaactcgacccagccgctggcctgcagcggcagctgtgccacgccggtctgctggttgaaccacgccgggtccttgctgccctcgatgacgcgtcgcgccaggcgatcgatggcgtggtcgcggctggcgtaccagtcctggccgcgcagccgcgccagctcggccatcatcaccagcggcgccagcgcgtagtcgtgatagtgcagggtacgctgcccgcgcgccatttccagcggcaggctgccgtcgtcctggatgtcatcgacgcccttctggaaggccgcgtggccggcctgccagagggcctggtcatcggtggccaggccggtagccagcacgcccaggccgccccagtagtagtggttgttgcggcgccgtttcgggttgtcccagtaggccaggttggcgcgtgccagctgttgcagccacggatcgatgcgtgcgcgctgctgcgggtcggcctggtcatgcaccttcaggtaggccatggccactgcatcgagcatccactgccgcatgtagaacgactggtcgttgttgacccggatcatctgcccgagcatggcgcctccgtctgcccatgccaccagccatgccagcgtgcattgcgccgccgccgggtcaccgttgcgcaggtagtcgtcgctcatgcgtgccacgtcggcggcatagcggtccagtggcgcggtggcgtcatgattctgctggtgcagcgccgggtcgatcaccgagccggccttgtcggtgtagtagcctag

SEQ ID NO: 504458 - DNA, 321 bp, Stenotrophomonas maltophilia
atgggctcggctctacagttccggcacatccagccgataccgcgcagcgagatctttcagcacggtggttggcaggtggttcgcgcaattctgatcggggcgatgctggtcgccagcacgcccgcatgggctgaacccagtcccgcgccgctgcagatccgcctgaccgtggtcgaagcctgtcgcgatgaccccggcagcacccactgccccgccccccaccagcgcagcgacgcaccgcaactgcctccccaggtccgcgagctcgcacctcccgccgacgacgaagactcgacgtccgccgtaaccgtcatctactga

SEQ ID NO: 504459 - DNA, 786 bp, Stenotrophomonas maltophilia
atggacaaggcaaagaaagacccgatcacactggatgttgcctcgctcttcaacgagatgaaggaatttgatggcgcttatgtgaaagcgcgcaaggcacactcccctccgatcctcagcgatacggtactggtcgccctcggaatcgcgctcgccgtcctgctgaccgtgatcgcaatggccgccatcatcaagcaatttgcgtatgaaggcgaccaaaccttctggaatcccatgggtctgggattcatgattttccttgtggtcctcgcgctgctctgggcagtctggttcgcactggatgccgttcactcggcattgacgatgtatcgcacacgactgacaggtatcgatcaagcactccgccgcgacgattgggtcgctgccgcacttcaggagcggatctacagtgcgcagaagcaagcagcgaatggcaaggcttcctcgcccatggagcccgccgggacatgcgcgcgtttgcagcaattgatccgccacctgcagtcggaatgccgagtccgcttggcacgtgccaatactggaggtctactgggcgcaatggcgggcttgatcatcaccgggtcggatacggcgcagaagctcatgcagatcaaagtgccgatcgaggtcccctcctacactgtggcactggccatcggaatcatgcttggcgcaatcctccaaacctacttcgccgccagactctcacgactggcggaactgctggaacgggtcgtactgggccttcagtcgcattcatcggccagcgcgggccaaagccgatag

SEQ ID NO: 504460 - DNA, 894 bp, Stenotrophomonas maltophilia
atgcgactggacattgccgatctgcgcctgttcctggccgtcgccgacgcgggcagcatcaccgccggtgcggcacaggccaacctggccctggcatcggccagtgaacgcctgcgcgccatcgaagccgatgccggcagcacgctgctggaccggcatccacgcggggtaagcctgaccgaagccggtgccgccctcgcccaccatgcgcgcttgatcgtgcagcagcagacgcagctgcgcggcgagctgcaggcattcgcacagggcgcgcgcggcaccctgcacctgtatgccaataccgctgcgctgaccaactacctgccctcgcgcctggcaccgtggctggcccagcggccacggctgcgggtggaactgcacgagcgcaccagcaacgaagtcgtgcgcgcactgcgcgccgggcaggccgaggccggcatcatcagcgacgccgtgccggccgagggactgcagcgccatgtggtggccgaagatccgctggtgatgctgttgccgggccaccaccgtttcgcccagcgccgcagcgtgtccttcgccgatgtgctgggtgaaactttcgtcgcgctggccgacggcaatgccctgcagacctacatcgaagaactggccgctgccgccggtcgcgtgctggatgtgcgcatccgcatgaaaaccttcgagggcctgtgcacgatggtcggccacggcatcggcgtgggcatcatgccgcgcacgctggcccggcaacaccggcgcagcaccggcaccgttgcagttccactggaagatgcctgggcacagcgtcgtctctgcgtgtgcattgccgacgcgcaggcactgtcagcaccgatgcgcagcctgctgcagcacctgggcgttcgcactgaaaaataa

SEQ ID NO: 504461 - DNA, 2466 bp, Stenotrophomonas maltophilia
atgactaccaaaaaaccaagcaagggcgggagcaattcccgcagccaggccccaaagaagggcgccaaggcgggcgcagcccgcatcaccaagccgggcaagccgttgccgggctggttccccgaattgaatgaaggcggcgcaccgccgcgcggccgcaaggtccgcaataccgatgccactgcccccggcccggcgccgggccgtaagctgccgccgaccggcaaggtgatcgacgatccctatgccgcgcgcgaagccgagaaatacgaacagcccatcgccagccgcgaggccatcctggccctgctggagcgttgcgaagggccgcagaccgccgaggaactgggcgcacgcctgggactgaccgcgccggaccgtgccgaggcgctgtcgcgccggctcggcgccatggtccgtgatggccagctggtgcagaaccgccgtggcggcttcgccccgatccagaccctgaacctggtgaccggcgtggtgatcgccaacccggaagggttcggcttcctgcgcccggtcgagggtggcgatgatctgttcctgccgccgtatgaaatgcgcaaggtgatgcacggcgacaaggtgctggcccgcgtgaccggcatcgaccaccgtggccgtcgcgaaggcagcattgcacgcgtgctcgaacgcggcatgacccgcctgatcggccgcttcagcatcgagatgggtatcaattacgtggtgcccgacgacaagcgcgtgcagcgcaacgtgcaggtgccgccggaccagaccggtggcgcgcgtgacggccagctggtggtctgcgagctgacccaggcgccggacagccgccgtccgccgatcggccgcatcatcgccgtgctcggcgacaagctgaccgcctcgctggtggtggaaaccgcgatccacggccacgaactgccgttcgagttcccgcaggaagtgctggacgaagccgcgtcggtgccgatggtggtcgagccggcgatgatcggcgaccgcgtcgacctgcgcagcacgccgctggtgaccatcgatggtgaagatgccaaggacttcgacgacgcggtgtactgcgaaccgaatgccgatggcttccgcctggtggtggcgattgccgatgtatccaactacgttcgccccggcacgccgctggacgaggaagcgcagaagcgcgcgacctcggtgtatttcccgggcttcgtggtgccgatgctgccggagacgctgtccaacggcatctgctctttgatgccgaaggtcgaccgcatgtgcttcgtctgcgacatgcagatcgaccgcgacggcctggtcacgcattcgcgcttctacgaagcggtgatgaactcgcacgcgcgcctgacctacacccaggtgtggaaggcggtgggcgaggacgatgccgataccaaagcctggatgggcgacctgctgccgcaggtacagcgcctgcaccagctgtacaaggtgctgtccaaggcgcgcaccaagcgcggtgccatcgagttcgaaagcagtgaagtgcgcttcgtgctggaccaccgcggtgaagtcacccaggccggcatgctggtgcgcaacgacgcgcacaagctgatcgaggaatgcatgatcgcggccaacgtcgaggcggcgaagtacctgctgtcgcgccacgtgccggccccgtaccgcatccacgagaagccgccggaaaccaagtacgccgaccttctggaattcctcaaggagttcaagctgagcctgccgccgtggtcgaaggtgcgcccgggtgactacaccaagctgctgaagaagatccgcgaccgccccgatgccacgctgctggaatcggtgctgctgcgcagccagagcctggcgatctacagcccggagaatcacggccacttcggcctggcgctggaggcgtacgcgcatttcacctcgccgatccgccgctaccccgatctgctggtgcatcgcgcgatcaagcacgcactgtccggcaagccgctggacaagttcacctacaacgcccgcgagatggccgcgctggcactgcaatgttccgaacgcgagcgacgtgccgacgaggcagagcgcgaggtggacgagcgctaccgcgccgcgtggatggaaaagcatgtgggcggccagttcgacggcgtgatcagcggcgtaaccagcttcggcctgttcgtggaactggacgagtcgaaggtgcagggcctggtgcacgtgacccaactgccgcaggactattacaagttcgacgccacccgcaagacgctgaccggcgaacgccgcggcagcagctaccgcctgggcgaccgcgtgcgcatcctggtactgaaggccagcatggaagagcgcaagatcgatttccgcctggtcgagcacaagggcgaggacgaaggcgatggcctgccgccgctgcccgagcgtggcaagccggccaagcgcaccaagaagcaatattga

SEQ ID NO: 504462 - DNA, 525 bp, Stenotrophomonas maltophilia
atggctgcagttgcgttgtcgtggtccggttcgccgaagctgccgcggatggcggcgtggctggtggtactgctggtgcatggcgggctctctctgtggctgctggacagcggccggatcgaactgcgcagcgacgacggcccacggatcttgctgcgttggctgccaccggaactgccgacgccggtagccaagcagcccaccttgccctccgcacagatgacgcgtccggccgcatcggtgatgccccgccctgcccaggttgcgcaggcagacagcgcccagcctgccgcggaggacgcggctgcggtagcaccactgatcctgagtcttcctacgggcagcatcgacggtggtgacggcatcagcgccgcagtggagccgagccgtgctcggctgcatctcgcgaagagcagtcgagcatggctcgactctacaaagagcaaacagcagccgagcgtgggctcggctcgacgaaaagcgctcggcgggcgcgtcgttacaactggatccaggtggccttga

SEQ ID NO: 504463 - DNA, 498 bp, Stenotrophomonas maltophilia
atgaaggaaccggacactgacgcgggccgcctcgcccaggcctcgatcctggcggtgctggcggccggcatgctgccggcccagctgtttggcggcctgttgttcgcgcttgaattcaggcgtacgccgatgcctgcgctcaccggtggggggctgatgttcgtgctggcagcctgcaatgcgattgccgtgctgctgccgatggcattgatccagcattctcagcgacgcctgcgccgggccggtttcgtgctggccggctttggccttggcgcgctggcgatggccacctgcggctggccgggtgaaacccagggccccctgctgcaccgcctgcgctatgtcgataccttcgatgtgatcagctacgccttgatggtgctggcggcgggtggcctcggcctggttgccgggctggccttccatgcggtgttccgcctctggctggagggtgcctccggccgcgctccggcaatgccgccgggcgagggcacctga

SEQ ID NO: 504464 - DNA, 300 bp, Stenotrophomonas maltophilia
atgaacaacgtgatgggaacggcactcagcggcatgcgcgcggcccagcagggtgttcaggtggccgcgcacaacgtggccaatctggcgaccccggatgccgagcgcctgcaactgcagcgcagtgcggtggagcagggcggagtggagacggcggtggccaccaccggctccgatccgggcgcgccactgggtgatctgctggcggccaaggccgaagtggtggctttcgctgccaacgccgcagtgatccggcggcaggaccagatgctgggctcactgctggatcgccaggcctga

SEQ ID NO: 504465 - DNA, 585 bp, Stenotrophomonas maltophilia
atggatgatctgcatgccccattcgcccgcttcggcctgctacgggcccagcacgagggtgactggcagggacctttcccgctaccgcctgtattggcatgcttctacgcgcaggtcggacccctgggtcatgagatcaatgcgaaggtgggcaacgccggcatcacccttccgggcctcgatatctggataccgccgctgcagcgcctgtggagtcaccaggccggctatcgctggcacggcatcagcggcgagccgatccaagactggccatcgaactggctggtgattgccgatcgcagtgccgatccgttcatcctcgacctggatgatggccacgtgctgttcagccatcacggcgccggcctgcgggatgccggcgagatcgctgccgacgtaccgaccctgatggctgtgctggcggcggccggcacggtatacctcggtgccggcgatgacctctacaacgacgatgacgatggcggcatccgtcctgaacaccaggaggcagccgtacaggcggtggcccgggtactgggccaccgcctgcaggccgagtcgttcatcgagatgttgctggactga

SEQ ID NO: 504466 - DNA, 912 bp, Stenotrophomonas maltophilia
atgccaaggctccacaacaccgaagcgctccaggctgggtccgacgcactgtttgcgatcttccagtcgtcgcgcatgcagggcggcgacatcagccgccacgtcatgcaacccggcggatcactcgccattgccgaaggccaggggtgcttccacttcatcgagcacggcacggcgcggctgcatgcagatagggccgtcgtgccgctgcgtacgggcgagctgctgttgatgccgcatggccggacgcatcgcatcgactgcgccgccgacgcgcaggggccggcccatctgaccaccgcatcgttcgggttcgatggccccggcagccgtctgctgctcgatgccctgcccggttggttgcatgtcccaggggtggaccggatgccaagcggatttcccgccaattcggccgactggatggcggtaaccctggccgcgatccaggctgaagcgtcccggcctacgctgggcagcggcttgatgctgtcacgcctgctcgacctgctgtttgtctggaccctgcgctactggctcggaacgtccggtccgcacaactgccagcgtctgcacgccttggccgaccccctgatcggacgagcattggcgttgatgcaggcccagcccgcacacgcatggaccgtcgagtcacttgcagcgtgcctgaatcagtcccgctcgaatttcgcgcagcgattcagcctcgccaccggcatgtcaccgatgcgctatctgactgaatcgcgactgcagctggccgcgcagatgttgcgcagtggcaaccgacgggtgtcgcagattgcaggagacgtcgggtatctgtccgaacccgcattcagtcgtgcgttccgccgcgcgttcggcatgagcccgaatgcctggcgccaacaggcaccggcgacatccgactga

SEQ ID NO: 504467 - DNA, 693 bp, Stenotrophomonas maltophilia
atgagcaagccaagcatcattctggttcatggtttctggggcggtgccgcgcattgggccaaggtgatcctggagctcgatcgccgaggcttccgcgacctgcatgccgtggaactgccactgacatcgctggccgacgacgcggaacgcacccgccgcatgatccgccagttccaggggccggtgctgctggtcggccattcctatggtggagccgtgatctccgaggccggaaacgaacccaacgtgatggggctggtcttcattgccgcgtttgcgccggatgcgggcgagagccccggcggcattacccagcagcagctgcccgaggcggcggccaacctggcgccagacagcgacggttacctgtggctgcagccgggcaggttccacgagagcttctgccaggacctgccggtcgacgaggcgcgggtaatggcggtcacgcagaaggcgcctctggcgagcacgttcggtgatgccatcagcgatccagcgtggcggtacaagccgagctggtaccaggtctccagcgccgatcacatgatccatcccgacaaccagcggcgcatggcggcgcgcatgcagccgcgtgccaccctcacgctggatgccagccacgcgtcgctggcatcgcagccggtagcagtggcagatctgatcatcgacgctgcagccggcggggaaggctga

SEQ ID NO: 504468 - DNA, 309 bp, Stenotrophomonas maltophilia
atgacccaggaacatatcagccacccggaagggttgccgaactgcgccgccgggcaccgcgcgcgccatatccacgacaagcgctgcgcctccgccggcggtggtcacctggtcgaatgcgcctgcaggtcgaccagcaagcacgccgatccctacaaggccatcgaggcatggcgtcggctcaaccggccggcgcgcatcgcgcggccggccgcggcggctgcggcggccgacaacgtcctgcagttccagctcggcctggccgagcgcaaacccaagacccagcgcgcggcgctggcgtcggtctga

SEQ ID NO: 504469 - DNA, 525 bp, Stenotrophomonas maltophilia
atgagccgtgcgcatccctatgccgcacgaccggaggcagccactcacacatggctgactcctccagagatcattgccgccctcggggcattcgaccttgacccgtgcgctgctccatcgccgcgcccgtggccgacagctacccgacacatcgagctgccggaagatgggctgtctgcggagtggcatggccgggtgtggtgcaacccgccgttcgggcgccacaccgaggcgtggctggcgcgcatggcgaaacacgggaacgggatcgcgctggccttcgcccgcaccgagacggccatgttccagcgttacgtgtggcgtcgcgccagtgccgttctgatgctggcaaaccggcctcacttccaccggccagacggcacccgcgcacgtggcaatagcggggggccgatctgcctgatcgcatatggcgaggcaaaccgccgcgccttgatcgacagcggcctgcccggcgctgtcatcgtcgtgcaccacttccagcagaaggaggccgcccatggctga

SEQ ID NO: 504470 - DNA, 210 bp, Stenotrophomonas maltophilia
gtgcgtaaccagctcgacatcttcgatcacgacccagcccgcatggcagcggcaaaccgcgccgccgccgagcgtgcactgcacgacgtgcagttcaccgccactgtccggcaggaacgccatgcgtactacgtgggcgaggccgaacgctgggaacacctcgccgcgcacagcgcgcgctccaccaacagcaaggacatgcagtcatga

SEQ ID NO: 504471 - DNA, 405 bp, Stenotrophomonas maltophilia
atgcagaccttcacgctgccgcgcggcgaagacctgcagcgcgttgacgcaacgccgcccagcaagttcaccggctttgtggtcggcccgttcttctgccaccacgtctacagcgacgacgagtcgaccatgatgggcgaccgcaccacggccgaactgggcgactggcaggtcactcacgtggtcaccggagcatgcgtgcagcgcggactgccgacccactaccgcgccatctggttggccgagaagctgtcggccttccaagacttcaccctgccctcgttccagtccatcaaagacgccttggcgccgcaccaggaagaaatcgcctcgctgcgttgggaagccaagaacggcaactgtcagcacgcctgcggtttcagcttcacgggggtgcagccatga

SEQ ID NO: 504472 - DNA, 225 bp, Stenotrophomonas maltophilia
atgaacgccgtcattccctaccgcgccgtttctgcggtcgaagagttgcaaggaatcgccgtcctgatgggccagcgcgcggggaagccagcggaggtcgcagttctccagcttcaggatgcaatcgctgaactgatcaatgaggcgagccgttgctgcgatggcggcggagacctgtccgatctgcgtgctgcagtcgcccgcgtcaaaggcggtgccgcgtga

SEQ ID NO: 504473 - DNA, 210 bp, Stenotrophomonas maltophilia
atggcatcgatcactgctacaagccgcggcgcagcccgcgtcgaatcccggccccacgccggcaccgtcgtcgtccaggtcggcgacgccctggtcagcctgagcccgtttgaggccaggaaggtcgccgagtatctgatccttcaggccgatctgatcgaccagcgcgcctccatcgatcgcagcaatccgcaggcggccgcagcatga

SEQ ID NO: 504474 - DNA, 879 bp, Stenotrophomonas maltophilia
gtggcattgattccgtgtgtggagtgtggacgagaggtcagcgaccaggcgggagcctgcccgaactgcggccaccctgtgaagccgcgctgtgccgctccaattcccgaaggtcatctatctgcaaaccccgggtcgaagggcaggaacgccgccttcgcgcttgtcatcgttcttgtcgtggtcgtggcagtgatcgcatcatgctggccgtcccgcgatcattcgaaagatgcccttgagcaagagacttcccggcccagcgagtcacccgagcaacgtcaagcacggctaatccaggacacgcggaacgacaagcttcctctcgaaaccaggctggaagcagcgagaagcgcagtttcgctgtcgccggattcacccgaagggaaggaagcagcggaactagtaccccgcctggaagaacagctccggaaggctacacttggcaagcagtgggactatcggacgaacgatgaccccatgacggggaagaaggcacaagcggccttcgttctaagcagcaatacccacgagttcaagttcccgtatgcaacgcctcagcacgcgatgctcagcgtccgacgccatccacagcatggaaacgacatcatcctaaggatcgagcgcgggcagcttcagtgtcccagctactctggctgcaccgtcatggtccgctttggtgaggcgacgccaagaacattccgagcatccggacctgccgatggctccacggagactctgttcatcgaagggtattctgatttccttcgccgaatgcaggccgtagacgtagtgcgtattcaagccagcgtttatcaagaaggctctccgacctggacgttcgatgtgagtggtttcgatccagaccgcatgaagtag

SEQ ID NO: 504475 - DNA, 765 bp, Stenotrophomonas maltophilia
atggacagacaagctacagaatcctgtaatttcagtcaacagcattctgttacagagttctgtgaccattcccgtatggaaaacatcggcacccgagttcgccgcgagcgcgaatcacaaggcatggagcgccgcgagctggcgtccaagaccggtatcggatacagcaccctggccgagctggaacgtgggggcatgcgcacgactacgaagctgcgcgcgatcgctgaagcattgggggtttcccaacgctggctcgaaaccggaaaaggtccgaaggttgcgtccgacgatgccccagctgcttccgtctcatcggtcttagcgactgagaccgccgccgactatgttcgcgtccaacaactggatggagacgcggacatgggcgatggacgaatcaatgatgacttccccgacgtcgttcgcggtatggactttgcacccacctacatccgttcgatagtcgggttcgttccaccgcccggccggctggtactcgtaactggtcgcggcgactccatgatccctgtgattcagcctggcgaagccctcatggtggacaccggagtagttgcgttcgatggcgacggaatctatctactcaatagcggcaatgggcagcaggtgaaggggctccaggaccgcggcgatgccatctatatcgtgagcgcaaatgccgcgctgtacccggcattccccatgccgaaaggaacggtgattggcgggaaggtgtacttgcgcaaccgcattgaaagattcaactaa

SEQ ID NO: 504476 - DNA, 375 bp, Stenotrophomonas maltophilia
atgtggtcgaaggcaccaccgccgacgaaggaagaagcacgccggatccgcaaggcgaaggcagggccgtgcatggtctgccttctgctctacacgcggaacctgcttcctcagcaccgcgtggtctacggctgcgactaccaccactgcaagtcaggaaacatccggcgcggccatgccttcggcttcgccatgtgccagtggcaccacgagcgcatcccgcaagaggggaggtcgttcgcatggatgtccaaggtctacggctggagcttgaaagatggctccagaaccttccacgagctgtactgctccgatgacgaactgatcgcgcagcagacctatgtaaaccatctcaggagaaccgccaatggctaa

SEQ ID NO: 504477 - DNA, 504 bp, Stenotrophomonas maltophilia
atggctaagccgacaggcctgtccgacgaggtcaggaccattttcgaagcgcggaagggccagtcgctcggccaccagcaggtgttcgagttgatggacgtgaccggcgtcgacaagacgaaggagcgcaacggcgtccgcgatgtgctgacgtggctggtgagctgcggctacctggtgaagagcggcgccagggccaccgccgcataccgctacagcgggcagggcatgcgcttccacaaggcgacggcggaggaactccgcgagcggcgcatcgagcgcggccgagcctaccgtgcgcgcaacggcgcacagccgaaggcaccacgcgtggacaagatgaccatcaaccgttctcaagtggagcggctgtcgggcttggccccggcgaaggcgtggggcaaggataagaacagtcagcggccggccgaaacggtggagcagttcgaggcacgcggcgggcaggtgcagcgtctgacggccagctgggagcagcgcgcatga

SEQ ID NO: 504478 - DNA, 369 bp, Stenotrophomonas maltophilia
atggacgccatcgagaagcgggtgagtgagctgctggccagttgcctggacgagtggggtcaccatcaggaagccgagaacgttcgggagggcgaggacctggagagctacgagcttgagctgcgcctcatcggacagctgctgcgcttcgggttcgaaactggaagtggtcgcgaagctgcggcccccacgccgcccgagggctacgtgatggtgcaggagacccagctgcgccacctcctgagcgatgcaatcacctcggtcgagttcatcgccgggcgtgggcagtccaaacccctgtcgcgtcgtgtcagagaccaggcgtgggcactggtcgagttgattcccgcgagaaggaaggtgccgtga

SEQ ID NO: 504479 - DNA, 216 bp, Stenotrophomonas maltophilia
atggcgagatcttcggagcacgtgtgcgagcaggcgggctggccaaacccgaacacgcagaacgcgtcgttgacgctggcgtttcggatggtggtcagatacgggcacagcgtcccatcggtcgagacgttgcgcgcagatttcggtatcagcagggcaacggcgtacaggtggcgccgggcattcgtcgaagcggtgcaggcccatgcaggctga

SEQ ID NO: 504480 - DNA, 240 bp, Stenotrophomonas maltophilia
atgctggatgcattggaggagttgggtgaagtgaagaagaacggtgtgcgctacttggtgacagggaaggggattgcaagtttgtcccagtacgaagaggaggagcggaagcaccgcgagtcgatgaagaaccaaaatgctatccgttggctcacggtgattatggccatcgcagcgctgttgcaggcgagggtgatcaacgtgcctgctctgctcaacatcaaggcatggccttggtga

SEQ ID NO: 504481 - DNA, 477 bp, Stenotrophomonas maltophilia
atgaaccgaattgctatctaccttctggtgttcgtcgcctggtctgctggcatgttcggcgcaggctgggcctggcgcggtgaccgggctgagacagtggaagcccggcagctggccggcgccagcgccgcccaggtcgagcagatcacccagacccgtgccgtagagcacagccacgccgaggcgctggccaccatcggagccaagcatgaagaagaccgcaccgcggccacggccgtccctgctgctgttgttgctggcgtgcgcgatggcagcctccagctgcgcgacgacctcgccacctgcaacaccgctcgcctgtcccaggctgtcgccggcaccatcgaacgtgatgcgcacgcccaactacgagcagaggttgcgggagctgttgttcaagtcggccgagacgcagacgaccacatccgtgccagccaagccgtcatcgcagcagaccgtgccgaggtgacgcgatga

SEQ ID NO: 504482 - DNA, 297 bp, Stenotrophomonas maltophilia
atgccgcagctggctccggtacacgtcgcgcaagcaccgcaggagaactacggcaaaggccgaggcggaaggccgtggcgtcgcaagcgcgatgcagtgatggcacgtgacctgtacctctgtcagccatgccgtgcagccggtcgcatccgccaggcagaagaggttgaccacgttgtgccgcaggctgaaggtggcacggatgcgctggataacctgcaggcgatctgctgcgagtgccacggcaccaagaccaaggcagaggcggcacgaggcgcgaatcgttctcatccgtag

SEQ ID NO: 504483 - DNA, 426 bp, Stenotrophomonas maltophilia
atgtcccgcccccgcaagccgacagcgctgaaggtggtggccggcaccgaccggcccgaccgcgaagctcctgccgccaccgaactccctctggtgtccgatgtaccaccggcaccggactggatgcccaacgcacacgcacgtaaggaatgggagcgcctagctccgatcctccacgcaaacaagctcctgaccgaggccgggctgtcggcgctcggccagctctgcgctcttcatggaaaaaccgtccagctgtacgccgccggcgaggcgccggttgcatcgatggttgcccagctgcgtggactgatgaacgacttcggcctgacgccagtggcgcagggaaaggtgaaaccgaatggcgacacggaaaagccgagcaacgcgttctccgcgctcggaaagccccgcgccgccggaaaatga

SEQ ID NO: 504484 - DNA, 1500 bp, Stenotrophomonas maltophilia
ttgctcccgcacgtggaaggcaagtgggagacgccggagatccggctacacccatcgcacgtctggttcgtggttcagctgttcgggttccgcaagcccgatggaacccgacgcttcacgtccgcactgttcgcggtcgcgcgcaagaacgcgaagtcgacgctgtcggccgccatcttgctttactgcgaatgctgtgaagaggaagagggtgcgcaggtcatttccgcggctaccactggcagccaggcgcgcatcatcttcaacgtggccaagcggatggccgagaagaaggccgatctgagggaggcctacgggctggagtgctgggccaatgcgatcagccgggtcgagaccggcgcgacgttcaaaccgatcaacgcgaaggcatcgacgcaggacggccttaacccgtcccacgtcggtctcgacgagatccatgcgcacaagacccccgatctgctgaacgtattgcagtcggccgccggtgcgcgccggaatcctctgtggttgttcacgaccacagagggatacgcgaatcctggtccatggtcagagattcggcagttcgccacgcagctgctggaaggggtgttcggcgacgcagcagaccacttcttggccatcttcttcgctgtggacaaggaggacggggacttcgacgagaaggcctggcacaaggccaacccgttgatggacgtgaacccccatctgctggcggcaatcaggaaggagtcgatcgaggcgaaggcgatgccttcgaagctcgctgagttccagatcaagcggctgaaccgacctgccgcagcggcaaacggtttcatcctgctgccgaagtggaatgcctgccatggcgtagtcgatcttgatgcactgaaggacgttccatgctggggtggacttgaccttgccagcacgcgcgaccttgcatcgctgcggctggtctggcgcttggatgacaagatcatcacctggggacggcgctgggtgcccgagtccgcggtggcacagcgcaccgagcgcggcactgtcccgtacgcggggtgggtcgcagccgggctgctggagcagactgagggcgaggtcaccgactacgcggtgattgagcaggcggttctggacgtgcacgagcgcttcaacctgcagtcgcttgcgtttgatcgctggaacgcgaccgagatggtcagccggctggtagccgcagaggttccgctggttgagttcatccaagggacgaagtcctaccaccccgcgatggtcgagctggagcgcgcctacatcggaaagcggctggtgcacgacggcgaccctgtgttggcctggtgcgcggccaacctggtcgctcgcaaggacgtaaacctgaacatggcgccggacaagcgccggtccgccgacaagatcgacgacatgaccgcgttgctgatggccctcggtgtgagtctgaccaccagcaccgagcagccgatcgatgatttcctcaatagcccggtgatcggatga

SEQ ID NO: 504485 - DNA, 1284 bp, Stenotrophomonas maltophilia
atgatgaagaagccagggcgcctgcgcgctgcagcgcttaagtggctcggcgtcccgatccatcttactgacagcgacttctgggcggagttctttggatcgagctcggcggccggtgtgccggtgaatcatcaaaccgtgctgaagctttcggccgtctggtcctgtgttcggttgatatcggagactatttcgacgctcccgctctcgatgtacgagaagacgagtagcggtaagagagtggcgagccagcacccgctgcagttcatcattcacgatcagccaaatgcagacacgaccgcagctgtacattgggaggcgagcgtggcggccatgttgcttcgcggtaacgcgcgctgcgaaaagctgatgatgggcggccggttggtgggcctccagttcctgcatcctgatcggctgacctggtttcggcgcgacggggtcaaggtgtggaggtataccgacgagaacggcctccagcgggagatcccgaacgatcgcatttgggggatacccgggttctccctggacggtgtggagggcgtctctgtcattggttacggtgcagaggtattcggcgccgccatcggcgctgacatggcggcaagctcaacgttctccaaggggctgatgccgaccactgctatttcctacccgagcacgcttaagcccgaacagcgaaaagaggcgagggaaaccctggaaacgctcagtggggccgtgaatgctgggagaccagtcattctggaagcggggtctgatatcaagacgattggtatcaacccggccgacgcccagctgctcgaatcacgcgcgttttcggtagaggagatctgtcgctggttccgtgttcctccgttcatggttggccacgccgagaagtcgaccagctggggcaccggaatcgagcagcagatgatcggttttctgacattcacgcttggaccttggcttcgccggattgaacaggcgatcagcaaggaccttctgacgccctcagagcgcacccggttttaccccaagttcgcagtcgaagggcttctgcgcgccgacagcgctgggcgcgcttccttctacgcggccatggtgaacaacggcatcctgacccgcgacgaagtgcgcgagctagaggatcgcgaacctatgggtggaaacgccgcggtgctgacggtgcagaccgctctcgcgccgctggacaagcttggcttggccgaagacggcaatgctgcccgcgcatcgatgcgcgcatttctcggcgttcccgacgccaccagcaaggagtaa

SEQ ID NO: 504486 - DNA, 867 bp, Stenotrophomonas maltophilia
atgaccatccgtgcaaccccgggcgttcccagaggacggccgcagatggatgtgcgcagctacatcgcgccggcggcctttgatcgttgggattccagcatccgcgctacagctgatgagcaggacgaccggaccatcggcatctacgacgtgatcggcgaggactggtggaccggtggcggcttcacggcgaagcgcatgtctgcggccctgcgctcgcttggtaaggggccggtcaccgtcgccatcaactcgccgggcggcgacatgttcgagggcttggccatgtactcgatgcttcgcgagcatcctggcgaggtcaccgtaaaggtgatgggaattgctgcgtcggctgcttcgatcgtcggtatggccggtgacaagatccagatcgccagggctggattcttgatgatccataactgctggcttctggcggccggcaaccgtcacgagcttcgcgagatcgcagaccagctcgagccattcgacttggccatggccgacgtgtacgcagccaggaccggcgaagacgtcaaagccatgcaaaagctgatggatcgagagtcgtacatcggcggcagtgctgccgtttcccaaggcttcgccgattcgctgctcgattccgatgagattggcaaggccgacgacggcaagaacgcctctgcggtgcgccgtatggaggccgccctgcgggcctctggcatgcccaagtcggaggcgatgcggctgatcagccagttcaagtccagcgcgggtgatcccgctggcagcggtgagggcgagcccaccgaacacggtcagcgcgacgctgccggcttcacgactactgcggcgcttgccgccaacctcaccaccatcctgtaa

SEQ ID NO: 504487 - DNA, 1212 bp, Stenotrophomonas maltophilia
atggcccagatcgacgacgacatcaagaacatcaacgccagcctcgggcaggtgaatgagcagctgaagaagcacgctgagcaggccaaggccgatatcaacgcgcatgcgaagctgtccgaagaaaccaaggctaaggtcgaccagctgctggtcacccagggcgagctgcaggccaacctgcaggctgcccagcaggtcatcgccaagctggagcagggcggcggcgtgccggccaaggcgctgaccatcggcgaagtggttgccgcgtccgatgcctgcaagaatttcaacccgggcatgcagggcagtttcaccgtcaaggcggctatcacccgcgacgacgcctcggccggcactctgatccagccccagcgcgttccgggcatcgtggcgaccccgaaccagcgcctgttcctgcgcgacctgctgacctggggcaccaccacctcggacagcatcgaatacgtgcgcgagaccggattcaccaacaacgccgacgtggtggccgagaatccgaccaatccgaagccggagtcggatctggcgttcgagctggactcggccaagatcaccaccatcgcccactggatccgcgcgtccaagcaggtgctgcgtgatgcgggccagctgcaggcctacatcaatggccgcctgatgtacggcctgaagctgaaggaagaagcgcagctgctgaagggttcgggcgtcggcctgaacatcaatggcctctacacccaggccacggcctatgcgaacccgggtgtgaccgtgcagaacgagacggccattgatcgtctgcgcattgccatgctgcaggtgaccctggccgagtacgaagccgatggcatcgtgctgaacccgatcgattggaccaccatcgagctgtcgaagaccaccgagaacgcctacctgttcgccacgccgcgtggcctggctgtccccggtctgtgggcgcgcccggtcgtggcaaccaaggccatggatctgggcgacttcctgaccggtgctttcaagatgggtgctcagggctgggaccgcgagcaggcgaacatcacggtctccaaccaggaccgcgacaacttcgtcaagaacatggtcaccatcctctgcgaagaggacgtgggcctgaccgtcttccgccccgaggcattcgtgaagggtggcttcgacggcctgccggtcaccgacggtgctggcgccggcggctga

SEQ ID NO: 504488 - DNA, 360 bp, Stenotrophomonas maltophilia
atggccaaggtcattgcactcacctcgttcgaacaccacggaagccgtagtcgcggcgctgagttcgatgtatccacccaacacgccgacttgctggtcaagcgcggcctcgtgaagctggctggccagactgccgctgccggtgctggccattccccggcgactggcgagaccaaggatggtgctcagctcgtccgccagaaggctgccgatgcgatcgtggctatcgcggcggtgaccgacctcgaactgctggccgctgcgctggaagctgagactgccaagggtgagaaggcccgcgctacggtggtcgaggccatcgaaactgccatcaaggccgcaacgccggcgcaggcctga

SEQ ID NO: 504489 - DNA, 345 bp, Stenotrophomonas maltophilia
atgcagctgatcaccatcgagcaggcccggcagcactgccgggccgatagcgccgacgacgcgatgctggagttgtatggtggtgcggccgagggcgctgcacagcagttcctcaatcgctgtgttttccctgacgccggctcaatggccgctgctgtgctggccggcactgccgggatcgaccccatgctggtcaacgactcaatcagggcggccatcctgctgatgctggggcacctgtaccgcacgcgtgaagacgtacaaggcagcgacggggcgacggtccaagtcccgatgggcgcccatagcctgctatggccttatcgaatcggcctcggggtctga

SEQ ID NO: 504490 - DNA, 450 bp, Stenotrophomonas maltophilia
atggcacagcagattatcgacattgataccgttcaaccaaacggaaagcgcggagagccagcgcgaagcatgtcgcaaaaaataaacgcaaactgcactgagctctacaccggcaaagtatccaaaggttccaacgggtcgtggcctgacgcaattccatcggcttggaacgcttgggagggtccccgagtcattcagtcatatgcctcgggaactccgaatacgccatccgcgttcggcgtcgcgttggcatgggcaaacgttgcacctgacgcaagtggaaacttcacgaggggcagtggtcgatggatcaaccagctcgcgttcggcaccagcaacgatgtgtacttcagccagtcaatcaacggtgcgcagttcggtgcctggcgccagttctggcactccggaaacacaacggttgatgccaacaacttcatcaagcgagcctga

SEQ ID NO: 504491 - DNA, 372 bp, Stenotrophomonas maltophilia
atggacagcacctgcgctacagcgttcaacatccggccggacggcagtatcgtcctcgatggcgaccacgcgcccgggaccagcatcggttgctcgtttgaagatctgggcatcgcgtgcactcgggtcggaaccggcttgtaccgggtgacaggcccaggcatccaaccggcagctggatggcgagcgagcgtataccgtgacgagaacgacgagcagaccattcgtctggccatccagcaggagactgatgcggtgctctactcatgcaccgatccagcaaccggagcgcccaaggacatcgtctatctattgaccgtccgcgtgaccgtgacgctctccgacgacggacgggagggtgagccggcatga

SEQ ID NO: 504492 - DNA, 294 bp, Stenotrophomonas maltophilia
atggcggttggattgaggcaacgcgatccagccgggaacatcttggtcgacatcactacgcgattgccacggatcatgaggcgccagcagctcagcgcgggtgttagcggatcggtgagtgttccggccagtggcagcaatccgatcttctactggttcaacgcgtctacgtctgagccagattacaacgcgtcaccgcggttcagcgacgacggcaacacgattacgtggacctattcgtcggccaatccactgtttaaccggtccggggtgctcgtctatggaaggtactga

SEQ ID NO: 504493 - DNA, 738 bp, Stenotrophomonas maltophilia
atgacaatcggagcgcgcatccgcaatgacggcggatcactcatccagatcgacccgggctgggagtgtctggggatgaaggcaggtccattcgtcgtccaggcaaacgcctacaccgttcctggtatcggcggtaagacgattggcagggccgtgattcaggttgccggctgcaacgagcccattctggcggtcaactgctccggcgcgcttgttggcgtggtgagcaagagccagtcgggttccaactacgagtgggtgatcaacaccgacgtcgtcggggcaagcgtcacctactgggtgttcgacaccactgacgtggctcaaatgcagttcatcactacgaaggggctcaggatccggaatccggccaacaatcgggtgatcttcgactcccgctataagtacatgcgggtcctgcaaatggtgaacacccttgccggcaccgggaccgtggacattccaatcccgctcacatctggctatgcggtaggtatctgcaacacggggctctacacccgcgtggacggcggaccgatcagcggcggtggcggttggcgcacccagacggtgggttacgtcgtaggcgtacggaccaattccaatggaaccatcagcgtcgggctgatcaacactcgcagcgcgacggatgaagggccggggccgccgtacccgccgaccggccagatgggctacaacaacctgaccggcctgatcctggacatgcggaactactag

SEQ ID NO: 504494 - DNA, 432 bp, Stenotrophomonas maltophilia
atgcgcgtactgcttgccaccaccattgccgcagcactggtcgccggctgcagcaccgcgccgggcgtgatacacgggcgcactgtcgaactgcatcgggagtcgtccgtcgccggcgagagtctcgacgacttcgtggtccgcattgccccacacgccttggaatcgtccaatactgcccgcgcaacggtttgcgggcagatcgaacagaatgcaggcatcttcagcgtgcagctgaagaccgacggctatgtcagcgactgcggcctgccgaagactggcaagccgtatgtcctggtgaatggcacagccaccgacgtgcgagagaaccaattctcgctggtgaactggcagcgccctggctatctgatcacgccctggtcggtgaagtaccaggacggcgccagcaagcggcctcgcgtcgttcgctag

SEQ ID NO: 504495 - DNA, 387 bp, Stenotrophomonas maltophilia
atgatccagcacactggtccgctgggagccttcgagtacatgggagtgatggaaggtggtgagtacatcctcagcacggatgcgaccgctacgcattttgatcgtttggtcgagatcaataacgataagactccctgtgacacccccttgcccgacgcacctcccggccgggtgatagacgtgtcggccgaaccgcacgacaaagtgctgcttatcgatcgacaattcatcatcaaccgcgtgtccacccgtaaatatctagccgaattggtcgcattgaatgccccgcacagctacttccgcggccagttcttccaagatgacgtgatcgactacctgaacacccaccccgagctcggggacggaccgccggccagtgccggctga

SEQ ID NO: 504496 - DNA, 1083 bp, Stenotrophomonas maltophilia
atgaacgacgtcaacaacgcctgctcctgcccgagcggtgacgggtcgctgctccaaccgtgttccgcacaccctgccccggcggacgtgcagcccggtgggagggtgaggctgggggatgggctgcggccgtgccccttctgtgggcattccgactttgaccagtggccgtgcgagtacatcgatgccagcggggccaatgtggtgcgatgcgcgcgttgccatgccgcagcaccgatgaaggtgtggcacgccctctccgcccagccctccccgggtggtcagggggcgccgcgctgtgcccggcactgccagaacggattcgcagacatctgcctcgcctcccaacgtgatggcgcgatctgccccgaggacagctgcgacattgacgacggcatacgccacaaccacctcgccgcccgccagccggtgaatgggctctcatgggctgactattggacgaagcgcggacaacccgacgccgcccacgacttcgacgcgttttctcgcgccgaggcttgggcgctccagcgcttcccagacgcccgccagccggtgggggagccggtggagaagactgatggggaagtggccgcgcagttcttcgcagatcacccagcacttgctcttcgctactggcatgagcatatccgtcgcccgctgacccacgtaccaactacgcgtgaggcgagcccgtacttcgagtgcagcgccgagcaatgggagcgacacacaacgggcatgaccgacggcggcaagcagcgtctggcaaacatggtggcacaccactgcctgcttgctcgccgcgatgatcgtggctggatcatcactcgtttcgatctgatccgaagcgggaagccgtggtggcacgtatccaacgatggcgtgctgacatacgactacgaccctgcgaccaaggaacgcaaggtcgccgccccgcccgcgcaggccgtggacctggggcagttccgggaggcggttgcatacgccgctcgttcggccgacttcgccacccacgtggaaatcgggagcaagctgcgcgaactgctggccctgatcgacagccaggcggtgggccaatga

SEQ ID NO: 504497 - DNA, 222 bp, Stenotrophomonas maltophilia
atgctggccatgacctcgaaccgtctgcgaacggtacctctgaccaagaagtcccaggtatcggacgtgctacacgccggcggccgcatcgtcgctggccaccggcctggcctgctgcagttgctcgacgccgagggcagcccagtccccgcctggcaaaccgcgctgaaggccgcgacgccctcgcccacaaagtccggagacacccatgaaccgcagtga

SEQ ID NO: 504498 - DNA, 630 bp, Stenotrophomonas maltophilia
gtgcgtgccacttccatcgcggttgtcatatcgctcgcactgagttcctgctcaccgtccctcgggtcctctactgctgactgcatcactcagcactccgtcggggcaaagagcgatctgggcgcccgcgccaatgctggcttctgccgagaactcttcgatggcacccccgccccagctcgaaagcgcttccttgagtgcgccatcccggcgtcaagcgcagccgggtcggacactggcgttcgggtagccctcagccaatgcaatcgcgaggccagctcagcggcggtgaacacttcggccacgcccgctggccccaccctaactccagtagtcggcaacccgtttgaccgtgaggttccccctacctttttcggcgcaacggacagagatctggcaagccgcctgggccgccccttgcccacggcaggctcagccgagctggtttgggctgcacgagtcgacatgttcctggcccttccggagaaccgccggctcgcaagtagcaatgcagctttgaccgcgtggcagacgacaatgcaggccgtagtcaacgaggcgtctgcccgcgggcaacagctcgacgattaccaggtcatggagacagcaagggaccggcttagtctctag

SEQ ID NO: 504499 - DNA, 573 bp, Stenotrophomonas maltophilia
atggttgagaccgtactaggcttgacagatctacagatcaagttggtcactgcagcggggcagctggcgctggccgcgatggttgcgtatgtggcatggcagcagtggcgcacggcgcgcaacaagctcaaggcagacctctttgatcgtcgattggctctgatgaaatcactgcaggcatgcgccgacaaaacgtatctcgacaatctcaccgatgcagagctggcggcactaccagggctggcgaaagaggctgggtatcttttcgggaagccggtgcgtaccgctgcctatgggctaagtgaggcgctgcatgcgcgacaccgaagcaaagtggcaatcgtcgaggccagggctctgctccgcacccagtgggacgctctcggtttcatgtcagcattgccacaggatcggataagcaatgaggtcgagctccttgagacgcgaattgctgagacagagtctaggatcaaggcacacgagaatgaactgatcaccaccacaggcgcgctttcggggttgctaatcacgctgcagatttcggcctctgatgcgcttacgttgaagcattaa

SEQ ID NO: 504500 - DNA, 309 bp, Stenotrophomonas maltophilia
ttgagcgagaaggacaagtggtacgactttggtgaggccctggccatcacggccggcctgatgacggtatccggtgcgttgttcgcggcgccatctcgattgttcccgattccggggatccagtacctggttgcagttgccgtggccgttctcgcaatgcggatctgcatcggcgcaggctggcgccttggtggcacgttcaaccatccgcgcacgacagcagccgtcgcgatcgggtcttcggtgatctattcgacgatgatcggcggcctcgtggtggcgctgattgagcgtggccccggcgcgtaa

SEQ ID NO: 504501 - DNA, 1080 bp, Stenotrophomonas maltophilia
atggctacccgcacacctctctacctcgatcagccgctggcgcgcatcgcagaatttcctgttggagatacgctcgacacggcgcttatgccgtctctgcttgggcgcagcgttgcgatcaacggcgacttcagcatgtggcagcgcggtacggaattcggcgcatctggatacagcgccgatcgttggtacttcaatgccggtggtggcgtcacgtcaccgtttcttcgccagaacccgattccgctcggtgcttacaacaccctatgccccaactgggcgtgggttagctataccggcagtgcgtccgcaagccactacgtagtgcttgagcagcgcattgaggacgtgcgtaccttcgcaggtaacaccgtggtcgttaccttcctggtattcaatgccggagcagctgggcggaagatcgctgtagagtttggacagaatttcggcggcagtggcggctcgccaagcacgtctggtattggagccgtaacgtatacgcttgcagcaggcgtgaacgctattacccacgccgtgcagataccatctatttctgggaaaaccctaggaaccactcacacggggtatctaattctcacgctttgggcgtcaggtggttctgacttcaacgcgaggaatgcgtctctcgggccgcagacgggtgatgtgcatttcgctcaggtgcaaattgaacgtgcagctgctacgccgttccaacgccggctgccggccgtggaggtgatgctttgtcagcgctactacgaaaagagctacgacctgagctccgcccctggcgctgccgtaaatcctggccgtgaagcgcacgcaatgtcaggtgttctcgcctcgacgtgttgggccaccgtccgtttcacgcagcggaagcgtagcgtaccttccatcgttgtctacccggcaaacagtaccggcggaagtcctggcaacgttgcgcagaacgatggatctctcgttccagccaccgtcgagaacgtaggttcgtcggggatgcaggtagcctggggcaactcatcaggtaaattcggcggctggttccattggacggcagacgcggagatttga

SEQ ID NO: 504502 - DNA, 468 bp, Stenotrophomonas maltophilia
gtgtaccggctcaccgatagtccagatattctttactgcatcgagactggagcgttcatcccccgcgaccactacctttggcccaccaagtggctagacgaagggaatgcgccgcttccggtaccgccaccatacgagcttcactcgcccgagcactaccgcgcaattcgtgcggccgcctgggcttggatgactgccgaggtgaacgcccgtcagtacgacagcatcgagacgtgcgtgggctacttcaatagcggtgttgagcggtaccgtctggaggcccgtgcactggtagcctggcgcgatgcagtaaatcaggcccttgaaaccctggtgttgaatccgcctgccggcatcgagacctgggagcaggtgcgtccgcttcttccgcagcctgaagcgttcccatggcccacgagtgtagagctcccgttggaggctggtgacggccccactgctcaactttga

SEQ ID NO: 504503 - DNA, 915 bp, Stenotrophomonas maltophilia
atgactagaagatcttggcgagccactgcaattgtcatagcaggcctcctgactgtgatgctgctgtacagaatcaatgtcagcaacaatgcagaccctgaatctggatcgaccagtagagcgggggcaggcgacatcacacctgcacattcaggtggatcggcacacctcaatgccgaggtcaagaatgaccgaaaccagctcaaaccagtggctagagtccctggcagctttcaatcccacttcatggatgtaaaacgaagagcagagcatggctctccagaagcacaaagagagctatccgagatctatggaagatgcatggcgatcggcacatcgccaacgaagtttctcgccggaattgatgcaatcagcaagcaatcccgcgacgccagatcatcagcgctgcttatagatgcagccaacgacctggtaacaacatgcgccgaggttgatggcggagctccagtccctgtcgatgccaacaagctatggctcgaagcagcagcaagcggaggcgacctagcggcgcaggtccgtctgaaaatgatgtatccatatgactcggtcaactacgagatcgagactttgtataagaacgcagtcgccgcaggagacgaacgagctctattcgacctagggcagttacttctgcagaagaatgacattccagaaacgaagtattccggagccctttcagggaagctgggaccgtacgcactccagattgcagcgtgcagatatggactcgactgcagcgccaaatccgaagtaatgaaatcgctatgcctcaacacgactgcgtgcaatttcaccgattacgagagcttcatccgatcaatgatcatcccaaagagcgagacagaacaactaaacgataagataaatagaataatcacaacactacccaactga

SEQ ID NO: 504504 - DNA, 162 bp, Stenotrophomonas maltophilia
atggcttacgggagtgtcgtcgttgacactgtcaggtcgcatgccaagtggttgtcccaggagttgcgggaagagctcgggatcgagcctgttgatgacgagcaggaggacgcagaattcctgctacacctgtcctgtgatgtggaacccttgggcgagtaa

SEQ ID NO: 504505 - DNA, 597 bp, Stenotrophomonas maltophilia
atgccaattgaaattctgattgcgcccgcggccccggccgcagagtcagcgggagacttctggaagtacggcctgccggtggtttcgctggtcgtcggcattatcttgaagtggcttctcgacttggttactgatgggaagcgggaaaaggctgccaaaagggagcgggcggaagagaggcgtgaccttttgcgagctcgcttggcggactcggagcgaacaaacttgcttgctcttcaaccactggtgatgcagtaccttcgcgcgctcgtcttgtctcatgatgaggcggccgtggccgccagaaccgatggagtctggtcgctagcacgcgcccatgaaggcgaacgcatggcccgtatggccaagatgtccatgatggagatccggacgaggcttcatgatcgtggtttggcagatgatctctcgaacatagcgagcgacttgcgcttctccattgcgcgcgatgcgagagaggcgctagatgcgctgaacgaaatcaccttgagggcagtccaggttgtggagcgaatgggggagaagattcggagtctagaagcctccgaattggcaatcgttgaggggaatgaggcgtag

SEQ ID NO: 504506 - DNA, 882 bp, Stenotrophomonas maltophilia
atggcgcgcgagacaaagctaggggacattcagggttggcatcaacgtctcaaggagctcaagcatgagcgtcagtgccagacccccaagttcttgctgccattccactttgtgaccatggcactgctactcaaggaagagcaggcgaggattgtccggcttcctgaacacattgagcagtacgcagccctgcttaagcttcgggaagcgattggccttgaacctgcgaatgaccagcccctgccgtccagcaaaggcagccggtaccacgagatcacgccccttaccgccctgtcagccgttgactcatctgcggccgccctagcggagatgttgacggatgatggaaaaaatgctagcaatgaagtgcagagcaatattttcacgatgctgtcagagttgctaggcaactgttaccaccatgctcgggctaacgatggtcttcacggactggcatgcgcgcagacttggtacaaagacgctagggcccagatcgctatcgctgacagtggcataggaattcgaaagagcttgatggagagcagtgaattggcgcctcgactcaggagggagaatgcctgcgctttagcgtgcgagttgggtgtttccagcaagctaggagttgggcacgccgggtacggacttgccattgctaaggacctggcaatgcagactcgcaattcgaccctgctagtccagtcttgcaatgaagctctcttcatcgataacggtaaggtgtctgaaatttcagactttgattacgctctacccggcacactgattgtcttcgagtgggacctcagcaagcccttggatcttggcaacgtctacaaacaatggccggcgaacgatgatgaacaagacaagccagatttcttctga

SEQ ID NO: 504507 - DNA, 1257 bp, Stenotrophomonas maltophilia
atgaaccgcttcaaccagctcgtcgccaccgcattgatcggtctgtccggcgccgccagcgccgcctctgccccgcactgggtggccagctggcaggccagcccgcaaccggtctggggagcggacttcctgttcccgtcactgataccggcgtcgctgcacgaccagaccttccgccagaccgcgcgcatcagcctgggcggcccccgcctgcgggtgcggctgagcaatgcctatggcacccagccgctgcggatcggcggtgccagcgtcgcgccgcaggccggtgcgacgccgcatcagctccgcttcgatggccggcccgaggtgctgatcggccccggccaggaacggctgagcgatccgctgccgctggcggtgcaggaccgtcaagcgctgcaggtcagcgtctttgtgccggagtcgacgccgttgcagaccttccactgggacggccgccagaccagctggatcgcccccggcgaccagagcctggcgcgcgagctggacagggccagcgccaccacggcccgcctgttcctgaccggcattgaagtcgaggccccgaccagcgcacgcagcgtggtggtgatcggcgattcgatcaccgacggcgccaccgccagcctcgaccgggaccagcgctggaccgaccacctggccgcccgcctggccccgcagggggtggcggtggtcagtgccggcatctccggtggccgcctcctgcgcgacggcatgggcgaagccgcgctggcccgctttcaacgcgatgcgctggatcagcctggcgtgtccagcgtgatcgtgctgatcggcatcaatgacatcagctggcccggcaccgccttcgcgcgcaagcaggcgcggcccacgcttgccgaactgcaggcgggctaccgcgccctggccggacaggcccatcgccgtggcgttcggatcgtgggcgcgaccctgccgccgttcgctggcgccctgcccggtacgccgctggacgactactaccagccggacaaggacgccctgcgcagccagctcaatgcgtggctgcgcaccgacggcccgtttgacgcagtgatcgacctggacgcggcgctgcgcgacccggccgatccgtcgcggatggccgccgcctatgactccggcgaccacctgcacccgggtgacgcggggaaccgggcgatggcagaggcggtggatctggacgcgctgcttggaggtcaggggtcagagcccttttcccatggaaaagggctctga

SEQ ID NO: 504508 - DNA, 633 bp, Stenotrophomonas maltophilia
atgaagcaccttccgattgccggtctgttgttgctgtcacttgccgcttgcaaccgcacgcctgagacacctgctgatgctccggccaagggcgctacgccggctgctgccacagccgatgccgatctggcgacccggtcgccggccgatccccgcaccgacagccctgcgcggctggatggctacgccggcgtgaagctgggcgccggcatcgccgaggtccgcagtggcttcgacacgccgctgcaagggctgggtaccgacgctgccggcaagccattgccggccgacgacagcaacgacggctgctacttcctgcgtccgcaggatgccgaggacccgcgcctgatgatcgaaggccgcaagctggtgcgctacgacgtgcgcagcgccgccatcaccgcaccaggcggcggcaaggtcggcatgaccctgggtgagctgcaggtgctgtacccggagcgggccgatgtcggccctgacaagtacgacgagaaggcccagcacctgcgcgttcgcccggcgcaggagggcggggcggtgatcgacttcgcgctcggtgccgatggccgggtgggtacctggcgggtcgggaagaccccccaggtcgattatgcggaaggctgcggctga

SEQ ID NO: 504509 - DNA, 546 bp, Stenotrophomonas maltophilia
atgcaaccgcgcaagaccgatctcgcccgaaccgcgctgcaggcccaccgcgcgccgctggacatgcgccagcgccggctgctgatcctgtgcgacggtcagcgcggcatcgccgaactgaccagcctgctcggcccggaggcgccggcgatggtcatccagctggtgcaggcgggttatctaagcaccgggctggccacgacgacgcccacgccctcctccagagcggtcatcccccccgaaccggttgctgcagcaccggcacccgctgcagcgccttccataccggtcgaacgtcgccgttcgctggtggcggcgcgcatctacgtgctgggcatcctggagatgcagcggcatccgcaggcagcggcgctgttccgcgacctgcagcaggcgcgtgcggaggatgaggtgctgcagcggctgcagtcggcgatgcagctgctgcccgcgctgacttcggatggctattgccagcgcgtgcgccaacgcctgctggaggcgttgccgctggagcattgcggcgccttcgccgaggtggcgtaa

SEQ ID NO: 504510 - DNA, 852 bp, Stenotrophomonas maltophilia
atggccgatccaaatttttcagaatcgcaactgcaatctgctgtgaatggcgccttggtccggtatgctttggaacatcacagggcttggctgttgccacacgttgtttcactttgggatgagtttgatcttggctgggataccgcatttgtggcgccatggttcggaggcgggcatcctgatcaggatgggtgcaacctgttcattcagtataagctttcggatcaactcgttagccagggcgcagcgcaatggacccattggaatgagccatactaccggttcaagattccgcacagtacgctgggtaagaataaaaaatacattgacgattttcatcaatgggaaagccttgcgaagctcgcgaaagctggctatgcaaccttctatgcgacaaacagcacactttgcaaaaaggagctgcaggctcattacaatgcgggggagttacttgatcgaattgcgtggctagacgtgcacgatgttaagcataagaagcatcgccatgtcactttcacgcctgaatcgaatttcttttatcttcacagtgaattggaagaagtgaacaggcggcccatcgtggaggtgctgatgcacctatccgaggagcgcctgaacgagagcttgccacgcgcaaatgagaggctgattgcttacttggcggaaattttggagcaggaaggatcggagcaaggcggcggtccatatcgcgatgaactcgcacgaattcgtaacttctcgttagatggaaatgatgcgttcttcgctaggcgcgttcaccttctacttaggtcatttgtcagccggtacctaggagccacgctactctggatacctcggcgtaccggctaa

SEQ ID NO: 504511 - DNA, 1140 bp, Stenotrophomonas maltophilia
gtgactgctgaatttcaggagatcggacactctggaggaagaatcgaagttcgggtaatgactcaccacgattccggaaggagggcctaccaacttcgatatgtccatcgccgtgcggtccccgcaatattgattcaactgtatgccctgccgcagggcatcgcccttgaaccagttgacgctgcaggaataggagaagcaactacgccgccatcggtgccaggtgcttggctggtcatgatttgctcggatagcacgggtcagtttggacatcgttgcccgcgttgcgagggatattggcgcagcggaccgtggccagcgatctgcccctactgtcgttttgaagctccgccaattagtttcctgtcgaatgcgcagaacgctttcatcaggcaatactgcgcccgtatgagcgaagccttcgattcagatgaagatggcgtcattgagatagacatggatgcagtggctgatgcggtaggtgcggatactccaaagccagcattctacgtatccgaacagagtcaacagcaccagtttgattgcgccgcatgccgatcattcaatgatgtgcttggacgttacgcgtattgctcgtcatgtggaacgcgcaatgaccttgcagttttcaagggcgaatccgtatccgcaattcgcgaaatattaaattccaacaatcgtgctgaagatgcggtgcgaagtgcagtttccgcattcgactcgttcgcgggtcagtacgcgaagcagctggcagtccttgtccccatgacaaacaggaggctcgacagacttcgtagaaggtttcataactttgacgaaacggcttcgatgttcagttcgttctttgatatcgacatcggtcgtgatttgaggtcagaggatctcaagttcatcgcgctacagttccataggcgccacgtttttgagcacaacggcggtgaggttgatgaagtttaccttcgggaaagcggtgatacgtccgtgaaactaaagcaagtcatccgggagtcatcggccagcgcccaccggctcttggatttgttgggccgagtagcaaataacctacatgctgggttccattcgataatcccggtcaggtcggcgcccattgaatgggctcgtgaacatggtgcactgtag

SEQ ID NO: 504512 - DNA, 597 bp, Stenotrophomonas maltophilia
atgaagaagcatggccttgccgctgcgacggtgtgtgcctcgatcatgggggcggtgtgggtgggatggcccgagcctgcgggcgatcaggtgtgggcctaccagaagctgcaaccggtcgattaccggttgctgcacagtgatgcgctgggcttcgttactgcgaaggcgcaggaaggctttgaactgcgcacgcgctatgccggaaccacgtccttcgagatccgctgcaagggcgttgtggtgctggacgtggagaacgcgccctcgcgcgtgctgatccgcatgcctgccgatgcccgctggcgggcgccggacatcgagcgtctacgtgccagcttcgagcggtggctggatctgcaccagagtgagggccggttgttggtggagcgtgcggagccttcgtgggtcgaggcacggcttgggcgccttgacaggtcggtgcctgatgaccagcgatgcacgttcagggacccaggccgcccttggccggaacctccctcgtcattccgtccgtccagcagaccattgcaggcagtggaaggaatggcagcatcatcctcggcattgttccgacgtccccgaagaatcgcgtga

SEQ ID NO: 504513 - DNA, 150 bp, Stenotrophomonas maltophilia
atgttcggacttcctcagttcaatcagcagtcgtcctgttgggtagccagcatgatcgatgcagtctggcgagtgccggataccgaacgcgcgcgcatcagcttcgagcgttggatgaactctcagcggaaactgggacggttgctctag

SEQ ID NO: 504514 - DNA, 456 bp, Stenotrophomonas maltophilia
atggacgtattgggggggcagggagatgcgatcaacgacgtgggatgccaggccggtggaaccgatccgatgatggacttggtggttacacagtggctgttgccctggctgttgaccctcgcattgctactgctgatgtggcgctgcgcgccgtactggaagggcaatgcctgggtataccgcgccggcttcgcgctcctggccgggctgctgacaccgacgttgatgctggccggtcacggcgttctgccggttccgaccgtcggaggagtggttacggtgttgctgcggttggagtggatcggcgatctggacttcaacctcctggcggtcggcaccgacaacatctggttcctgttcacaccgttccagatggtgtccattggcatgctgttctttccactgcggacggcacggccggctcgtcttggcttcggcggcaagaccacggactag

SEQ ID NO: 504515 - DNA, 633 bp, Stenotrophomonas maltophilia
atgctcgactggcgtgaaggcaacgccgggcactgcctggcgttgctgccctgcaatggcaagccgttaccgcgacaccttgatctgcgtcagccgtcccccggacgccctggcatgcggtacgcggaacattgcacccggttgcacgagttcggcctgctgcatcatctttggccaccactccagaagacgtgctgcgcgctcgtagtggttgaacgtgctccaacctttggccagcacgaatacagtcaggccgaggcgtgcgatggcctcgcgctctgcaggcctgcgatgatgatgatcctgggtaacgtgcacgcggatgccacgctgggtggccgcttcgaagagttcgaggtcggtcgtgccgggcttcacgaactcccttacgtggcagacttcgtgctggtacgttcctgcaatggcgtcgatggcccgagccagcgcgggcggaagattctcatcgatctgcgccttcaaggcgcggctcgattctcgaactgcagtgctttcttcaccgcagtcagaggcaggtcatacagcttggccacgcgacgctcgtcgccaccttcggcgcgcagcgcctcaacaatggcgatggtaggaacgcccgattcggaaaggatgggctga

SEQ ID NO: 504516 - DNA, 1281 bp, Stenotrophomonas maltophilia
atggacgttggccgctccgcaaagcaatcttccgcgctctttcgcgaggctgtccggctggatgatctgcgccgccagaacgctccgctcgaccgcctgggctttggctggcgctctaccgccttgttctttctcctgctggccgcggcagtcgttgctgtcgcagctacagcacgctttccaaggaaagaacgcgcccagggggagatatctaccgagatgggaacaaagcgcgtaactgcgacccgacagggcgtggtttcggcaatacacgtcaagccgaatgaggcagttcggaaggggcagagtctgctgagcctttcctatgaccggacagttgacggcataagtatcgggaatcgtagcctcgaagctgctcgtaggcagatgcaatcgcgcgtggactcactgggagacacggcagaagtcattaggcagaagatctttgaggtagagcttgagtcggcagagaaccgcgagcaagttgaattcctcaatgagcttgtcgctctgaaagagatgcagatcgcggataagcagcggacggttgacgccatggagcagctaaccaaggagaagatcgtctcggaactgcagttccgcgccgctcgtggtgaacttttggatcagcagcagcaactggtaggcctcaaacgagagcgtggccagctgctatccaagataggaacgtcggaaagctcgaggcgccagctggagcaccaagtctcttcatccgagtcgatgattacggctgagacggccgcgttcgatgagaaggagatctcattgcgagccagtagcgccgagacactgacggctccaatggatgggcgcgtatcaagtcggattgcatctttgggcgagtcagtccaaccaggtgcatcactcatgatcatcgctgcgacggacgagcctgcgattgggcgtgcatgggtgaaatcatcagccatcggatttctgaagcttggaggtgaagcgcgtttgaaggtctcggcattcccgtatcgcaagtttggcacgatctcgggaacagtacgggaagtcgccaaggcgcccacgcccgttgctgatttgcccagagatctgaatgcatccgaggcgatgtatgcaatcaccatctccctgtcgtccaccaatcacgagatgtcccgcaatcaaaagattgatccatccatgctcgaagacggaatgaagtttgatgtggatcttatgatggagcggagaacacttctcgagatgctatttgatcctgcaaggacggcactttccggcctggaatga

SEQ ID NO: 504517 - DNA, 2160 bp, Stenotrophomonas maltophilia
atgtcacggcaacacttccagtatcaaagtgagcattctgagtgcggattagcctgtgtggccacatccgcctctctgatgggcagagagacaactctatcctctcttcgaattaggcatccttcgtcctctcaaggcacgaatgcggcggcgctgatctcagcgttcaccagcctcggcatccatgctcgcgcgatccgttgcgaagtggaagacctccagcacatttcgttgcccgcggtactgcattggaagctttcgcactttgtcgtgctcattaagtgcccacgcgggcgattccacatctttgatcccgcgtccggccatatgagactaagtggaacgcagatttcggaacattttaccggagttgcgctcgagctgactcggcttccaggcttcgtcgctagcagaagtgatcttcagtttagcattcggcggtttgcaacgatcacggccgaagtgaagcagtcgctggggcttggggccgtctactccgtgttccttcagctcttcctcgtcagttcgccgttcttcatccagatatcggtagacgaggcagcaacccatacagacacagacctactggttctcctagggcttggctttgcactgcttgcgatcttcaacttcatagctgaggtacttcgttcacgagcaatgtcgagggctgcaagcgctttgtcgtggaatgcaacgcgccgactgttccggcatatgatcctccttccattggcatggttcgaacggagacgccttgccgacgtgtcgtcgcgattcgacaccatggattctctcaagcaggcattaacgggcggccttgtgtccgctgttatggacgggattctgtcgcttctacttgtggcgacaatgttcttcgtctcaccggcacttgcgcttgttggcagttcggccgcggcactctacttgggcctttcttgggcttcatcgccggtgcgaaacaagctgggcggtgaggccttccaggcatcactgcgtgagaagactgccaggattgagacgattcgttcaatcgcatccatcaaatccgccggcgccgagctgaatcgtgaggcggaatggtcggcccgacttgcagacgcaaccaacgcggggaatcgactaagtttattgctagcatccttgtctgctagccgcaccttgctggacaatctcgcgacggccggcgccgtctacctgggcgttcatttgctgctggatcaagcactgacggttggcgccctatttgccttctttgcactcaagcgccaactgtccgcaagaatccatacgttcgtccagcagatcaccgccttccgccagactgtccttcactcagatcgattggccgatattgttctaagtgagagcgagttgatgggtcctgaggcaatggatcacccttcgcttgaggggcgcatatacgcccagaatgtgtactatcgctacggtcaatcggacgagttttcggtaaaggcactcaatatcgccgttcatgcaggagacttcgtactcctcaatggtccgtccggttgtggcaagagcaccatcatgaagctgctcgctggtttgtataccccgcagcaaggtgagatccggtatgacggcacggcattgtctacgccattttcgcgctccataaggtcgcagattggcgtggtaatgcaaggagacgagctgcttggagggagcatcggtgagaacgtagcgttcttttctgaggatgccgagccagagagtatctggcgatgcctggcactggctgggctcgccacagaggtcagagctatgccgctccagttgcagacgcgcattggtgagattggaagcacattgtctgcaggccagcgtcagcggctcctgattgctcgcgccctgtaccgccgcccccgcgttcttcttcttgatgaggcgacagcgaacgttgatctagataaggaaagggaaattttcctctcgctgcgatcgatcggcatcacgatcattgccgttactcatcggccacagatcgcgagtctggcgacgctccttgccacatgtgctggcggctcgataacaagcgtgaagcgtgtgacgcctgagcagatcattccaggccggaaagtgccgtccttgcaggatcaaatagcatctcgagaagtgttctccgctccatcataa

SEQ ID NO: 504518 - DNA, 552 bp, Stenotrophomonas maltophilia
atgtcgaatggaactcgcgtgcccagctttggcgggtatacctttaccgccgcgtgcgctctcgcatgcttgctgggcatcgtgctgactgcgcaggcacatcaatccgctcaacctgagcactctacgttcgatgtcgaggatctgattcagttccagcaacgacctgatgacgccagcatcttgcgcacgttcgaggtgaccgcaaacaggatcggcaccaccggcaacgtgcggttctctgaacttgaaccgcggtcctactccgccatgggtcctgctgtacttatccgcgatcgattctcaggaagcgtaagacagttgacagtgacgcagaaggcgaccatagatgatgcacactgcttgaaactggctgaggtcagtcatgcactcggtctgtttgtgcaaccgcccgaaccgactccggtatggaagaccgaaggacagcggaagcacgcttttcatgagaactctcaagtgagcatcgatgctatcggcagatctcctggaagcgattgtctgggtagcgttgtcttcaagtacaagaactag

SEQ ID NO: 504519 - DNA, 789 bp, Stenotrophomonas maltophilia
atggcgatccacctggtctcaccagtttcgtacgccgcgttcgttgcgggagtcgctggccatgctcgagagattgtcgagattgaggtgaatcgaacggcacttctgcaacagaggtcagtcgacagcacggatgatctctgccacgggattctgcacttctgggctgcacaccaatctaagctcgttcatccactctcagaacatgtgacgcaccgtaaaggtctcaggcgctgtcacacttcgcgtgtcgagcatgaagtgctctgcgaggtggttgatcagtgcagggcacttttggatacttcggctccagctgctctgcagtcggctatcaagctcatcgcgagccgccttggcgtggatggagagctgcgctgtggccccaacgttacgtcggccgatgaggcgggaaatcgctggggctacatgccgcacccactacttgccaagaggcttgactggctggctgcaggtgcccgtgacagaggctggtcgcccttcgtgcgcgcgacttggttctatgtcggcctgctcaactgccacccacttcaggatgggaatggtcgaaccgctagagtgcttttcaacgcgctgctttggcagggtaaagatttctatcttccaatctatgaagccagcggctctctcggttcgagcttggagatctgtctgcgtcgagctgccaactcggatgattggtcagacatcattaggttcttacatgaccttctaagcgcgcacttgagtgcattggaactgcggattcggtccgcccggacgctgtag

SEQ ID NO: 504520 - DNA, 927 bp, Stenotrophomonas maltophilia
atggcaacaggaatgcgtgccgcacgcgaactcaccgccgaagaactactgctggtttcgggtggcagtcagacggacttccaagcggcctccagcggcgtttgggacggggagatcgatcaaggaatggtcgaacactacttcgacgagactcgctgggatggtgtggagaacgtccagtttgacatcagcgccgcgggaatgttcgcactcgctgcaaaaggcagcttcacttccggcgtaacaagtgagctggatgaagttcttagcaacatccccgatgtgcagcagtcgctgaagaactacctggacagcggactgtccatccagttccgcgagatgggcgcggccaacggatatgttgagctgggtagcatctatttgaatccgaacatcaagggtgatgccctgcagatggcgaggactatcgcccatgagttggcccacgtggagaatcgggtaacttgggaccacaagccaactagagaggaatacgtcgccacctacctcaaggaagagggacgtggagttctcgcagcgatgaaagccaacgacgtcctagcagcaaagtacccggaagcggccgcctacacttgggactctcgattcattgagatcaagaacaagattggatctgagtacacagtcgaccaagcaatcaaggctatgggcgatatctacggcagcatgaagcatcccaccgatccaaataagacccaagctgactacttggccgaaccgtgggatgaaacattcggggcaaagggcggttcaggagccggaggttggggaggcactggcggagctgggggcgttccctggacaggtgggagttggacctggggaagcggtggctggacaattggcataggcggcaacggcagcggcggcactaccggtggtcgcgaaacatgggaagaggagtga

SEQ ID NO: 504521 - DNA, 171 bp, Stenotrophomonas maltophilia
atgagcctcaacgagagtcgccacgatcgcatggaggcattcgaaagtgatcgcaacgctgcgggctatctcgcgcgcttggcgttgaccgaagctgcgttgcgcctggagcagtacaccggtgcggacgaggcaaagtcattccgtacaatgccgccgcgagtcgcttag

SEQ ID NO: 504522 - DNA, 2088 bp, Stenotrophomonas maltophilia
atgaagatgggagagtttacgaagcgggtccgcagtgatgctatcgccgggccgttgaggcgcgcattcaccccggacagatggaaccgtgcattcggtgacctgccggcacctgatgccgaggatcaagacattcatgccgccgggctggtgttacatgaaaagctagggacgatccgtagcatccttaagctctcttcgtcagacgagatctccgcgacgaccaagctgcgcgcctttctggcgctcgccaactacgattttttcgtaacacgcgacaagaccggtcttgcgatggagcggttcatgaccgagagagcggctgtatcgcaggagctttacgacatggaggaaatggcggcggtgaaactcagcttgcctgggggggccgcctggatgcccaacgaggttgtggaaggcattgtcgatggcatagaactacctattagggttgttatgcaagccaaacccgatctggccggcaatcctcgaatgaatcggatccagtgggacgaagctatccgcgaactgaacctgggcgtcctttaccgcttcgctgtcgacctgtgggatgactgcctttggaacagctacaagatgatcgacacgggaccggtcaaggtcttcctgccgcgagaaatcgatgtgctccgtgcctatcgaacaggtttggcgcgccgagcatctctctcgatgggcttcaacattcaggcgacgcagttccaacgcgaagcgttcgctcaaggtatgaggctgaaatttcgcgatgtctgcggcatcgagcgtcgtggcaaacgtcaagtgatcaaggtcgccaaacaaggcgtctcgaccggcatcctagagcaactcagcatcctacgcacccatgccgccgagccatactacggagagctgctagaggagcgtcttgaggctctccacggattaactctgtccacgctcatggacgcctggaccttcgtttcgcgcgccgcgcaaatgctggcaaaatccatcggcgagaagcatacccaaaatgttggggaagatcgtgtccatgcctggatgcccgagtatgcccccacgctgcagactggggctctggaggatgccttggcgattgcggcggggatcaacaaggcggaggcccggagcatcgtggatttcttcacgtttcggggcatggctggacaggagctctgggcgcagccactcgtaccagttgggccagacaaggtggtgcctgtctttgcagcggtcgcatcgcccaatctgcgtcggctggtcgatgtatggatgcgacaaaccggcgtggacctagccaggcgaggacctgcgttcgaaacccacatccaagagcttgtcatagatgccattcagagctcggaggtgctgtcacctgtcgccgcttgcatcactggcgactatacgttcaggccctcgggcagccgcgacgagcaaatcgatctgatcttctccatcggcaacacggtgttcgttgccgaagccaagtgcatccttgagcccaccgatgctaagggcctcgctatgcaccgcaagaccgtgctaggcgctgccgagcaggcattacgcaaggctaaagcggttgaagacaatcgcatacagttcattgaggatgcgagtcggttcggaatgaacctaagcgaagacttcaaggttgagcccttggtcatagtgagcaccagcacccatgtgggcattgccgcactgacagtgcctgtcatcgacgagcaaattcttggccgttttttggacggcgaactagaggacatagcctatcagccgggcgatccggcttcctcaaagcgctttaagacccggttctactcaaatgccgctgaggctgaagagcgagctccaggctactttgcatctccaccgcagatgaagcgattcattgatggtttgcgcgcacgtgtcgtacccctctatgccgcggacgaaagagattgggcaggccaggtcgtgacaatggaatgcgttgcgggaggcgttccactctcacttcaagagcaggcgaggtcggcaatcaaaggcgatccaaccacatccatcacccacgagcgctatgtcgacgtgccatag

SEQ ID NO: 504523 - DNA, 975 bp, Stenotrophomonas maltophilia
atgagatatgccgcggtagctttagagtttgttagtctcgctatacgcgacatcattcgccgagagatgctgatttcaagctatccggaggatcggtactgggcggctaggcagctgaaagtcgcgctggatagcgtggacgatgacagctggtcagccgcgctacccaaaggaggcgattctgttcgcttctacaacaagcaggtgaagcatttgcttcggcagggcccaatgactgccttccgatttcatcgtgtggctttaagcctgctggacaagaggagtaagggagcgaacttcagcctagccaggatcgaagcattgaccggttggcaggagtggccagttcccggtaaagacaggcagtggaggctgttgaggtggctagattggaagggcgccgtacacactgagtacggacagccggcggccgaaccaagcttgtactttgcttttttggaagagaagaactccatcgagccaggtcgagacgtgtacggaggcgacggtcgagtactggcccggactgaggacggaggcaagctgacgcagatcaggttcgctgcaattccatgtacgcagttctttgatgcggcagatcagattgatgacctggagcccgggctcgtctccgatgaagcaaggagggtgcggctcctgcagcttcaagagaacttgagtggggctgatcttccggttattgatctcctgatccgctcgcgaccgccatgggccgtcagacttccggtcgggacttggtgggtgctcggattgggcggcggtgtgcccacattggcggatgctcgtctattcttgactgatactagtgatcctaggaagcagtccgacacggggcccttgccattggggatcttcggggccgttccgcagtactggttgcgtcgccttcgggatatcttttcgctggctcatgtagctgatgccgatatcggtggaagacctggcccgggctag

SEQ ID NO: 504524 - DNA, 885 bp, Stenotrophomonas maltophilia
atgcctaaggcgcgaaagagagagtggattcaagcagtggatctggactcgatatcgggtctacatccgacttgtggggtgtctgccattggtggagttcgggttcatgacatcggccaaggggacgccatcagcattcttgatgagaatctggagccgttcttgcagattgactacggcggaaaagttggaaacatctttcgcaatcagatcgaccagcatgtccctgtcaaaaacgactccctggttatgctttcgcactgggatgaggaccattggtattcagccccaatgggagtctctgcaaaggccgcgacatggctagtgcctagacagatcacttcgcctcgagcggtcatgttctcaacaacattgcctaagatctactgcgtaccggaggcaatggtaggacagacctggatcttcaccacgacgtccggagatcaggtttgctgggaaaagatagcgagcgctcctccggcaaatgccgaagacgaggattgcaatcgtacgggcatagccttctcggtagttaagaaaaatccaggcggaggagcgccacaggtagtacttcttccaggcgatgccgcctttggaaaagtgaaacactacgaaggtcaacgtaaaaaggggtacgtgctgcgaggaatggtggccttccatcatggctccaagctacacatttgcaaggctacccagagccttcttagtgggtggacgtcaacggcaaactctgttgacatcgtcttttcctgcgcctcgaacaacagctttggccacccggactttgccttctatgcgggtctcccgtacgctaatgtggttaccaccactactccaaacattcgcgtgctgggcaatcctcatcatgacgtgctcttctaa

SEQ ID NO: 504525 - DNA, 234 bp, Stenotrophomonas maltophilia
atgctgggcaacctgctggacaacgccggcaagtgggcgcggcagcgcgtgtcgatcagcgcggcaagtggcgaagggcagctgcgcattgatgtgcgcgacgacggccccggcctggccgccaatgcgctggcgcaggtcacccagcgcggcgtgcgcctggatgagcgcgaaggcagcagcgggctaggcctgtgggagacatcgccgccagctacggcgggaagctggtga

SEQ ID NO: 504526 - DNA, 459 bp, Stenotrophomonas maltophilia
atgaagaatagttcggaaagctattcgggtggtgcgggctatgtctacattctccaggatccgctccacatcaacaaaatcaagattggaagatcgttggacccaacccgacgcatcgaggagcttcatggaacgtcgtctgcggcgcgccttcagctgcgcgcgctttgggtaacttcgaatgccgcttttcttgagaggtcgattcaaggcatgtacgaattcaatcgaatatcgcccgatagggagttcttcttgatcgcggacccgagttggttctctgttggcgtcttgaatgatccagattcggttgatgcgttcttgtggcaaatgacatccgacatcaacgaggccatttcgaccacggagacggaagcgcgcttcgtccctctcgaagagtattttgagagggttcatgagaggaaagagatctatccacggggccctaaggggttctga

SEQ ID NO: 504527 - DNA, 705 bp, Stenotrophomonas maltophilia
atgggtacaccttatgaaaaccagatcctgggcgcgttcgtcttcgccctgggtgttgaatgcggaaaggccggtgtgttcatgccggccaatttattccagcaaaccccgttggacgggacgttcggtgacctcgtggtcggcgcggactggtgcctggccttggagttcaaacgagaggaaggaaccatcgactcggagaaagagaaatggagcaaggaagcgctgcaggcctttgagggcgacacgctgcttaaggtcgcctcccgcagggcccacatgctgtgtttcagccggccaacgtccgatggagttgatctgttcgctatggtctacgcatccgcgttgggcttgggtaagtccaaggttgagatggagtgccatcgtcttatccaagctctcgtgcatctggtcggcgacaaatctccagaagccaaaaagaagattggcctgccgccccgcgagcttgaggcgtacctgcgcaaacttgcctcgtaccgcagacaaggcggaggtggaagggatgcgacctggcttgccgtggccaaaagcggcgatagcttcaagatccggacgagttcttcgctggagcaacttctggaacctcttcaacaacgtgcccgatctccttctgagcagcaagaccacagcgtctggcgtggaccgacgcttggaagtcgagacgatgacgagcacgaacggtga

SEQ ID NO: 504528 - DNA, 330 bp, Stenotrophomonas maltophilia
atggtggtgcgagcgtacggtctatctgcgtcgctgctggtgctggctgcgctatgtgtagccatgctgtcagcttggcctcagaaccctctgctggctggcctgaagtccatggccagcttggtgcctgtcggccttgtggccgcaagcctggtgctgatggggatggccacttaccggctgcacaggttgcagcgtggtgcgggccatgactgctctcattgcggtgggccgctcggcgccgagcgtgccggccgtgcccggatgggaggtgcctatcggcgttgctatgcctgtggctccaacgtcaaccatcgacactaccattag

SEQ ID NO: 504529 - DNA, 1155 bp, Stenotrophomonas maltophilia
atgggacgggcaaagcacgaatggatggaggatcaggagagaggctggagctccatcgaggggagcacctgcgaggattgcctgaatcaggcagatatctggcgactgtcgaaggccaacatttgccaaggcgagtgcgactactgtgacaagagcagcatccctgttcttgctgtcgaacacgttcaagaacacctctacgaagtggtgggaaagtactacgccgagcctgcaaatgcgggtactccctgggtggacggagggtggatcgttcccaccctggacacggacgatgttctggacgtgctcggcttctatccggccgacgcgctgcgtgcggatattgtcgaggctgatgtcactggatactgggttgaagctgcgcgcgggcattgggcggatgtccaggacgaggaactcatgctccactcctggaagagcttctcctatgcggtgaagcatcagactcgattcaacttccgaaatgttcgtacggatacggactcgcaggagatacccgtcgccgacatgctggaagtcgtcggtgtggaaataagctccttgatcaggccgctcgataccggaacggaactgtacagggcaaggtatctcccggctgacggatccattgaggtatcagggtcgaccctagggccgcctccgaaagagcgggccacggccggccgtatgaaccctgcagggatcccatacttctatgccgcgttcgatgcgaaaaccgcccttgcggagatcggcgcggcccccgaaggcacgttgcccgcgaccgcggtcttccgtaccgatcgactgcttaacgttgtggacctggtggagcttccccgagcgccctccgtctttgcaactgacctaaggtctgagcgcatcagggcgctgttcttgaccggcttcgtgacggcaatcacacagcctgtcgacaaggatggcagagaacatattgactatgtcccctcgcagatcgtttgtgagtacgtagctcagtctttttctcgagacgatggcgtttccatcgacggactaatcttcccaagtgcggcccacccaggcggagtgaatctggtaattttcccgtcagggagccccttccagcacaatcgattcaaggctatctctttcagtagtgccgtctcgatgtga

SEQ ID NO: 504530 - DNA, 1002 bp, Stenotrophomonas maltophilia
atgaccttccacttgggggtcatgcgggcgctggcaaatgctggttgtttggagtcagtgtctaggatatccagcgtgtcgggagggagccttgtcaccggactcgtgctacatcgctctggcatgaaatggccgacttcagagcgatttctgggagagatctacccggcactccgcgatgagctcacttcacgcagtctccagtgggatgccctccgcgaactgtcgagcatctcgaatctccgcttcttattaagccgctcaaatctcttggccgctgccctgcggcgtcggtggggcattgagaacaagcttagcgatcttcccgcgacacctgattggtcaatcaacgggaccaacgctgagaacggacgccgcttccggttcaagcgtgcaaacttgggagactacctcacgggttacgcagcgacgggcaacttccccctggccagcgcaatggctgtctcggccgccttcccaggcggctttggtccgcttcgcctcagggcggacaaattcaggtggaagcgtcgagcgagctggagcggtcctgcacacgaaaccgtagactcccagccaggctctgtgatccatctctacgacggtggcgtatacgacaaccttggactcgagcccttctttgatgcgggtagtggagagccgaaggagccgaacggccacttcatcctggtgtcagatgcaggaaagcccttggatatgggctttagcaaatactctctgaatccattccggatcaggcgcgtggccgacatcatgtctgaccagtcacacgccctaagggttcgtacctttcaccactacctttctaagggtcctaataggggagcaatgatctacatcggtagtcctgccggtatggactctgcagatcaggaagaggcaaggttcgtagccacgttccccacaagcctcatcaagctgaccgaagccgacttcgacagaattgcgatccacggagaaaggctgactcgcttgccataa

SEQ ID NO: 504531 - DNA, 2241 bp, Stenotrophomonas maltophilia
atgagctcggagtactttgcgcatacattgactgctctcgacgagctagcggcagtcacaccgcgtacaagcgcgatgatcgccgctgtcaatgctcaccgtgacttcaaactcatcgaggtgatgcgtagcgccaaggtagatgagctggacaccgtctacctaatggtggacgtcgaatgccatggtgtgccaacccacaatgaatacgggctccgctttcgggagcgcatgctcatacatgtgcctcaggacgatgcgaaggcaacggtcgtttggtccatgcggaaggactttccgaggcttgcacaccagaacagcgtaacgtcgcagggcccagctcagctctgcttgtatttcgagccgccctcggttgtcgcccgcacctggactccttcgtcatttctcgctcggatccagtggtggatggagaagaatgctaagggcgagctgcatctggccgatcagcctttggacatgctgttctttgagtctcggaatgaactgctgatcccctgggatcttgatcaactggcggcagggggaaagctcagcgtcatcgctgcagcagcgcgcaagagcgatggctggacactgcgcatcgttgatcaactgcctgccaacaaatctctccacgctactctggtcaaggtagatcttgagcctattgaaagcgggatgattgaatgggatccgcatactctcggacagctgaatgaactcttggcacggcgaggagcggacctggttccgcttgtaacagcggctatccaggcagctacgccttcatgcggactcactcgccaggatgaggttccgagcacgcttgtgctgctctctgttcccatcaagcgtgcgtcgaccggcgaggtagaaggaatcacctatcgcgccttcttccttgatggtgggacactgaagatcggcactatgctcggtgcccttattccgcatgacggtcgatacttcagctcagttggtgttgttggaaatcagccgcaggaaggatgggagtctatcgggcttgatccagtcaccgttctttgggagaacagccctgaacgtgcacgaagccagtcgggcttcagcgatgcggggccgcaaggcgtgttgatcggcgttggatctttgggaagtgctctgctggacctatgggttcgatctggctggggtcggtggactgtagtggataaggatcatgtccgaccgcacaatctgtcacgccacactgcattcaatagacagattgggctacccaaggttctggcagtctccgcaaatgccagggaggtcacgcgcaacggttcggctgtgactcctctcgaggaagacgtccttaccagcaccttgccggagctggagcaggcccttcggagtgcagacctagtcgtagatgcaactgcggacctgagctacccgcgggcgtcagcagtcgtggatgatcgatcacggcatgtgagcgtgttcgtaactcccaacggtcggtcgggagttatgatgcttgaggacgtcgccaaggagcggtgcctgcgtacgattgaagctcagtactaccgcgccatcatcaattccgattggggaagagtccatcttgagggccatcgcggagcgttctggagcggagcatcgtgccgtgacatctcaatggtcctaccgtactccagtgtgatgattcatgcctgtcagtttgccgagagcatcccagcccatattgccgatccccaggctgccgcgttgatctggcagcgagatgtgagtggccaaacggaagcgatagaggtcccactgtttgataggcggatacaccaggcaactaatggcctcagcatctacatggatgaaggcctacacgaacacctgcatgctctgcgcacaacgagtcttcccaacgagacgggcggtatcctcctcggctaccacgacttcacgcagaacctcctcgtcgttgtagatgcgctgtcggcgccaactgacagtaagggtacgcccgcttcgttcgagcgcggtgttgcaggaatgccagaggccgttgcagaggcacagaaccgcactgctggaatcgttggatacgttggagagtggcacagccacccagacggctgtccgccagagccaagccgagctgatcttgtgcagctggtcgagctcgctatgggaatgcacgaagaaggccttccggtaatccaagtcatcgttgggagccatgacattcgtgttgtccaggcggaggttcagccttga

SEQ ID NO: 504532 - DNA, 1161 bp, Stenotrophomonas maltophilia
atggcgaccaagcacgaagtgattttctacccggttggtaacggggacacgacgcagatcattcttgataatggaaaacgaattctcttcgacttccgtcacaaacagtgcgcggaagaagagtcgacaccagagattgatctgaaagcaactctcaagaaagaccttgccgacgcaggcaaggaaagtttcgatgtcgttgcattcacccacgcagacaacgatcacatcgagggaagcgctgacttcttctggcttgagcatgcaaagatctatcacggcgagggtcggatcaagatcgaccagctctgggtccctgcagcgatgctcgtggagaaggctacccaagaacagctgagcgaagagttcgtgcttctgaggcaagaggcgcgccaccgtcttctcgaaggcgaaggtattctggtcttctccaagccacccgaattgatggagtggctggagcccaagctgaaggctcgtgatgaagcatcgacggcccgggatcacctgtttgtcgatgctggcactatcgttccgggttttaccttgcaagaagacaacgtggagttcttctgccactcgccctttatcgaccattgcgaagacggcgacatcatcagaaactcggcagccttggtgttcaacgtgaggctccaggcagacggccgcacctacgactacctggaagttggtgatgccgactaccgcgacctggagagaattgtcgacattacgaagtaccacggcaatgaagaccgccttgcctgggatctcttcaacattccccatcactgcagctacaaggcgcttgggaaagagaagggagacaaggacactgttccctccgagaaggtcgctgagcttctcatgaaggggaagaaggactcgtacatcgtagcctgctgcataccgctgcccgacatcaaagagtcctacgagcgggtccaaccaccccacatccaagcccgcaggacctacgagtcctatcttgagaaggttggtggacgatccttcctcgtaactatggaagagcccaacgcgaacaagcctaagccgattgtctttgaggtggctgccgcaggcgtcacctggacgaaagcagcgtcgtcatttggctctgcggctatcgttgcctcccgccctgccagggcaggagcatga

SEQ ID NO: 504533 - DNA, 603 bp, Stenotrophomonas maltophilia
atgcgcaagctgattgttccaccagcactcaaagaagagttcagtacggttgaggcactctggcagtgcaatggcagtactcgcagggtagacgcgttggtagtgagctgggtgaagtacgaaaagcaactacggcggctcttcagcttcttcgtttttcagcatcccgcgatcactgagaagactctggacgcggttatcgaggcgtttgtcgctaacaggaacttgaatccagagaccttcatttctggaatcaaagcgcttggcgtaacgccaataccgaagctactaggttcttcgcatgctcccctgtggaaagagatcaagcgaataaagatctatcgcaacaagatcatgcacggacaacagactggccaaggaattcagtctgctcagctggagaaggacgtcatacacatcatcaactggatgtctgcgctagcagaggcatcgaactccgcgtacggatatgacggactcaggcggggcgcatatcggatagcgaaggcaagtgccgacgtccctgttcagcgatatccttttagcaaccctgcggagctcaagagctggctctcacggctcaaggcggatgccaatggctga

SEQ ID NO: 504534 - DNA, 1260 bp, Stenotrophomonas maltophilia
atgagatccgttctgccccagttgaaggcgctgcaaaagagagatgagttggatgaggatgagaaagccaagctcatctacgcgaaccagaaattgtggaatgccttctataaatcggagtacacacgtagtcacataggttgggaacacgcgctcgaattagtctatgcagtgctgaattctggcgatctcgacgatgcccgttcgtttgcaacgcggcttgatgctgcgctgaaacaaacggcgcagcatctcgactacattgccgtcgtccctctggggttctttcagccaatggctttcgcctcgaagaggcagagggcattttttcgtccattccaagttggtccattcacactggtgccacctgcagtcacaagcgcggcgctaaacaagcgcatccaggtctttgactccaaagctgtaccggacgacttgttcgaacatcagcaacggcagactgaccaagcactgagcagcactcctttgttgttcctgccaacccatggctcgtcggattccctgcgtcaccagacacgtgcatctgctcgccgagtgatcgggttgattgaattgcttggtcgagttttcggcgtaaagaagccagcgctggggaaggaagtcacaccaaactacttgttcctgatcaacaagcgtacggggtggcttgatcgggttatgacaatgcgcccgttgactgtgtccatttcgctagagagaaagcttgttcaggtaatgaggcgtccggacgtaccaattgccctcaagctgctctcctcgggtgaggagaaaaccttgaatgcacagcttaggaatgcgctggaattctttggtcgagccgtgaacgagaaagatagcgtggcgcgattcattttctttgtcatatcaatggaggcaatcttctctcgcgataagcacgcacccatcaaggttacactggctgactacgcgtcactactttgcttcaagggcaaggaccggaggcgcgtccatgtggatcttggaaatatctacgatgctcgatcaagcattgtgcataccggtgcaactagcgttgaacgttcgcttctgataaaagccgaagcgttagcggcaagagcgttgtactgcagtttgatgcttgccgttcatctcgataatggtcaaggggatcttcagaagaagttcttcgatttgctcaagggtatgaagatcggtgtcgaactcaatccaattaggctgcccgcttggcatggctatggcccggatgtagacgaatag

SEQ ID NO: 504535 - DNA, 801 bp, Stenotrophomonas maltophilia
atggaaactttcgctccaccgcttacttcagaatgctgcttgtgtggatcgaaggaagcgctttccggtgagcacaagatcaaggcatccgctctcagagccgtgtttggcaagcagggaatggtgatcgccaaacacggtggcccttatcgcttcgcacaaagtccaagctccaaagcgctccatttctccgcccgtgtctgcgaagtttgcaacaactcaaggactcagccggccgatctggcattcgaccagttcaacgcgcgagctctagagcttatggcgctcggctcgaatcctgccgatgtctttaaagatccacgattcatacaagacggacctctgtatctggacgttttcagatactttgcgaagctgatgtgctgtcatcttgcggagatgagcgcgccatcatttgaagatgttgcaggctttgccatcggagcgaatgacgacaacttcatccttttgacggttgatgcggatgtcgcgtttgagcggctacgaattcatctccccgagatgccgtacgccgcccacggtggacttgctatcacaggagatcgggactcgctcgcgccggcgtccttctactcgactcttaccatagggcctgttcgttatcgctaccaagttaggctcaacgagatcggtcaagcgcggctcatgattgagcacccggcgttctacgactggtgcgcacgccgggtcgaggatgcaatcaagaatccgatgagtgacgaggacagtgaactgcttggtcttgcagtcaatactcctgatcattcagacccagagtag

SEQ ID NO: 504536 - DNA, 621 bp, Stenotrophomonas maltophilia
atggtggcagggcgccaccgggacgacggtcactcactgctgcgctatgcagaccgggtggcggtgcgttgcaatcgatgtgacacgccgggttgggtggtaggtacgcctgattcacgccgcttccggtgcctgggttgcagccaggcattgaacggcggctgcggttgcagccgctgtggctccggagactgggtaggaccggtgcgctactgcggctaccgtccttgcggctactgcggccacaaatgggtaagcgctgaagttcgccgcgctcgagagacatctgcgctgcgggtgctgtccgcggactgcagccaatgtgggcgcagcagcgatgtcgaggtcacccggtcgcgctggcgtggcaacgaagccatcgacccggacttcggcctgcctttgaggttggtggaaaaaacctcggctggcctgctgtgggcgtataacgccgagcatctgcaggcattgcacgactacgccgcggccagactgcgcgaaggcagcggccatcatcgttcgatgttctcgcgcctgccgcagtggatgaagctggcccgcaaccgggtgctgctgcagcgtgcggtggagcggttgcagcggcgattgctgcaggggtag

SEQ ID NO: 504537 - DNA, 1827 bp, Stenotrophomonas maltophilia
atgaacgacaacggccgaacgcctttccctgcccagaacccgggccagacgggcgggcttcgccctggccaggttcgcctgcttgccgggatcatggtgctgctgtgcatcctgtatgtcgcgctcgcactgacgccgtcttcctactcgctggcctacgagtacctcggcctggccccgcagcagccgctgctcggtaccgcccgctacatccgtaccgacgaatggatggtgttcacgccgtacatccagatcgcggtcaacaacgacttcgggcaggtcaatgcgcactcggcgtaccacgagtcactgcgcaccttccaggcgctgccgctgctggactgggggctgctgttcaagccgtaccactgggcgttcttcgtgctgcctgcagcgaatgcctactcgttcttcttcatgttcatggccatggccttcctgagcggatgggccctgctcctgcgccaactgcggatgccggcactagccgcagtgctggtttcgaccacgctgttcttcgcgccgttcgtgcaggtctggtggaccagcaatgccggtgccttcgcgctggccccctgggctgcggtggcatggctgggcatcggccatcgcgcgctgcgcatcgtggccagcgcctatgcactggcggcgtggctgatcgcagtgtcctacccgcctttcatcatttcctcggtgctggccctggcggtgctggtgctggcggtccggcgcgatgccatcaccgtagtacgtctggtcgatgccgccatcgccggcgcgatcgcactggcggtgttcgtcggctacttccacgacatcatcccgatcgtgcgcaacacggtgtaccccggccagcgccagagcgccggtggcggtgtcggcctgaccagcctgctcgcgcacctcttcccgaacctgatgacctaccggttcgccccgctgccgttgttcaaggcgtccaacgattgcgagatcgcggtgctgggcagcctgctgccgctgttcaccctggtgctggccgatggcgcacggctgcgcgaatgggcgaaaagccaccgcagctccctgctgatcctggccgccgggctgctgttcatcgcctgctggatcttcctgcctgtgcctgccgtggttggcaagctgaccactctgtcgatggtgccccccgcgcgcgcactgctggccttcggcctgttgctcaacatcgcctgcgcgatgatcctggtgcactgcggcgtgcgcctgcagcgctggcgcctgctgcttctggcggcgctgctgatggtcggcagcctggccaagttcctgttcggtgaaggccagttcagccgcctgcacagcactgccgacgccattccctacctgtgcctggcggggctggccgttgctgcccgccgcccaaagctgtcggcgcatgccgccagcctggtcctggctaccgccgcactggccaacctgctgggcaacggcctgttcaatccggtgcagcaggccggcccgatcttcgcgatggaccgcgctgccgtcctgcactccctgcaggcccgcggctcggccaccacgaccgaaggcgtgctggtggctcccggcgggttcgggggcctcctgccgggtgttggcattcccgccgtgaaccatgtgctgtacctgccacagatggattacttccgccggtacttcccgtcgatgtccgacgacgacttcaatttcaccttcaaccgctaccaccacatcaccgtagcgcctgacggcgacgcgccacgggtgctgcagggggatctggtggaactgcctgcaaaacccctgctggccactccagcccgatga

SEQ ID NO: 504538 - DNA, 492 bp, Stenotrophomonas maltophilia
atgcgctggccgtggtccgcaacgccgtcgctccggcttgaggatgcccaggctgacgtgttgctgcaggacctgctgtcgcgcgacggcaagcgcatcaccgatgccgcccgtacggtctcacggctgttcaccgcgtcctcgctggatgcattggccgcgcatacggacctgatcgaacagcactgccaaggcatcgcgctcggcggcatgctgatcagcaaccaggcccacctcaaggccgcactgcaacgattgcgctactggcaggcacgcgagggctgcctgtgtgtgctcaatcccggctacccgttcttcgatccgcgtcgcctgatcgaacaagggcaggtgcagctgatctcgttgcaggaggccgaggatggttggggcgattgccataccgttgcctgcacccagtgcggccagcactggcaggccatcgaccgcgagtatcactacccgtggtgggagtggaagaccagcggccggtga

SEQ ID NO: 504539 - DNA, 1518 bp, Stenotrophomonas maltophilia
atggatgcagcacgcgcgttgccccgttccgcccgccgtcggcggtggccgatcgtactggccatcctcctgctggcgccgccattgctgttcgcctctgccctgctctggccactgtcggcaccgccgctacccgaacccggcaacagccgcgtgatcgtcaacgtacgggtggtggacgtgcacaacggcattgccggcgagccgaccagcgtcaccctgcgcaacggcatcatcaccgccatcggcaatgatgcacacgacacgacgctgcctatcctcgatgccggcggccgctggctggtgccgggcttctgggacatgcatacccatgcactgcagctgtcaccgcaactgcagttcccgctgatgctggccaatggcattaccggcacccgcgacatgatggactgcccgcaggctaccgacccgctgatcgcctgcgtggccgacaagcgccgctggaccgggcaggccatcgcagggcaacaggccgcaccacgcttcgtacaggtcgccagcttctatttcgaggacccgtcgctctcgccggaggctgccgcgttgcgggcacgcacgtacagcgcgcgtggtgtccacgcgctgaaggtctacaaccggctgcgtgcggatacctaccagcggctggccaccgaagcacggcagcttcaccgtccactggttggtcacctgccaagggcggtgcctctggaagacgcggtacaggcaggccagcgcagcttcgaacatgcccatctgttcgtgcggcattgcttcgaccatgcagccgcctggcgtggtggcaccctcgacggcgacgacccgaccgctctggccgaacggatggtcagtggtcatcagcccgcgctctgcgacgaagcgttcggcctgatgcaggccagcggcgcagcattcgtgccgacccatgtcacccgggaggaggatgcgcgcgcacgcgatcccgccttcatcaacgatccacgcctggcctacctggatccactgtcacgctgggcctggcgtgacgacctggaggcaaccgcaagtcgctaccccgggttgcgcggcgaagacgcgctgaaggcctacttcgcgcatggcttggcgctcaccggcgccgcgcatcgtgccggcgtcaccgtgctggtcggcaccgataccggactgggcggcttccgctaccacgatgaactgcagtggctgcggcatgccggcatgagccgggccgacgtactgcgtgccgccacgctgcaggccgcgcgccatctgcagctgcaggcatcacatggcagcgtcgaggtcggcaaggccgccgatctggtcctcctcgatggcgacccgctgcaggacagcgcaaacacccgtcgcatccacgcggtgctgctggccggccatctctacgaccgcccgcggctggatgcgttgctggtgtatgcgcgttcgcaggcgcgttctccagcaatgatggcacgcctgctgtggggcttcctcaccagcccggtcagcgccgagctgtag

SEQ ID NO: 504540 - DNA, 603 bp, Stenotrophomonas maltophilia
atgggaaatgctgaggccagggcacgaaagctactgcagcgcgcaggcacgctgcgcgcgcgcgaactggtggctgccggaatcgcccgtgcgcaactggcgcgcctggtcgacgccggcgcactcatccggatgtcccgcggcgtctacgcattgccaggaaaagcccgcggcgacaccgacgatggactgcggatcattgccgaacgcctgccgcacccccgtctgtgtctgttgagtgcgctgcgcctacatgggctgaccacccaggcgccgttcgagatctgggcagccattggcaacagtgaccgcgcgccccgcatcgactggccgccgctccgggtggtccgcatgtcgccaacgacactcaatgcaggactggaagaacgccgcgtgggcacgcgctgcatctacgtcagcaacgttgccaaaaccgtcgccgactgcttcaagtaccgcaatctcgttggcctcgatgtcgctatcgaggcgttgcgtgacgcgcttcgcagccgcgccacgaccccaaacgcactgatggagtatgcgcggatctgccgcgttgccagactgatgagaccgtacctcgatgccctggcgtga

SEQ ID NO: 504541 - DNA, 870 bp, Stenotrophomonas maltophilia
gtgacccactccctgccgctcccccagcgcgttgcttccatccggcaacggctgctcgatctcgcacgcagccgcaacgaagacttccagttcgtgctggacagattcgccgttgaacgcctgctctaccggctctcgacctcatccttccgcgaccagttcctgctgaagggcgccctgctgttcgtggcctggttcgatgcaccacaccggcccacacgggatgccgatttcctcagattcggcagtgctgagcccgaccatcttctggacatcgcacgcgcgctctgtgcaatggcaagcgacgacggcctgcgtttcgatccagccagcatcaccatcgaagctacccgcgaagacgctgcatatgaggggctgcgcctgcgcctgatcgcctatttgggccgcgcgcgctgccatgtgcagtgggatgtggggtttggcgacgcggtcaccgccccacctccggaaattgcctatccggtgatgctggatggctttccgccaccttgcctgcgcgtctacccacgcgagacggtgttcgccgaaaagctggaggccattgccgccctcggcattgccaacagcaggatgaaagacttcttcgacctgctggcactggcgcgcgaggacgccatggatcgccccggccttgcagccgccattgctgcgacctttgaccgacgcggcacccctgcaccgacgccgctgccgtacgggctgacccaggcgttcgccagggatgcccagaagcgggctcagtggcgcgcgttcctgcgcaggaatcgcctgcgtgcccctgagctttcctccgtggttgccgagattgccgattatctgcgtgccctggacggcatcgcaccgggctga

SEQ ID NO: 504542 - DNA, 414 bp, Stenotrophomonas maltophilia
atgaccacttcccactatccccacctgtttgccaccttgggcgaggccgccacgcgcctgcctgacgacctggcgcgcacgctcgaaagcaccttcgccgcactgcaggaaggcgaagagcccggcaccatcacgctgctgcactgcctgcagcacatccgccagggcgacgccgccgatggacagccgtggcctggcaaaggccgcacgccggggcagcggctggcactggcgcgcatcgaccgcgccaatgccgggctgacgtttctgttggagttgctgcacgctacagaacgcgtgcgcgtggatggtgaggtcagccagcaggtaggcgatgacgcgcgcgagggattgctgctggcgtgccgtgggctggccgaatatgtggatgcgcagctgcacgctgcattgtag

SEQ ID NO: 504543 - DNA, 936 bp, Stenotrophomonas maltophilia
atgtacgttgttcccaacgtcgcgcgcgcactgacgctggccggactgacgtcgttcggctttgccgcgcatgcggcgtgcgtgcccaatgttccaagcgtcacctacgcacagaccgtgccggtgcgcttcgtgcctgagccagatgttgtgctgcatgtggcgcacagctccgccatcaactatcagtgcgacgctgaagagtcggccaccttgcgcgcagcgctgagtggattgacctacgtgagagacattaacgatgaacctgcatacgaactgagcccggactctccgctggttgtcgtgtacttcagcaactctccagacaatggcgctgaaggtgttggcggtgcgatcgatgcattgcgtgataattcctggtcattcgaggctgctggaaactacatggaagccgagctgtacttctattcccgcggtggcccaatgcgaccgcagacacagcgccgacttggctcggtacaggtgctcggctccggctcggccgagttccatttcgagttgggctatgaattccagggcaccacctgcgcgttgatggatgccagccccgtgctcgaccccatcagcgccgatgcgctggacgccactggtagcggtggcgcgaaggactttactgtgcagatggactgcggtgttcccggccgtccggtgtcgttggaaatctacgatgccaccgatcgcagcaacatgagcgacattctggcgcccgcggccggttccagtgcgcagggtgtgggcctgcaggtgctgcacaacggtctgccgttgccgatgggacgggtgtgggcgcataccgattccaccggcgccagtgaacgcatcccgttcactgcgcgctatatccgcctggcaggtgagccgttgctggccggcgagatcattggccaggcggtgctggtggccaactattattga

SEQ ID NO: 504544 - DNA, 510 bp, Stenotrophomonas maltophilia
atgaaatcctcgtttctcgtctgcgccttggtagcctgcgctggcatgtttccttccgtcgccctggccgacaccgccaccctcaccatcagcggccgtgtgctgcctggcacctgcaccctggcggcaccgccgatcgcccttgatccgatcaaggccgatgaactggtggtgggcgacaacggattgaaggctggcgtgctcaacttcaccggttgcgtaggcgtgagcaaggcggtgctgtccttcagcggcacggcggccacaggtgatgccgagcgctggcagaacacggccagcaccgaccccgcagtgggtgtgagcgtggccttgctggcgggtgccacgggaacgacctatctgaagaacggggataccggtatcgaggtgccggtgaccggtgcaacggcgagcttcccgctgcgcgcgggctactacgcaaccgcgttgaccggcctgcaggcaggtgaagtgcgctcggaaatcaccgtcactgccgactacgagtag

SEQ ID NO: 504545 - DNA, 609 bp, Stenotrophomonas maltophilia
atgactgtaatgctttcccatgcgggcaccctacgcggttgcggggtgttgcatggcggtggcatcaatctgggggcaccggtcggcgatggcttcgcgctggtacaggcaccgggcgcgcagggggcacgcgtgggcagcagcacgggcgtgcgcgtggccggcaatggctatgcactggtgccgcacatcagcccgtaccgctggaacacgctggatctggatccggccggcctgccgatggaggttgaactgctgcagacctcgcagcgcgtggcaccgaccgccggtggcatcgtgcgcgtgccgtttgaagtacgccgcgagcgcaccctgttcatcgatgccaccgacgcgctgggccagccgttgccgtttgccgcgcaggtgcatagcgaagatggcctgccgctgggcgcagtggggcagggcggggtgatccagctgcgtggcgcgcaggatgcaggtgccttgattatcgatcccgaaggcgcggcgcgctgccgcatcgagtaccgcatgcctgacgctccggacgcctatgggctgtcgtggagcgtgggagtgtgcgttccacagcgtctggcggcggccagcgcgtcgttgtga

SEQ ID NO: 504546 - DNA, 975 bp, Stenotrophomonas maltophilia
gtgctgcagatcgaagtcagcaacgggtccagcattcattccattgccaggcgtctcagtcgcagcgcttccaccctgtcgcgggaactgggccggcaggagcacccgggatacgttgccaggctcgcagggcagcgttaccagctgcgccgaaagcgcagcgttcgcaggcgaaagctggtggagagcagcgcacttttccagagtgttcgtgacgatctggtcttctatcgctggtcgcctcagcagattgctgccaagcttcgggtcatgcatccggatgacccgagcaagcgcgtgagccacgagacgatctacgctgccatctacgcgcacccgcgcggtggtttgaagaaagagcttgtggaagcgttgcgccagcacaagccaacgcgtggtctgcgtcgcaccagtgccgccaagcgcacatgggtgcctgaggagcttcgcatcgcccacaggccggaagaagtggctgagcgtttgataccggggcattgggaaggcgacctgataaagggcgcgttcaaccgctcctgcgtgggcacgctggtggagcgcaagacgcgcttcgtcctgctgtgcaggacggatggctgcactgcagaggacgcgctggaaggctttacgcggcagatgaagaagctgcctcactttctgcttggaagtctgacctacgaccgcggcaccgagatgacctgctacaaggagctcatgcgacggctgaacatcgatctctggttcgccgacccacatgcgccgtggcaacgcggcagcaacgagaacaccaatggcctgctgcgccagttcatgcccaagggcgctgacctgtccaaggccagccaggaatatctcaacaacgttgccgacctgatgaacgcacgtccgcgacagacgcttggctggaagacgccgaatcaagcggtggaagaggaattcgcaaagttcaattcaagtgttgcgcttgcaagttga

SEQ ID NO: 504547 - DNA, 687 bp, Stenotrophomonas maltophilia
atgaccagcatggtggcgcgccagaccggcatggaattgcatcagagcgatcagggcggctgcagcttcgtgaacctgctgcgggccagcccggccgcctgccagggctttatcgagcaggcgctttcgcagatcgagcgcgaggcgcgcccgggtgacatcgtgctgctggcggcattgcgcacgcccgaactgcggggcatcgattggtcgcagcaggacgatgagacggtctaccgcaccttgctgacccagcagacgccggccgacgcccaggccgcacgcgaggaagccgagcgcgtgctgcagcggctgcaggtgctgggcgtgcaggtggtgatcgacgcaccgatgccgctgttcaaggccggcgcctatcggtgctcggactggttcaaccgcatgaacccggcgtgtgccggtggattgcagatgcgccgcgccgacctggagaggctgcgtgcaccgcagatggcattgctggtcgatcttgccgcgcgctacccgtcgctggccgtgtgggacccgctgccgctgctgtgcgggcccgaggtttgcctggcagtggaagatggccagccgctgttcttcgacaacgaccatttgagcggacacggcaaccgcgtgttgctgccgcacttccgtcagctgctgatcgacaccgtagagtcgagcttgctcgactga

SEQ ID NO: 504548 - DNA, 381 bp, Stenotrophomonas maltophilia
atggcccggcatctgcccatgccgatgccgggcgtgctggccaccgtggtcggcacgctgctgctgttggcaggcgtttcccgacaggcagatggtggtatcgcccgggttctgggctggtcgccgctggtgtatctgggccgcctgtcgtactcgctgtatctgtggcactggccgctgctggtgctgctgcgttggacttatgggctgcagggcgcggcattgtggctgtacccagtgctgctgctggcggtgtcggctgcgtcttatcacttggtcgagcagccgctgcggaacgccgggccattgctgcgttgggcgccgatgaagacgctggcatcggcggggcttctggtggcgctgtgtggcgtggccacgtag

SEQ ID NO: 504549 - DNA, 606 bp, Stenotrophomonas maltophilia
gtgctggccgtcattgtttttcatatcgatgctgcgtggctgcccggtggcttcaccggcgtggacatgttcttcgtcatttccggcttcgggatcagtcaggcgctggcgtcgcgtggctcccagcccacggcccgtctgctgctggatttctatcgacgtcgcgcgctgcggctgttgccggtgctgctgctgatgctgctggccaccttcgtgctgtcggccctgttcattccgcgcgcatggcgcaacgagcagttcgaccagaccggctgggccgcgttggccgggctcagcaacattgtcctggccggccaggacgatgactatttctcccccggcgcagaactgaatccgttcctgcatacgtggacattgggtgtggaagagcagttctatctggtcttcccgctggtgttcatggtgtggctgcgcggccgcgggtactggtggtggacacctgcgttgttgccggtactcaccgggctgtcggtgctatgggcgggctggcaggcgcaggtggcaccgacatcggcgttctacctggttctgggaactggcggccggcgcgctgctgtaccaatggacgcggacgcgcgtggatag

SEQ ID NO: 504550 - DNA, 1131 bp, Stenotrophomonas maltophilia
atgcttaccaccgatctttccctgcgcagaaggaatgcgcggattcgacgcttcgccgttcattgcaagcaagctttcggaatgctgaagctgccttgcaacggcctacttcgagtgctgcggcaaccgcgcagttccgtgtcttgcgtcaatcctttgaagggtgggcagcgggcatcgtttgccgcgctgacagccgtggctggactggtcgcgtgtaccaccgtgcaggcctgctccaccgtgtcgagggagattcccattgatgaagacgtcacggtgaactacgtcagcgagccggatgccttcttgaccaatgtccacacaggccgtaacggcttattcaccggctgcagagcagcgacgtatgacgtgaacatccaggcgaatctgcctgggcttacctatgtccgggacgttgaattgtttggtctgtcggttcccgcgtacgagttgcacccgggatcaccgctggtgggcatcgttgcgatcattgagaacagtggctccccaactggccgactcccgctttcgatggggcccaacacaacgcagtacaccaccaggtccggctcgttcggcctcgatttcaggctgtacactaggcttttcgctaggggcggaccaaccagtggcgctccctatggaaatctgggcacgatagagattaccttgcagcaggcacctgggctgtcggtaaccgttccggtcagtctgggcatacagatgcgttcgccgacgtgtacgatcggtgacaactcggtggtacttgacaatgtttccgctgatgcgctgcctgcggtagggcgcccgatcggcgagaagaccttcaacatgcagatgaattgtctgacggcaggtgccaatgtcacgttgcagattgtggacgcgctcgattccggtaacgtgggcagccggttgacaccgacgtcggactccgatgcgcggggggtggacctggagctgttgcggggtggtaatgcggtgaggtttggcgagacctgggatcatggtccgtcacgggtgggtatgcagaacattcccttcagcgcgcgttacgtgcgcaatgcagaagcattggagcctggtgagatcaaggggcaggcaacgctgagcctggactacaactga

SEQ ID NO: 504551 - DNA, 255 bp, Stenotrophomonas maltophilia
atggaggccggtgcggggctgcgggtttccacctggcatgagggccagcgcagcctgctgcaaccctatgcggccgtgtactggctgagcggcgacatgcacgattctcggaagagcgatcggcgtgaactgcaggcgggtgtcgatctgcagtggggcgtgcgccggggcgcctgggcgggcctgaacgcggagcacggtggtcgcggccagcgtaggatctcggcgcagatgggcctacgcatggcctggtaa

SEQ ID NO: 504552 - DNA, 423 bp, Stenotrophomonas maltophilia
atggctggcgatttggccaccgatgcagtgcagctgggtagtgctcgggccgctgtcctgttggccctgcgcgcgcatgaccgtcgcggcacactcacgctggaagacggacgcaatgcatgggtgcgtgtcgccacgctgagcaacaatgcatacgaaagcggcgcggcggtacagctgggtagcgatgtgctgcaatcgagtcatgtgcttatgggcgtgatggtgggcagcagccgcagcgatggtcacgtggtttccacggcgtctggtcgcggcgggaaggaacgcgtgcaaggaactacggtcggcgtgtacggcacttggctgcaacaggcagatggcgcggctggagcctatctcgatgccagcctgcaggcggcgcagttccgcagccatgtgtacggcgcgagcctgacataa

SEQ ID NO: 504553 - DNA, 510 bp, Stenotrophomonas maltophilia
atgaaagcttcactagttgcctgtatcgtcgcgatcactgtcggcatgctgctcgccgtggcctcggccgactccgccacgctcaccatcagcggtcgcgtgctgccgggtacctgcacactggcggcgccaccgatcacactggactcgatcaaggccgatgagctggtggttggcaacaatgggctgaaaaccagcgcgctgaacttcaccggctgcgtaggtgtaagcaaggcggtcttgtcgttcagcggcacggcggccgatggcgatgcgcagcgctggaagaataccgccagcaccgacccggcagcgggcgtcagcgtggccctgctggccggtgccagcggcaacacctacctgaagaacggcgacaccggtattgaagtgccggtcaccggcgccaccgccagctacccgctgcgtgccggctactacgccaccgcgttgactggcctgcaggccggcgaagtgcgcaccgaaatcaccgttaccgcagactacgaataa

SEQ ID NO: 504554 - DNA, 2487 bp, Stenotrophomonas maltophilia
atgcgcccggtgaaacccgttcccctggcacgtgccatcggtaccgcgctgctggcgggtctgcccgcccttgctgttgccgcctcacccgcacccgagttcagcgaaggcttcctgcttggcggcgaggccatcgacatggcgcgctatgtcaacggcaatccgctgcctgcaggcgactacgcggtggatgtacatgtgaacggccagttcctgcgtagccaggacatccgcttcgccatcgaccaggacccgcacgtggcggtgccgtgtattccagtgtcgctggttcgcctgctgccgctgaagccggaatacctggatgcgctgcccggcaatgcagcggcctgcgtcgatctggcagagcgtgtgcaaggcgcacgcgtcgccttcgacagcggcaccttggaactgtcgatcagcctgccgcaggccgcacaggccagtaccgcacgcggcttcgtggcgccggagctgcgcgacgacggcatcacggccgcgttcgtgaactacagcggcaatcattaccgaagccaggggcgtgagagttcctacctgggcctgaacgcagggttcaatgccggggcctggcggctgcgtcatcgatcttcctttacacacagtacgcgtggctcgaactacaacgtcatcagcagccacgtgcagcgcgacattccggcctggaacagccagctgctgctgggccagggcaataccggtggcgagctgttcgacagcgtggccttcaccggtgtgcgcgtggccagcgatgaccgcatgctgcccgattcgctgcgcggctatgcgccgaaggtgcagggcatcgccgaaggcgcggcacgtgtcaccatccgccagaacggcaacatcatccacgaaagcaacgtggcgcccggtccattctccatcgaggatctgtaccccaccagtttcggcggcgacctggaggtcacggtcaccgaggccgatggccgcgagcagcgcttcaacgtgaacttctctgcagtgccacaggcgctgcgcgcaggtgcttcgcgcttcgcgttcaccgtgggcgagctgcgcgacacccagcgcaccctgcagccgctgcgctttgccgaaggcacctacgcgcgtggcatcagcaacggccttaccctgctgggcggtacgcaggtcggccagcactaccaatcgctgttgtcgggcgcggccatcaacacccgtatcggcgccttcggcgtagacgtcacccattcgcgcgccaacttggcgccgggtgagcgcatgtccggcaacagcttccgggtgaactaccagcgctatgtgcaggccaccggcaccaacttcggtctggctgcctaccgctacagcacgcgcggcttcctcagtctgaacgacaccgcgcgcgtgctcggcggcggcgcggtggacgaatggggttacggctttcgtgcacgcgagcgctaccagctgaatttctcgcagaagctgggagagcgcaccacgctgcacctgagcggcggccaggtcgcctactgggacagcagccgcagccgcagcgacctgcagctgagtgtgcagaccagcacgcggcgggcgaactacgggctgtcggccctgcgctaccagcagggcgatggacgccaggacacccgctatgccttcaccctgagcgtgccgctgggccgcacccatcatgcgccgcgcatgagcacccagctcagccatgccggcagtggcgggcaggcccaagccaccctgaccggcaacctgggtgaatcgcgcgcgctcagttacacgctgtccactacccagggcagcgggcaaggcagccacagtgcctacgccgcgtggcagggcgggcgcggccacgtcgatgccggctacagccgcgtgggcgactacagcagcctgtcgctgggcgcctcgggcagcgcggtgctgcatggtggtggcatcaacctgggcgcaccggtgggcgatggcttcgcgctggtacaggcaccgggcgcgcagggcgcacgcgtgggcagcagcacgggcgtgcgcgtggccggcaatggctatgcactggtgccgcacatcagcccgtaccgctggaacacgctggatctggatccgtctggcctgccgatggaagtggaactgttgcagacctcgcagcgcgtggcgccgaccgctggtgggatcgtacgggtgccgttcgacgtgcgccgtgagcgcacgctgttcatcgacgccaccgatgcgctgggccagccgctgccattcgccgcgcaggtacacagcgaagacggcttgccgttgggtgcggtggggcagggtggggtgatccagctgcgtggcgcgcaggatgcaggtgccttgattgtcgaccccgaaggcgcggcgcgttgccgcatcgagtaccgaatgcccgatgctcccgacgcctatgggctgtcgtggagcgtgggcgagtgtgttccgcagcgtctggcggcggccagcgcttcgctatga

SEQ ID NO: 504555 - DNA, 723 bp, Stenotrophomonas maltophilia
atgaagcaccacgcatcgacgtggctgtgcgcgtcgctggcgatggccgttgcgctgcctgctaccgcggcggtcacgctgcagggtacgcgtatcgtgtacgacgccggcaagggccgcgacaccaccgtgcgcgccagcaacgtgggcgagctgccggccatgacccaggtctggattgacgatggcaacgcgcagtcgcgcccggaagatgtgcgtacgccgttccggctgacgccggccgagccgcgcctgctgcagtccaagcagggccaggcctatcgcatcacctatgcgccgcgtccatcggaggcaccgctgccgaccgaccgtgaatcggtgttctatttcaatctgctggacattccgcccaagccggccaatgcggccgacaagaacctgctgcagttcgccgtgcgcacacgggtgaagctgttccatcgccccgccggcctgcccggcagcgcgcgcgatgcggccgcacagttgcaatggcgcgctgacggtggtgcgctacaggtgagtaaccccagcgcctaccacgtgacgctgagcacgctgaaactggccgatggccgcagcgtggacgtggacatgatcgcgccgggccagagcgcgcgcttcgcgctgccggagggtgcggcgatgccggcgtcggtgacctttacctggctggatgactacggcgcgccgcgcgagcagcaggcagcggtcagccgatga

SEQ ID NO: 504556 - DNA, 969 bp, Stenotrophomonas maltophilia
atgaagcctgcacgcccgtggcactgggcgccgttgctgtgtctggtcgcgacgctcttcctgtttgaagcgggtgccgcctgggcctgcactgccgtgaccgatggctttgccagcacgatgtatccggtggtgttgaacgagcgcgaatcgttcgactactcctttggcgcggccggtgtcgagttcagtggctgcccgaacactgcgccgctggagttcgaggtggagttcgataccccgatgacgctgctgggcacggtggagtaccgcggcctgaccttcggcaagttccaggcgtctgatacttcaccattggtactgctgggcgtgtacgaggagcgcggcggcattgccaacggcgtggcgttcaccatgagtgggcaaagcctggtgctgaccgttcctgcttcgtcgcgggcgaagctgttgaccgaactgtcggtctccgggcgtcgcaacgtacagagcgaagcgatctcgcgtacctcgcaactgcgcatccgcccgcgcagcaatccttcattggtgggcacaggcacgcttgaactcgggttcgatgtctcggtgatacgcgactgcgcggtgcaaggcgccacgctgacactggacgatgtacccgccaatgcactggcaggtgccggaagttcggcgggcgacaaggacttcgtggtgaacatggcctgcagccacgacaacgtgccggtggagctgaccctgaccgacgcgcatgtgcccggcggcagcggcagcatgcttgccgccgcacctggcagcgatgccgcaggcgtgcagatcgaactgctgcgcaatggcctgccggtgcagctgggcacgccctggtcgtacggcatggcgcagaccggaagcaacccgattccgctcagcgcgcgctatgcccgcaacgccgacgcgctggtggccggcgcgattgtcggcgaagccgtactgatggccgattacccctga

SEQ ID NO: 504557 - DNA, 372 bp, Stenotrophomonas maltophilia
atgcacaagatgatggttccgctgaagcgctatacccagttcactgggcgcgccagccgcagcgagtactggtggttccagctgttcatgatgatgtttacggttccgttgaacgtactgggcctcattgccggccacatcaactccacatcgctggcgttggtttcatccgggctgacagtggcggtatggctggcactggcactgccactgatcgcggtgaccattcgccggctgcacgacaccgatcgttcgggctggtggctgctgctgatgttggtgccgtttgccggcttggccgtgctggtgttcatgctgctgcccagcacgccggttgacaatcggtttggcaaacccgttccgcacgtataa

SEQ ID NO: 504558 - DNA, 825 bp, Stenotrophomonas maltophilia
atgctgaaaccgatcatcaccggattgctcggcacgtcgctgtcggcgaccgccgcgcccacgggcgcactctcgctggaagagacctttgacgcgtacgtacgcgtagtcacccaggatgacgagcgagcccgaaccgcactgagggagagcctgcagacagccagtaaacatgcgttccccggaatcggggataccgtagacgcgctccatatccatcaaggccctgcgctgggaagcaatgaccccattgccatggctgtcaaagccaggtggcactccatccattgcaaagaggtcgagcgcgccgatagcggctctcccgatcgtgtgacgatccgctaccactgcggggttccagacgtctccagcttcttcgcgacctatcgcgagcatcgcgaacaattcgtggccgtggatgcagtcgcgtccatccaacccgcgaaaatggcatttgcccaagtgctgacccaagctcccaacagcacgttcgacaccacggccgagttcttccgtgctggcgaaggcggtccctgggccagtaccgacatgatgttcctcgggctggcgctgcttcagaagatgctgccgttccgggaatggaatgagcgcatcgaggcagagtccatcactgcccgtacgggcattcctgcgtgtgacctgctgcttgacgcacgactgaaagccgcacggattcacgactccgtcgatccctcatcagacgacgcgacctttcagaatgtcctggaagagacggtcagcgggatgggacccgacgaggctcgcgcgcactgccgtgcactccaggaacgccaccgaccatga

SEQ ID NO: 504559 - DNA, 909 bp, Stenotrophomonas maltophilia
atgaaaatgatgcgactgctcgtactgacctgcgcgccactctctgccctggcctcgcccgatgcatccacgcagcgtgcggatgcgctgccgtcgggcgagatcaccgcaggtattgacgccaatttccagctttatctttcgcttctgctcgctgccgacccggttgcccgccgcaccctcgacgcgcagtggaagggtacgttccagcccccaggctatctcgatcggctgcaggaagtgcgagcgcgcattggcgatgacgaggccgccgaacgcttcctggtgcctgctggctttgaatcacccggcatcggcgctgcatcgctggacaggctgggccgcgtgacctgtaccgcactatccacccgcgccggccccaccgccaatacagcgacgttgtcctatcgctgctctgtccccgacctgactccactgtacgccaggtaccgggaggcaacaaaggcaggttccagggctgcggctcccgccgagatggccgacatcttccgtcgccaggtcaggatactgaggggatcaggatcgcgcagcatttccggggatctggagttcttccgacatggccagggcgcatggctcagccgcagtgccaacagcctggaagcgaagctgctcgacgccttcattccctaccacggctgggaccggcgcatgctggaggaggaagcgcccaggctcacaggatcggttgcatgtgactggccgctgcatcggctccgcaactgcgtgagccagcaggcaccgcatcgcatcggtcatttcaatgcgctccaggccgaaatactggatgcggcgaaaggcatggatgagcaccagctattgacctactgcaacaaccaggtatcgccccatcttcatttcgaatacagcggcctgacatgcccatga

SEQ ID NO: 504560 - DNA, 432 bp, Stenotrophomonas maltophilia
atggatgagcagcagcacaaacgatggatggggatagcaggcctgctggtgggcctgcccactgcggcggcaggaggcaccgtggcggtgctgggcctgatagccgtcatggacggcaagtatctgtccggcaacgagcccgcggtgatcgcgctgtggtcgttggccgggcttctcggtctgttgtcatggatgtggctgaccgggctcttcctgtggcgcggccgcgatggcctgcgccaatccccgcttgtcgcatggattgggctgctgctggggaccttcgccgcgctgggcgtggtcgccgccacgctgtatttcaccttcaagcatggtgagataacgacgctggccttctttgggcttggcccgccgttgctggtgatggcggggcacctggcgtggctgcgctggggacggtctgccccctga

SEQ ID NO: 504561 - DNA, 279 bp, Stenotrophomonas maltophilia
atgattgcgctgtgggccctgctctcgttgcttgccctgtctttcatttacaggctgatcaatgcgtggcatgagcgcggcaccgccgggctacgggaaaactcggagccgctgagtgcgatggggttgatatgcgccatgcaggccgggtgtgccatgtacatagtggttggaccgtttggcatgctgtttctgcctgtgtccatagccttgggcgccccgtggttgacccttgtctgccacctccgatggctgacaaagaaggaggtggtggagtaa

SEQ ID NO: 504562 - DNA, 2364 bp, Stenotrophomonas maltophilia
atgacccttccgtcctctctgcgttggctgctgctgcccctgctggccctgcccgtggcgtcaggcaacagcgcgcctgccccggcatcggccactcctcccaccacggcgcctgccgcgccaccgatgccgagcgtgccggccgcacccgccaccacgcctgccgccggtaccgagcccgcgctggcgcagacctgggcgggcagcgcctggccctggcagcggcagaacaccttcgcgcagctggggcgtcgccaggacacgctgctgtcgggggtgcgcaatgccaccaccttcgagttccaggtgcgccgtgaccgcctggtccgcgatgcggaactggatctgagcttcacgccttcaccatcgctgctcccgaccctgtcgcacctgcgggtctacctcaacgacgcgatgatgggcgtggtgccgatcagcaacgaccagctcggccgcccggtgcaggccaagctgccgctggacgcacgcctgatcgccgatttcaaccaggtccgcctggagttcgtcggtcactacaccgacatctgcgaagagccgacgcacagctcgctgtgggtcaacctgtccagcaacagcacgctgcgcctgggtggccagccactggcgatgcaggacgacctggccaacttcccgctgccgttcttcgacccgcgcgataccgcacgcctggaactgccggtggtgttcgccgccgcaccgagcctggcgcagcagcgcgcggcggcggtgatgtcctcgtacttcggcagcctgtccggctggtggcgccaggcgcgtttcccggtcagcttcggtgcgctgccggacaagggccacgcggtggtgctggcggtcaacggcaggttcccgccggtgatcgccaaccatgccccagtgaagggcccgatgatcgaactgatgtcgctgccggaggatccgcagcgcaagctgctgctggtgctgggccgcaacgatgaggatctgcagaaggcggtggccgcgatggcggccggcaacgtgctgttccgcggccgtcaggtcagcgtcgacgagatcaagccgctggccccgcgcaagccgtacgacgcaccgaactgggtgcgtaccgaccgcgccgtgcgcctggccgaactactcgactatccgcagcagctgcacgccaacggcgtgtcgccgcagccgatcacggtcaacctcaacctgccgccggacctgttcatctggcgcaaccagggcattccgctgaacctgcgctaccgctacacgccgccgttcggcagcgatgagtcgcggctgggcgttgcaatcaacgaccagttcatctccagcttcccgctggtgcgccgcaacggcaagcagggcctggaggaaatccgcctgccggtgctggccggcgatgccggtgccgatgacgggcgcctgttgattccggcgctcaagctgggcgaccgcaaccagctgcgctttgatttcaacttcgccagcgtgatgggaagtgcacagcgcgatcattgccagaccgtgctgccgcccaacctgcaggcagccatcgaggaagactcgaccatcgacttctccgggttccatcactacatgggcctgccggacctgtccgcgttcgcactcagcggtttccccttcacccgcatggccgatctgtccgagacggtcgtgctggtgccgcccggcgccagcgaagcacaggtcagcctgctgttgaacctgatcggtgggctgggcgtgcagagcggctacccggcctatggcctgcgcctgtccgatgactggaagcaggccagcgcgctggatgcggacctgctgatgctgggcgccctgcctgccgaattgcgcggcagccagcagctgtcgctgctgatcgacgaccagcgcgcacgtctgctcaacggccagtcgccgtcgccgcagcaggcgatggaacaggcgcgccgtggcagccgcgatggcgacccggcggtgaccgaagtggcagtgagcgcgcaggcgccgttcgccgcgatcatcggcatgcagtcgccgaggcatgcgcagcgcagcatcgtttcgctggccgccagcaacgccgccgactacggcctgctcgacgatgcactcagcgataccggcaagcgcgaagccatcgccggttcggtggcgatcctgcgtacctcgggcatccacagccagttcgtcggcgatcactactacgtcggcgcgctgccgtggtggctgctgctgtggtaccacctggccgaccacccggcactgctggcggtgctggccacgctggtggtgctgatggtcgccttcctgttgtggcgcacgctgcgctgggttgcggccaagcgcctggacccggggcactga

SEQ ID NO: 504563 - DNA, 2625 bp, Stenotrophomonas maltophilia
atgggtgcccgcgtctattacctggactggggacgcctgcgtgagcgggtgcatgcgtcctggccgacgcgggcaatgctgtggctgctgcaatgcgtgggctgggcgttcctgcgcctggaagggccggcgtggcaggcacaggccccgcgcctgcgcaacgccttcccgcagatccagggcgaccgtcgctggcgcccgggcgatccgttgcggttactgatccaggccatgtggctgtcggtggtgcggttggtaccgcagccttcgctgaggcggcagcggttggcccaggcccggcgcgaacgcattgccgaactgcgtggcgcggccggtcgcggccgcctgcgctatctgcgcgccatgcgcgatgcgcccagtgaattctggaacagccgcgtggcggcctggttcggccggaaggtgggcagcctgtcgccacgttcgcggcacctgctgaccctgctggtcgggttggccacgctggggctggcggcgctgtgcatcacccagccgttcacctatctcgcacagttcgtgttcgttgcactgctgtgggccatcgcgctgctggtgcggcgcatgcaggggcgctatgcgacgctggtgctggtggtgctgtcgatcaccgtgtcctgccgttacctgtggtggcgctacaccgccacgctgaactggaacagcaccttcgacctggtctgtggcgtggtgctgctggcggcggaaacctattcgtggctggtgctgatgctgggctacgtgcaggtggcctggccgctgcgtcgccgtccggcgccgttgccggccgatatccgccagtggccgacggtggatgtgctgattcccacctacaacgaagacctggcgctggtgaggcacaccgtgtacgcagcaatgggcctggactggccggccgacaagctgcgcatccatatcctcgatgatggcaagcgcgaagaattccgcgcattcgccgagcgtgccggggtcaactacatcacccgcgccgacaaccgccatgccaaggccggcaatctcaaccatgcgttgaccctgatcgatggtgagctggtggccatcttcgacagcgatcacctgccggtgcgttcgttcctgcagatcacctgcggttggttcctgcgcgacccgaaactggcgctggtgcagaccccgcaccacttcttctcggccgatccgttcgaacgcaacctgcaggtgttccgcagcgaccccaacgaaggcgagctgttctacggtctggtgcaggacggcaacgacctatggaacgcggcgttcttctgcggctcctgcgcggtactgcggcgcgaggccatcgatgccatcggcgggtttgccaccgagaccgtcaccgaagatgcgcacaccgcgctgcgcctgcatcgcaacggctggaactcggcctacctgcgcattccgcaggcggccggcctggccaccgacagcctcggcgcgcacgtcaaccagcgcatccgctgggcacgcggcatggtgcagatcttccgcatcgacaacccgctgctgggcaagggcctgagcttgttccagcgcttctgctacgccaacgcgatgctgcatttcctggccggcattccgcgcctggtgttcctcaccgcgccgctggcgttcctgctgctgcacgtctacatcatctacgcaccggcactggccatcctgctgttcgtggtgccgcacatggcccacgccagccttaccaacgcgcgaatccagggcaagtaccggcgaccgttctggggtgaggtgtacgagaccgtgctggcctggtacatcgcacggcccaccaccgtggcgctgttcagcccgggccgtggcaagttcaacgtcaccgacaagggcggtacccaggccggtgatcgtttcgactggcgcgtagcgcagccctacctggtgctggcgctgctgaacgtgctgggcctgtgctttgccgtgtggcgcttcatgcatgggccgctcgacgaacgcggcacggtggtcgtcagttcgctgtgggtgctgtacaacctgctgatcatcggtggggcgctggcggtggccgctgaagtgcagcaggtgcggcgcacgcatcgcgtcaccacccacctgccgatggcgctgcaggtacccgatggccgccgcctgcgcggcgtgcttcaggattactccaacgatggcgtgggcgtcgagctcggcgaagacgcacaactggccgaaggccagcgcgtgcaggtgctgctggggcgcggccgccgcgagttcgcgttcccggcgcgcgtgcagcgcacggtcggccagcgactgggcctgctgctgctgttcgagaacgaacgccagcgcgtcgagttcgcccagtgcaccttcgcccgcgccgatgcctggctcgactggcacgccggttaccaacccaagagcctgccgcgcagcctgtggagcgtgctggtcctgggctggcgtggctatcggcggatgggtgatttcgcaccgttcgaccttgaccgcccggcacactggaaccgtcgcctgctgcgatggctggccagttttgctccgcaacgtccgcttccttcccacccggctgacccagccgctgatccagggcttcgtccatga

SEQ ID NO: 504564 - DNA, 312 bp, Stenotrophomonas maltophilia
atgaggccgtacaacatcgtccttttggcggtcgagtccttttactcggtcgaaaccggtgattggcccggaatgattgaattgttcgaagagcggctcgaacaggtacaggtgtacagggaaggcgtacggcgggagctctacgagagcttgagcgattccgaattctcctggaaatcggcactctggaatgacgattgccatgtggaagagtttgatggggaggaagatgcacgttctttcatcaggaatgctgtactgcgtctggtcgagcgcgccttcacaaagatgcaggcttcgccgagtatctga

SEQ ID NO: 504565 - DNA, 486 bp, Stenotrophomonas maltophilia
atggggatcaatggaatcatcatgaagatgctgcgaatgctgcgcgctccgtactcgtacgcctatctcgttgccgccaacctggagatattttctgatctcgacggaggttggcgacgcattggcgcctccatcattgttgcactctatatggtcctccaggcgcttttcgtgatcacgctggcgagatacttggggggtgacctctttgagggcaggaccaatccgccattctgggcgatgctgatcgcagcgtttgtgctggcatggctcgtctcaggagcggccattaagaatggcgaatctctgatagctggacatgacggcaagtggaaaaccatctttgcgatctacctgataccaggggcgggcttcggatggatgcttctttggaagctatacgtgccatttgcgttcgtgcacgctgccattacctgtcttctgtacttttcgtatgatcgatatgttgaatggcgaccggaatga

SEQ ID NO: 504566 - DNA, 429 bp, Stenotrophomonas maltophilia
gtgatgctgctgggggcgctgagtgccggtgttgttgcccaggagcgatacgagaacctcgtttacagatgtgtaaacaaggccgggacgcagtatcagagtcagccttgcgccacgggcgaaactgaccacattcgcctagccgaaccgccgccatcaccccaagcggcggcggcaaatgaacgctacttggaaagccttcggcagcagaacgcggcttccgtttcgcgtcggccgcagccagcccggcaaattagcagcagttccggcggcggagctcgcctacaccacatttcgcaatacaaagacccgaacgcctgcgaggccgccaaggcagagcgtgcgcgcgtctacgaggccgtgggcctgcatcgctcgtttgaactcagccgtcgcatggacgacaaggtgtgggctgcctgcaagtga

SEQ ID NO: 504567 - DNA, 615 bp, Stenotrophomonas maltophilia
atgaccagtagcgcacgcgaactgctgaagtggctggctgtgatcctgatgactggggatcacctggccaaggtgatctatggtggctatgtacctggactcagcgaagcggggcgggtggcctttccgctgttcgccctggtaatggccttcaacctggcccagcctggtgccgacgcggtcaagtccgttcgccggctctccatgtggggtgtcattgcccaaccggtgcatgcactggccttcggatactggttgccgctcaacatcctgttgacgttcgcgctgtgtgcagcggcggtccacgcggccagcgaacgccgatgggttgtcctggcattcgccgcgacggtgctgccggcattcgtggactaccagtggtctggtgtcgccttcgtgctgctgacttggttcgggttccgtaccggccggccgctggtggtgctggccgggttcgttccgttgtgcctcttcaacggcaacgtgtgggccttggcggcgcttccagtggtcgtgatcttgtccggtgtgcgctgggagctgccacggggccggtgggccttctacggctactacgtgggccatctggcgattcttgtggcgctcgccatctga

SEQ ID NO: 504568 - DNA, 1206 bp, Stenotrophomonas maltophilia
atgatctactggtacacgggccagcctggacacggcaaaacgctgcatgcgatcgatcacgctatcgacttcctcaacgagggtcggttggtctacgtctgcaacgtgcgtggcttcaagcacgacgaagcgcgcatgttgcccatgacgccggaagagttctgcgactggccgaacttcctgcctgacggcgcggtctgcgtggtcgacgaagcctacgagcatgggatgctgcccaagcggcggcccggctctgcggtgccgcatcacgtcgaacagctggcaaagcatcgccatcgtggcctcgacttcatcttcgtcagccaatcgccggaccggcagtgcgacgatttcgtgcaggacctcattgagcgtcacgtgcatgtgcggcgccggttcggcctgccgttcgcgcatctgcgcacgttcgaccgttacgaaaagaaccctgaaaagggccatccgctgatcttgaagcgggtgaagctgccaaagcggccgatggggctctatgagtccaccgtgatggacaccagcgagaagaacatcccgtggtactacccagcagcgttcctgttgctggcggtggtgatctacggcgcatggtggtccgtgaatcgcgtgaattcccagcttagaggggagttgaacactgcccagccccaggcatcggcgcagcaagcggcggagaacggagcgggagcgacggtcgcagccgcgccgcaagccgaaccaccctcggcgacgcgtgccagcgactacgtggcttggatgacgccgcgagtcgacggacagccgtggacggcacctgcttacgactcgcttacggtccccaccaaccagccgccacgggtctactgcatggcctcaggcgatgggctggatgcgatgggcgaacatcagatcgggcgatgcagctgcaaaacagagcagggcacgacctacgtgatggaccagcagcagtgccggctcgttgcgcgcgagggccagtacgaacccttccttgacaccaatcaggctgaggcgcggcgcatgaacgattaccagcagtccgcccactatcaggaggaatcccgccgcatccgcagtgaggcgggcggggcggtgatgcagcacgtggagcgggcatcaggcacgttccccgaatccaaggcgcatgaaaccagcaccttcctcacaacctccacggcgccgaacctgctatga

SEQ ID NO: 504569 - DNA, 324 bp, Stenotrophomonas maltophilia
atgagcatgatttgggaatggatcacgcgcggcgtgaacctcgtttggacggtcctgtttggcggcatcggccgcatcgtgaccaagactctttccacggcgggaatcacgctcgtttcggtgaaccagctgctgccagtcttgaaaaccacgattgccaattacgtcggctcgctgcccgacaccgcccacaatttcctcggcgcggtcggctttgatgtgttcatgaccatgatcctgtcggcgctgtctgtgcggttcgccttcaagatcatccccatgagtaccgctagggctcagcagttgggagtgaccaaggaatga

SEQ ID NO: 504570 - DNA, 1209 bp, Stenotrophomonas maltophilia
atgtccgatggtgtgtgtcgcgttggcttacctgccaccaatggcccaggacttcttgcctactgggactacgattgcaacctgacctgcaagacgcgcgttgatggtcaagctggaatgatcaacggcacgatgtactcgggtggcgtctgcgacaacggctgcaagatgcagcctaaccttgatcccggtactgatttctcacttcgcgagaatggcaatccaaatgccatttctattcgctcagggacgtggcgcgcctcaggcagtacttgcatacctgacagcactcggccgaagcctgagaacaaggatgagtactgccatcagaccggcagctacacggtctgcaagtcgaaagaaaagacctgcatcagcactgcatcgggcttccgcacctgtgccagcgacacgtcgaacaagtccgggcacacggctaccaataatccgcgcaccgaggccgcgagcatcagcgcgcctaacacagcggtgaatccgcctgccaatcgacctggagaagactggaagcccactggccagggcgggagcatcacgaacaacaacggcaacacgaccaacaatttcaacggctacaagaatgagggaacacccaacgggaacacgccaacacctggcgatggctccggccccggtgccggtggtagcaatggcaacggcgagaagggcgagggcaatggcaacaccgccaccggcggcggaacgtgcacctctccgcctgcgaccggtggggatccgatccttggcatgatcgccatgcagacctgggcaacccggtgcgctgcagagaagagcaacggcggcaaggtgaccggcgacgtgggcaactgcgacgcgcctttcagtgttgagggtgacaccgtgcaggccaaccagcttcgcgcccagcgtgcacagctttgcgcaggtcgtccgggcgaggggcagggtagcggcggcaatccgcacgccggagcggaagacgtggacgggccgggcaagtggtcatggaagttcgatgcggacctgatcgataccagcggcttcggcggtgggtcttgccccacgttcggcacgctcgactttggcaagttcgggtccgtgtcgctggataacaccacgtggtggtgtcagctggtgtcggcgattcacaccgtgatgttgctgatgggcatgtttatttcgttccgcatcgtcttcggagacgcctga

SEQ ID NO: 504571 - DNA, 303 bp, Stenotrophomonas maltophilia
atgagcattaaggtcaccgtcctgaagaacgaaattgacgaacgtggcggcagcttcaagaacgacgccggcgagaacgtcgagtacaccacccgcaagcagaagggcaagctggaaacgggcggcttcgcctatccgttcgacgtgcgcctggacaagggccagcctggttaccccgagggcgaatacgagctggacgtggaatcgatgatccaggtcaacaagggtgtggcaaccctgagcaagttcactgtgctgcggccggtggcaaagcagccggcgcgacctggcgcgggcgtctga

SEQ ID NO: 504572 - DNA, 276 bp, Stenotrophomonas maltophilia
atggatgcactcgtttccgccgcgctgctgggttccatcgcagccgtctcgttcgggctggtcaaactggcttcgtggtgcatcggtcgggcaggggagtcgtcccgccgtgctgcacgcgaagccgccttcgtagcccaagcacgcgccgacctggccgcaaccggctggaccccggatcacgaaaccctctatcaggccgaaatcgcagccaccaagcgcggcgacctgcgcgccgccgcccgctatgccgagcagcaggaggccatgccgtga

SEQ ID NO: 504573 - DNA, 642 bp, Stenotrophomonas maltophilia
atgtatagttggcctatccacccctgtcaaggccagctacacatggaacttgaaaataaattgctcgataccgtgcgcgagaagtgcggaatcccgtccgacaacgctttgagcaagaagctcggcgtgacgcgagctctggtaagtgggtggcgattggaccgctacgcgatccctgacgagcgaattgcggaaatgtgcgcaatggcggagctcgacgggccatggtggattgccgagatccacgcagcgaaggctcagtcacgcgttgagcggaagctgtggagagcgatggcggacaggctaagcgcggcggctgcggtcgtcgcgctggtagcgctgtcaatgccaggtctcgctaacgcaaaaaccgcccaaattcaggcggttagcggcgccgagagcggcagtatgtatattatgttccaagcacgacgagggactgccatgcttcctgcctcagcctcgacacctgctcagtcttggcgtttgattgtgggtcaccgcaacctggccgggccgtgggcctgtgtgatcatcggtgttgatacctggtccgacgccgagtcgcttgcagccgacacgaaccaaccttcagtagccccccgggacctgcaggaaaggtctcaccaatgcgcttga

SEQ ID NO: 504574 - DNA, 441 bp, Stenotrophomonas maltophilia
atggcgcggcaagccgggtcgcgcggcctcacctgcgcactgggcgactacgaactggcattgtttgttgaaaagctgggggacggaaccagcttcggccattgcggcggtagcgatggcttccggactcagctgtatggcgacacgcatacagggcagggtgcggtagtgatgaccaacagcgacaatgacgccgcactgatcgacgagcttttgatcagcattgccgctgaatgtggctggccggagttcaacgtcatcgagaagaccgccgtcacgccgaatcccaggttcaacgcggcggatgcaggtgagtatcagctgcgtgacaagcctgcacatgtcatcaccgaggttgaccggccctgtttccagagcgatcggtttggcgcggagcgaatggagctgttcgcacagtcggatgcagccgggcctgtatga

SEQ ID NO: 504575 - DNA, 459 bp, Stenotrophomonas maltophilia
atgcgcatggcatcctggcgtttctcaatcagacgggcagctttcacgcttgcgatgatcgctgccggcatttcaaccaacccatcggcagtggcccgggagacccggtcggtcgtgctggtcaggctttcgcccgcggccagcgcagtcctcgccacaggcctgcttagaggcaggctgaagcccatcaacggctgtgtttacttcgttgatcagaatggcacggcctacctcgcggcgtggccttatggctactcgctggcgctggatggagggacgccgatcggcattcagggcgcgggatcaggacaggtcctgaaattcggggttgcagcctctttcgggggtggccacgcggctgaactgccccgatcgagccttgccaccaacatcccggccggttgcagcggcccgatgatgaccatgcacttgattcgccaggcaaaggagtcgccatga

SEQ ID NO: 504576 - DNA, 1509 bp, Stenotrophomonas maltophilia
atgatcaacctgattccgaacaactgcatccgcctgctgacatggctggcgctcagttcaattgcattcggttcacatgcgcgtgcgggagttgagaacccctccgcttatacgtactcgcgcattttcggcgtgtctgaggccgaggccaggtatcgatcgttgaagtcggtcgctgcagcgcccttggaggcgaggatccaagcagcggaacccgcaacctttggcggcctgtatgtagaacaccaaccagacttcagaatcgtcgtcattttcaccaggaagcctgccgagacgttggcgaagtacactcaggatcctgtctttgtcgctggcacgtccccccaatcccttgagatgctgctggctacccaggccgagggcggcgcccagctccaggcaagaggtgtcgagttcgagtcggggcttgatgtcaaacggtctttggtgaccttctatgtgaaggacgaggtcgccgccaggcgtacgctacggccgctgctcggtgcagtcgattttgtgaagatcaaggtggtcaaagggttcactgtcaccacagcgatccagggcggcaacagaattgccggggctaccattgcgtgcaccaccggtttcaacgtcttcgacgcagagcgtgagcttggcattctcaccgcaggccattgtgacaatgccgccagctatcagggtgtcgcagcgcctatggtattccaggcggagcaggacgctggcgactacgatgtccagtggcacaaggaatcagccaccgggccacgccagccacaggcaaatgaaatcaccctgatcaacggaccgtcgccgaccctcgagatcaccagcgtactcccctcgacggcaatgcatctgggcgatgttgtctgcaagagcggaatcagcggacattacgcgtgcggcaccatccaggacatgaactcaatgtccaactacaatggagtaatcgggcgctacattcgtgcgcgcaacctttccgcaggcccgctgagcgtcgaaggcgacagcggaggaccagtcttctccaatcacgcagccgttggcatcattcatggccgcgggggggaagggaccgggttcgagaacgacttgtactacatgcccatcgagcgggtttcggtactgggcgtttccgtgctgacagaggcgtttgaagttaccggcatcgctgatcgtacagaaaactatttcaggccattctccgttccggtgacatacaagggagtgccgaagttcccgatcgagctgacgctcgagcgtcccgtatgccccagcggcccctgcgaacctgcgacggagacgctgtccgagaagacgccctctcctctcaactacacctgggtctgcttctatccaatcgtgctgtacccgccaccggtcatcccacctccgcccctgacctggagggaacgggtgaccttgaaggatgcctctggaattgcggccgagccggtggagtacaacctgcactgcagcggatgccctgattgcccatag

SEQ ID NO: 504577 - DNA, 1044 bp, Stenotrophomonas maltophilia
atgacacgcatcgacttcgtcggtcgcgggctgctgttgtccgcgatcctgttactggccgcctgcagcacaggcagcatcaaacccacgccaccaccactggtgggcgctcccgtcgtcaacgtggtggatcctggcaatctggtcgtgcatacgctgccgatcggtgctggaaactgccagatcgctcaatgcccttcgggtaaccgcttggtggtgatggactgcggctccaagggcgccggcacccaggactgggacgcgggcaaggtaaagggctacgtcgaaacgctgatcgatgacaagagcgagatcacggtcagtatcagccatcccgacgaggaccactacaactacatcgccccggtgtttgccaacatgaaggtgacgtcgttgtatctgggcggtgactggagccagtacaacagcaccttccaagactgggtcaagacgcagaggatcaaaagtgcggcgcaggtcaacatgtacacggggttctacgcatccgccacgcccgagccggggttgagctgttggaagcccgagcacgggggtagcagcatgcaggtggccagctacatcctgggcgtcaacgcgggcaccaccaagaacgatggaagcatggtggtggcgatgcgctatggagacttcaccacgaccttcaccggtgacatgacccaggcgaccgagaacaagctgcagctgccgaacggtctcaagagtttcaaggccaacctgctgaccggagcacatcacggcgcgtccagccagggcagcaattcggtggagtgggccaaggcgaccagccccgatttcgtgatcttcagcgccgggctccgctacagccacccgcgctgcgacgccgtggatcgttacaccaccgtgggcgctgcactgcctgagcacgagtacttctgcgggaacagcggtacgggcgagaaccggaagaccacggacaacatcctggtgaccgactccaacggactgatcgtcatcgaagccgatacccacggcgcgatgaaggtgctgccggtgaagttctga

SEQ ID NO: 504578 - DNA, 1563 bp, Stenotrophomonas maltophilia
gtgtcgcgacgcacagctgacagggaagccacgttgtccgcgccgatcgaggcgctggcggcacaggccacggcaacgctcggattgacggtgctctggcatccgcgtcggcgtcgcattggtgagcaggcagccttgctccttgagcgtggcgcggccgaattgaaccggaatgcgcccgcgttcttcgccgccgccagtgacgtcggcgaggcgcttgaacatcagggcgtttcgaggcaatccctgtgctttcgtgcaggcgacgacggcagtgtgctgctgagcgccccggcatcgacgatgcgcgtcgagatcgacggtgtgccgatcagcgaagacatgcgcgggacgcccattgcattcgacacgacgcggcttcgccgtggggtggtacttcgattgggtggcagtgtcctgctgtgcctgggctatatcggtatcggcagcgccgggcagggcggcagtgcactggtcggggtgagcccggcgatgacgcgggtacgtgcagcgatcgcccaggtcgcggcaaccgacatgccgaccctgatcctgggggagaccggcaccggcaaggagctcgtggcgcaggccatccatgccgccagtgcgcgttcgcaccggatgctggtgagcgtgaacatggccgccttgaacgagtcgctggcggcggcggatctgttcggcgcgaacaaaggggcctacaccggagcacaggtggcgcgcgaaggctatttcgccgaagccaacggcggaacgttgttcctcgatgagattggcgacacgcctgcggcggtgcagccgatgctgctgcgggcgctggaaaccggcgaataccgaccgcttggaagtgcacgcaacgagcgcgccgacgtgcgcctgatagcggccaccgatcgggatctatccacgccaggcttcaaccagccgttgctacgtcgccttgaagccttcgtgattgcaatgccgccactgcgcgagcgtcgccaggacatcggtgttctgatcgtgcagctgctgcaacgttggcagggcagcgacgctgcaccggtggagctgcctggctcggtggtgcaggcgttgtgcctgtatgactggcccggcaacgtccgccagctggcacatgtgctgcggcgactgagcctggcggcacaggtacaggaatggccggacatgcaggcattgctgccggctcccgtgcccgcgcccgtctccctgtctgcgcctgcgatggacgcaggccaggtggccgctgtggcgccggcagtgcgctatcgctcaccgtcgcgggtcggcgaggacgatgtgattgctgcactggaagcacaccagtggtgtgtgcgcaaggcggccgagcatctctgcgtctcgcgtgcttccttctacgtgctgctggacgcatcgccgagcatccgccgcgccgatgacattccgctggacgagataagccgcgcggtcgcgcaggcccctgacgatccgggccactgggcctcgcagctgcgcacgccgcgcgaatccctgcgccggcgcgtgcgccaactgggcctggccaagcgcctgtag

SEQ ID NO: 504579 - DNA, 609 bp, Stenotrophomonas maltophilia
atgtcgaccatcactctgatcaacgaaaccggcgaaaccgttcgactggccgtgttccagaagccggtgagcaacccgaccctggccacgatcgcctggcaggttgccgcaccgccgccgggtggcaactcggtcatccagatcccggatgacttcggcctgcaggtgcgttactcgaacgatgcttcccgtcccgaccagctggacacctcggccaagccggcctccttcgccgagacctccgccgcgttcaccatcgacagcgtcgcctcgcaggaccgccgctccaatggtgcggtgatcaaccagagctttaccgacctggtgctcaatgaggtgcgcgtggtcaacaacttcagcatcggcgtggaagcttccatcctgcgcggccaggacgcgatctacgagccgcaggtcatctggccgggcggcctgttcatggaagatgtacgcgcgagcatgttcgtcgccgtggtttcccagttcacctacaagggccagcgcctggtgcaggaagaaatcagccagacccagctcgaggtgctcgagggcgattcgctgatcgtcactgggtccaagtggaagggctactcgctgaccaaggcctga

SEQ ID NO: 504580 - DNA, 408 bp, Stenotrophomonas maltophilia
atgaccactgcgccttcgctgcccgcgctccgtgccgactcgctccccctgcccagcaacatctgggcgccctcgccagacgccagtatcgagatctactggagtgatcccgtggatggtgcattcgatgtcgccctgctgttgatcgaccgggccatctcctcgatggacccggtcaacctcatcgcccgcagcattctggacagcaccaccccacgattgacgttctcgcttgtggacccctattccaacaaccggatcctgtggggacggatcgagcgtcgtgtcgatgctgacggctgcatcggagtctggctggtggacaccggctatcccggcggctttaccgatctcgcaaggattgctggtcccttcgaaggaggcgcgcatggcgatgccgggcactga

SEQ ID NO: 504581 - DNA, 2811 bp, Stenotrophomonas maltophilia
atggcgatgccgggcactgacaacgcgggggttttcgagcaggggccggtgcgcatcaactggaccttcagcgccgatgcgctggcctgcgatgtggatgtgtcctggcaggggcagctgctcgcacgcaagcatctggtatccaacgatccgatactggcgttcgatgcgcgcggcgaaacctcgccgggcatgatgatcgtcgggcagctgcatttcgatgccagtcgcgccgcacttctgctcgaccagctccgctatcccggcggaagcgccccgccgcaactgctgggcgaagcagtgccgcccgccccggtgccggaatcggcgcagggcgaagtggtgcagtcgcggctcgaggaggcgggcgacttgttcccctatatccagctccgggcgtggccgggcacttcgacccggacccaggaggacaacttcatcgcttactccggcacctgcacgaccgccgacccgcgcctgtactgccagctggccgcgttgcttccagcgggagacagtgcgcgcagccagatgcttgagcaggcggtgatgttcctgcagggcgatgcgccctataccggccagtgcgtacccacgattgccgtgctggggccggacgctgttgcgctggagcgcttcgcgctggccgctgcagcgattccgctgccaagccgcgaagcgttgatcgatctgatcgtgcagctctggggtcaaccctggccggcgatcaccgaggccatggcctcgacggaattcgcgcagacgcttgatcggatctggcagaacgtgttcgccttgaactgtgtgcttggctatgaccgtcgccagcgcgacgcactcacccgcaccctccaggcggcaacactgctgggccgcctgtcgcgcgataccgcaccgggtttcgaggggcgttggccaccagaacgtctgcgtaatggcctggccgccaccctgttgttgccttctcccgtcttcccgctgcccgccgccgggcccgcccgggccgaagagccgtcgagcatcccgatccagccctatgcgatcggtgagctgcagcaggtcaagcgccgcctgttgggctacgcgctgggagaagtcagccacatcgagagcgtgatggccgatgagcgcaaggtgcgcgcccggcatgagcgcgctgacacgctgagcgagcatagcgctcggacaggcgtggccgatacccatgaggatctgcgcgacggcctcgccagcacgctggagtcggaagtccacaacgcgctgcgcgaacagttcaagctcgagtattcaaccacctacggtccgcccacccagtgccagcaggacggaagctgcacgctgatgccggtggacacccagcccacccgtgatcgcctggccgacagcgcgacgctggcgcggcggatcgtccagcgtgccgcacaacgggtcaccacccagctgggcgagcagcggctgcagcggcatcgtcacacccgccgcaatgaagtctcacagtgcttcgatcgtcgcggccgcgccaacaaccagcgtggcgtctaccgctggctcaatgcccgctaccggtgctgggtggtctccgtcggccatcggctgatgctggaataccgtgtcccgcggccgggcgagcggctggtgcacgctcgccgtgaccagtatgggcaggcgctggaacagccgctggcacctgcacagctgggcctgcgccagttcaatgacctttcgctggatccgcagagcccctgctactacgctgcgctggcggcacgctacggcgtggaggtcaccgagcttccgcccacgcccgaggcacatgcctgtacggtgttcgagagcggcacacccttgttgagccagcagctgccgctgccgccgggctatcaggcggtctcggcgagcatcgccctggccagtgccagccagggttggagcatgcgaggcagcatcggcacggccgggttcaccaccgaggggaatgcatcagccgtcctgccggacattgccttggccgggcagaccggcgcgctgcccatcagcatcgtcctggtcgcacctgccggcgcggaggagccgtccgaccctgcaccgacggcaacgccgctgcccgtctatggattgaacatcgatgtacgcctggccagcacgccggagctgctcgcggcctggaaatcacgactctacgatcggctgatcgaggcctggcggcgcgagctgctccgctatttcgatgccgccggtgcatcgccccggcgccaccccgacgggcaggcgcaacagcgcagcatccgccttgaactgcaacgggcaggagtgcgcgggctgcttggcctgtcccgccggcgcacgggtgccgatgcgcctgaccagcaggtggcgcccaccctgcagctatggctggaccaagcgctggagtggccggagctgacccataccctgatcgatgatccggaggctgcacccgcgccggatcctgatgacgccgggttgaccccgttcctgcaggccgcgcaggcacgggtactgctgccggtcgcgccgggccatgagaacgcgctgctgtacttcctcgctacaggcatgatgtggctgggtgatgacgcgctggtgcctacgttccaggcaacactggaggcagcccccgctaaccaacctgcgacgctgcgttacctggacctggcggacgatctcaaggtgatctcggccacgccggccccagcacctcagcgggaggcgtgggagctgatggtggccaccgatatcagcgtcctgcaagacggtgaagccctgcccgacttcaaggacgaggcatga

SEQ ID NO: 504582 - DNA, 585 bp, Stenotrophomonas maltophilia
atgaacaccgcccagcccatcggcagcgtctgcctctatctcggcgaccttgcacaggtttcgcaggcccccaatccggcctggtcgagcggcgacagtgccgttgccgcgtccgccgcgagccgcacagatggcccactccgcgcgttgctggaaccgctcggttggatgccctgcgatggccgcgaaatgcgcatctcccgctacccggacttgtttgccgcgctcggctgcctgtacggcggccagtacgaacgcggcatcttcaacctgcccgacctgcgcggcatgttcgtccgcggggttgacgacggcgccggcgtggatccggaccgcgaccagcgtcgttccccggacggcaacccggactattccggtgtcggctcgctgcagtgggatgccctgcaggcgcatcagcatgactacagcgaacccaccggcagtacggtctccggcgatgcagcgcaggcctgcaatctgccagccaagccccagaagaccaccgatcctgtcaccggtcgcgtgagcgtgcatgagacacgcccacgcaacatggccgtccactacatcatccgtgttgagtag

SEQ ID NO: 504583 - DNA, 561 bp, Stenotrophomonas maltophilia
atgagtgtgaacatcaccccgcccgcggccgatgccgcgatcatccgggtcagcttcgatatcgaccaggtcagctcggacctgttgtggcaggctgccgtcgcaaagacgcaccgagatctctattcgccggtcggccgctatgccggtgccgtgcatttccgtgaaggcgatacggtcagcgtggaggtcaccggctttggccgcagcggtacgctgctgtcaaccaatatcctcgatgcgatgctttacacggttccgcacacctcgggcgaacggttctcggcgccatcgccgttctcaagcgtgcgagccaccacgccgatcgagcagtggcagccggcccggatcgagcatgaccgtgaacccggcttcagtgcgtcggtgcagcactcgctgaccccgctgaccgtcgtgcaggacgacggccgctggaagctgtcattgatcctcaccgtggtgatcgaacgcctgaccaaggcgggcccgcagcaggaaatccgggtgttctcgttcgacccagaagccgaggtggggtcgggcaccgagccgccggtctaa

SEQ ID NO: 504584 - DNA, 2145 bp, Stenotrophomonas maltophilia
atggacaacgttgtggagcaaccctctacgggggcgggacagcagttcagtcactatcggatcggaggcacgctgggcgaggggggcttcggtcgggtttgcctggcctgggatgagcggctggcgcgcgaagtcgcgatcaagttctcgataggcgatgaatccggccaacgaggtctgcgctacgaggcccagcggctggccgcgcaggcgcaccgtgcttttgtaacggtctatgcattggaggagcacgccggtcagctggcgatggtgatggagcgcatccgcggcatcactctggcgcaggcgttggaccggaccggcgcgttgcccgccgagcgtgtgctgcgtctgggtgcggcggtggccgaagccttggctgtggcccatcgccatggctgggcgcatggtgacctgaagccctccaacgtgatgctcaccgaatgcggggacgtgcgcatcctggatttcggtgctgctgcggccatcgaccccgagcagaccgtcagcacggtgactgcccagagcgcggcagggacgctggcttacctggcccccgaacgcctgctgggcgcgcgcgcgggcgcatccggtgacatctatgcgcttgggctggtgctgcacgaggcgctgaagggcagccgtgatttcgaggccagcgcggcgtggggcggattacatcgacgcctgcatggtggagcggcagggcgacggctgccgcgcggtaccgacgccgcgctgaccgatctggtcgagcggatgacgcgccgtcacgcgcaggaccgtccacgctccatgtccgatgtgcacagggcgctgctgaaggcgcaggagcagcggcacgagcgaagccgaaagcgtgcggagcagcgtggggtgctgggcttgatcgtgttgttcggactgctcgctgtgttcatccaggcgcgcgacgtgcgcctggcgggggcagaggctgtggcggaggccggtgctgcgatcgacccgttggtccgcgcggaacgcctgttggctgacttcgaccaggccggcactgtagccgaagcggtggcgctgctggagcagcgactggccagcgacccgcacgatgccggtgccgcagcgctgttggccatcgggtattgcctgagctacgccggtgatgagcgcgatgaggtctggttgagtcgcgcacgcgcggcagcccagcaggccgagcgtgaggaaccgcagcgggccatcgtgcaggcggcgcgaggctgggtggaggagtatctgaacaacaaggccgacgcagaagcccactatctgcgggcgcggatgctggacccgggcgatcgccatgcgttgctgggcctggcgcgcctgtacgcgcagtcgggccgcgcaagccaggcccagcaggtgctggccgacgccatgcggcggctccctgccgaccgcggctttgtcgacacccaggggacgctgctctaccagcagggcgacctcgccggtgccgagcaggcgttccaccgcagcatcctgctcaagcccaatggcgtgcaggcctacgtcagcttgagcggcgtgctgctgcgcgcgaaccgtctcgatgaggcgcttcatgtgctgcagcagggccttcggcagggcagcaatggccgcctgtatggcaacctcggcaccctgttgtacatgcggggtgactacgctgaggccgccacggcgttcgagcgtgcattgtccgatgcgaagggcagccccaacgactacctgaaatgggccaatctgggcgataccctgcgctggttgcctggccatgaagcgcaggcgcgcgcggcccaccagcgcgccctgcagatggtggacacgctgctgcagcgcagccctgacagcgcaacgctgcagagtcgcagcgcgctgtacgccgcccggctgggacaggcttcgctggcacggcagcgcatcgacgccgcactcgccggtggcaataacaatgcagacctgcagtttcgcgcagcgctggtggccgaacttggcggccgtcgcgaagctgcgttggctcacctgcaggacgctatcgcgcgcggctaccccccgcatatgatcgccggggagccggatcttctggctctacgccgggatcggcgctaccaccgcatgcttacagggaagacagaatga

SEQ ID NO: 504585 - DNA, 486 bp, Stenotrophomonas maltophilia
atgaagcgcggcacacagatttccgggtttctgggctggttggcgatcaccttcgctgcggccgcattgggcgcgtgggcatcttcatcggcggccaccttctataccacgcttgccctgcccgcgtgggcgccgccggccggcgtgttcggcccggtgtggacgctgctctatgcgctgatggcggttgcggcttggcgggtctggcgcgagcgcggctggcgcggcgcgcaaccggcactgcggctctatctgttgcagttggccgtcaacgcactgtggagctggctgttcttcggctggaaacttggcgcccttgcgttcgcggacattcttctgctgattgcgctggtgtgcgccacgatcgtcaggtttgcgcgcgtcagccgcattgcggcagtaatgctgcttccctacctggcctggatcgtgtttgcctgcgcgctgaactacgcggtgtggcgcgccaatcccgcactgctgtga

SEQ ID NO: 504586 - DNA, 762 bp, Stenotrophomonas maltophilia
atgaagacgaccacgctgttcccctggccaggcgggaagacccgcctgctgccgcacctgctgcccctggtggctaattccccccaccgcacctacgttgaggccttcgccggaggcgctgcgctcctgttcgcaagggaaccggccaaggccgaagtcctgaacgactgccacggcgagctggtgcgcctctaccgtgtggtagccaaccaccttgaggagttcgtccgccagttcaagtgggcgctgacgagccgggaaatgttccgctggtgccaactgcagcacccggacacgctgaccgacatccagcgagctgcgcgcttctactacctgcagcggctggcttggggtggcaaggcgactggccagactccaggcttcggccggggcggcaagggcctcaatctgctgcgcatcgaagaggatctgagcgctgcgcacctccggctccacaaggtcaccgtcgaacacctggcctggcagcagtgcatggccaagtacgatgccgccgataccctgttcttcctggatccgccgtactgggagaccgaggggtatggcgctccctttgggatggagcagtaccaggagctggcgcgccagatggctgggctgcgtggcgctgccatcctgacgatcaacgaccacccggccatgcgggaggtgttcggtcagttcagggaccgggtggtgccaatccgatacaccattggtcgacaggcggtgcagcggcgggagctgatctacacgacctggtag

SEQ ID NO: 504587 - DNA, 339 bp, Stenotrophomonas maltophilia
atgtatgcgatcacgaaacacagctatcgggccgtcgccaccttcacccagcttgcgccagaagaatcgctggttcatcaccttccagacgacctcctgacgagtgtcgaagggctggagcggcgctctgatcgggataggctccttcgcgaatgtgactggacccagtcgcccgacagcccgctccctcccgaagccagagtggaatgggccgcctatcgtcagcagcttcgtgacctaccggagaaggctgatttccccaactgcccttggccgagcccgccggccggcttggacggtgtcgcttccgtgacgctgccagcggaagaccccaattga

SEQ ID NO: 504588 - DNA, 747 bp, Stenotrophomonas maltophilia
atgcctgacgtcaaactctcccagctcgccgccgccagtgcggcctcggtcgcggccggagccggcctgtggacgatgtctggtcacatccttggcctgcagatggagtatgtcgggccggcatccatccgcgtatccagcggtagcgcttggattccttcattgcagcgagcgatcgaagtgccgagtgcattgaccctgagcggtctcacgcttgcggccaatacctggtaccacctctacctgtacctcaatggcgcaacgcctgctctcgaagtcgtggcggacgcaccagctgcgccctatagcgggaccgctcgtgccaaaactggcgcaacctcccggcgatatctcggcagcattctgaccaagggtgacgccacgatccccaatttcatctgttccgccggatatgtgacctacagggaacgaactgacgtgccgccgtttcgggcgttggcaaacggcgtgtccaccacgccgagcaacgtgcccctcaacggctgcggagtgccggttacatcgaggactgccaagttgaacgtcaccaatttggcaactgcaggaaccatgctcttcagcacaccggacgcaagcactggaaacatgcagggtgtaaggccgcaatccggatttcccatgctgtttcccgttgatgagcagcagcaggtgacatatgccttcggggtcgccccaaccggtggcggcggctacatcgacgtcattggatatgcggtggagcgttga

SEQ ID NO: 504589 - DNA, 783 bp, Stenotrophomonas maltophilia
gtgagcctgttttcccgccatgtggagctgtacgagttcggccgcggatctcagcgctggcgctacacctccagcgatagcgcagaagtctacgattcgcagcagttcagccccgtggctatcaagcgcggccgcctgggacagtcggcgcaggaggcccggtcgaatctggagttgacggtaccgctgtcgctgcccctggcatcggtgcttcgcccgttcgcaccgaccgaacggatcacggtgcgttggcgcagggtgcgcaagagcgatggcgtcatccgcgatacgtggaatggcgtgttgagcgacttcaacgaacgtcagaacgacctggtgctgacctgccagagcaacatcggcgcagctgccaccaatggcctgcgccgctgctggcaagggccgtgcccctttgcactgttcgacgaagactgcgggctcaattcagaggctttccggatcgacggcgtgttgtctgctgcatccacgcaggcggtcacttccaatgcctttgctaccaagcccgatggctggttcgtgggcggcttcatcaagtggaaaaggggcacagccactgagtaccgctttgtagtcggtcatgtaggtccggtactgaccctgctgaccgctgcgccgcttgctgcaggcgaacttgtttcggcctatcccggttgcggccacgcgctatcggtgtgccacgaaaagttcaacaactcgctcaacttcggcggccaacacacgatcccgaagaaaaaccccttcggccctgaccccatcttctga

SEQ ID NO: 504590 - DNA, 978 bp, Stenotrophomonas maltophilia
atggcctacgccgaattcagcaacgttcccaacgtgcagaccctgatcgacctggtcgtgcagtttgcgcaggccaatggctggaccgttgaacgcaacaacctggccggggccaatcgaacagccaccgttcgcattcccggcgtgtccgactacgtccacctgttcaacactgaccagctgagcctgcagtcgcgcctttccatcgggtataacggcgcactcgatcccaattcgcagccgctgcagtctccccgaaccgtgtcgacccgcgacctggtcggtccgttcccgcgtgtgaagctgttcgccaatggcaccgcgatccacatcgccatcgcccaggccactgccggcgagtatcgccatcatgcgttcggggttcttgccaaggccggagcctatgacggcggcacctatgtcgatggcacgtactggccactgaacggcagctccagcggcgtgatcagcaccagtactcccacggtggtgctgttcggatacaacaccaatggactcggttgcggacaggtgcgggctgactcagtcgaggatgggcgcagcaacagctaccacatgatctgcaatacctatggcggctcgttcgggactgagggccaggccggtagcggtgtcggtccgagctaccaaggctcctccaatgacgtcacgctcgaccacctctggctgggccgagcgctgggcaatgccgacgagaacatcttttccggccgcagcatccttcacccgattcatctatgggtccgccgagctggaacaaccccgaacctgtctccgatcggcgaggtggtcgggctgcgggcgtgctacctggagaagctggaacccgaacaggagatcaccatcggcgacgagacctgggtggtgttcccctgggtacgcaagctgacgatggccagcggttcgggccaacctccggccagcaacgcctatggctgggcaatccggaaatcctga

SEQ ID NO: 504591 - DNA, 3522 bp, Stenotrophomonas maltophilia
atggcttcctcgcgcaacctcgaactggcgatgcgtatcgccctggacatcgagcaggtgcgccaggcgctgccagtggtccagaaggggctcgcctcggtcaagggcgccggccaggatgccggcgccggcctgggcgacgtcacgaaaggggcgaagaaggccgctgatgccttggatcgggccgcccgcagcagcgccgcctcgggcagtcaaatggaggatgctggtcagaaggcggccgccggcgcggcgggcatggccacggcaggagaatcagccaaggccatgtcggcggatgtggccaccgccgcagatcgcgtccgaacgtccggcgcggcggtgcagaaaacggtggccgatgagatccgcctcatctccgagctcgatgcacgtctggagcgcggcgcggcgagcatgtccgacctggccgacacagaggcgatgcttgatcgggtgatggcgcgcggcctgatcaccaccgaggactacaacagcgcgctcaaggcactggataagcaggaagctggcctggctcggtcggagcaacagcgccagcgtgctgttgagggcgccctggggcgctatgacagtgcgtcggtaaaactgcagaagctggagcgggacgagcaggagctcaaggcggcggtggatgccggccgcatcagccgcgagcagtacaaccgagccctggcgggcatcaatgtccaacgcaacgccgtcaaggttgccgaagcgaccagccgcagcctgggcgccggggcgatctcggccggccagtaccagatggccatgcgccaactgccggcgcagatcaccgatatcaccaccagcatcgtcagcggcatgccgatctggatggtggccattcagcagggtggccagctgaaggattccttcggcggtgtggtcccggccgcgcgcgcgctcaccagtgcgctcaatcccgcggtggtcgtcctgggcggtgtggccgccggactgggtgttgttggctttgccgcgctgcagggctacaagcagctgcgagccttcgacgccgctgtgatctcgaccggccattcactgggggtgtccagtggtcagctttatgcccaagcgaatgccgtcggtgcggtcactggcgagtactccgatgcaacgacggctgcgcagcaacttgcggccagcgggaagctgacggcaaacacgctatccactgcaatcagcgtcgcagtcaacctggccaagctcacaggtgagtcgatcgaaggcaccaccgccaaggtggtcgaagtctccaaggccccttcggctacgctggccaagctcaatgagcagtaccacttcctcaccgcagcggtgtacgaacaggtacgggcgctcgaggaccagggcaaggcgaccgatgccgccaaggccgcgctcgaggcgattgcccatgtcagtgaccagcgcgtcaaagaaatggaatcgcgggcgggctatctggagcaggcatgggatgcagtagccggtacgctcaagagggtctggcaagggctgaaggacattggacgcaccgactccgaggcgatgctccgcgcggagaccgcggcgatgcgcggtacgaccgagcagctgcagcaggcgctgaagaacggaaacacgccagccatcagctactactatgacctgcagatcaagcagatggaccggctccgcaaggctcgggccgcctacgatcgtgacgtcaatgctgccgagagcgccggccaggcccagcggatccaggatgccggcgtcgaagcggccaaggcgatcgcctcgggtctcgaggagggtgccagcaaggcggagaagctgaagaaggcaaccgaagaggttgcaaagcagttccgcgagttgcgcaaggccaatcctggaagcgatctcctcaagggtgtcagcttcggcgacgatggcagcgtcagcggcggcgcctatgacaagcgggttgcccagctgcaggagaagttcaaagagcgcactcgaaagacgccgaagaccgaaagccagaaagatgaggcagcggcgcagcgggaattggagcgaatcaagcagcagatcgatctggtcggaactctggatgagactcgcaagaaggcaaccgagaccgcccgtatccaggcggccattgccgagggcaatttccagaacgcttcggcgaagaccaagcaggagctgctggacgaagccaagaagctggatctggccaatctccgggtcgaagccgaccgcaagatgctggacatccgtgatcgcattgcggccttgcaaggacgtggtcccgatgcagagttggccaagaccacgcgcgagctgacgaagctgaaggaagggctggaggccgcgggacgtgctgctgatgctgcagatgttgccaagcttctcaatctgagcaaggccagcactgatctgaagaacctgcaggaaacctacaaccaggtcatggccggcatcgcgctgggccagcaaagaatccaggtggagttggaagcaggcctgatcacacaagccgacgcacagcaacgcgtggttgacctgtatcagaagcagagctcgaccttgcgcgatcttgttccgcagatgcgtgcagcagcaatagcactggggacgccggaggcaatcgccgcggtcgatcagatcgacctgaagctgaaagaaatggtgcagaccacgaacctgcttcagcaaaccgttaggacgacgcttcagaacggcttcaaagaagcctttatgtcgctggcaaatggaagcgcttcgttaactgacgcggtacgcggattcttcttgtccgtttccagcggcttggccgagttcgtggccgatcagtggtcgcaggcgttggcaaatcgaatcacgtcgatggtgttcgacaagggggttgatgccgggactgacgcggccgccgctgctgcgactcaggcttcagccgcagctctctcgactgccgctgccggcgtcaccgccggcgccacggcagtggccaccagcgcaactgcgctaagcacgtcgggcgcgggcttgatcactggggcatctgcagtgacggcggccgccatccagatgcaggctgcggcacaggcgatggccgctgcgtcggccgtgagggcggccgccagctatgcggtaggcggttacaccggtcctggcagcaagtatcaggaggccggtacggtccacgcgggtgaattcgtccatcgtcaggaagtagtgcgccagcctggcgccctagcattcctctatgacttcaatcgggtgggtatggccgcgcttgagcgttggcgtggctatgccgacggagggcatgtggcagcgctgcccacgctgcagcggtcccccgtgttcaccagcgccgcttcggcgccgccgagcactgctgcgcagttgggtctgcgcgtgatcaaccaggtgtcgccggacctgctcgaccagtacctggacgatccggggagcgacaccaccgtcatcaacaagatcagccgcaacgctgcggccgttcgccaagtattgggactctga

SEQ ID NO: 504592 - DNA, 510 bp, Stenotrophomonas maltophilia
atggccaaggtgatcggcaatgtcggtcagcagtcctccggatccggcgctacggatccgggggccgtagccggtgagctggacgtgctggccggacagcagcaggggcagctcggcggaaagaccatcacagtgcgcgagtacggcttctttgaggccgctcgcattctgcagaccgcggcaccactggttggggacctgcagccgctgttcgaaggcgccgatgcgccttccatgctgcaggtgatggacgcccttatgtcccacccggatctgatccggcatctactggcgtgctcgatcgcagcgccgccggctgatgccaaggaccacgcagccgaggtgcgggagcaggaagcatggctggagacgctcaacgaaaccgacggcgaacagatgctgctgttgtggtggcaggccaatagcagtttttttctccgccgcctgcttcgaaacgccgtcagtcaaaaggcactcccgtcggttacggacgcgtcttcaccgacctga

SEQ ID NO: 504593 - DNA, 756 bp, Stenotrophomonas maltophilia
atgtccgagaccgaatatttctccctgcagggacgtgtgtacctgggcctgcgcaatcccgacggcagccgcgcaccagcgcgctgggcatacgacgccagcgtcctggagctgaccatgtccagcacccgtgaaaccaagaaggagagctggtcgggtgtgcggggtgtgggcgctaccatgaccaccgagcgcaacctcggcgtcaatctgaccctgggccagctcaacaccgatcacctggcgctggccaccgacggcacccgcatggagctggctgccggctcagcggccaacgaggccattggcacggtcaagccgggtgacgtggtcgcactggagtatgcggcgatcagcacgctggtactggaagggggcaccccggccgcgccgctggtgctggacactgactacaccgtcaacctgaccaccggcatcatcactttcctcacggccaagacggcggtggtggccaagacgtacgagtacgctgcgcacagcctggtaaaggtctttgaaagcaccaagtccgagtactacgtgctcttcgacggcgtcaacagcgttgacggcaccacgatgcgcttccgtggcgaggtgcaccgcgtcaccttcccggcgtcggaaacgctgtcgctgatcaatgacaccttcggtgagattgcgctcaccggcgaggccaagatcgacccggtacgacaggccgatccgcgcttcggcctgtatgcccgtgccctgctggtggatgcagcctga

SEQ ID NO: 504594 - DNA, 213 bp, Stenotrophomonas maltophilia
atgaccacccagaagtacaagatcaagaagccgggcctgacgctgtcgcgcaagcccattgccgccggcgaaatagtcgaggttcccactgacctggtgccctgggcagtcgaacgcggcttcatcgacgcccccgagactgattcttcccccaacacgtcgcgcaaggccagtggccagccgaccactgccagcgcccaggaggcgaagtaa

SEQ ID NO: 504595 - DNA, 534 bp, Stenotrophomonas maltophilia
atgtcgtactgcacgctcgccctgctgtcggcggccaagctcgcccaggaactggcgcaggtggccacgccggagcgctatccgatcgtggacgatgcactgatggatgccacgctgctcggcagcgatcgcagcgccttcgaccccgccgacgtggcgatcgccgatgaggcagccgcgcacgtgcagcatgctctggatgacgccgatggcgtgatcaacggctacctggtcatgcgcaaacccaagccctatccggtgccgctgccggcgccggtaccgggcatcgtgtccacttgggcacgatggattgcgcgctacctgctgcacaaggatcgggtcaacaccgaggagcgcaccgatccggtggtgcgcgactacaaggaagcgctttccttcctggagaaggtgcgcaagggcgagttcagccttggcgaggacgatccgctgccagcgccgagcggtggcgcccctgaggtctgtgcaccgccgcgggagttcagctaccgcaccctacaggactacggccggtga

SEQ ID NO: 504596 - DNA, 483 bp, Stenotrophomonas maltophilia
gtggccaagccccgcaccgcaccgcccagcgcacccaagaccgtccaggacgacaagccggccgatgcgccggcggacacggaagagaaggcggccgacgcgtcgccggcaaaggacggttcggtgccggaggaaggcctcggcgaaccagagtccgcctcgtcggccgtctccgcagccaatggagcagcagtggaccagcctcagggcggtcaggcagtggctgatcaggacgtcggcaacggagcggaagcgtctgcgcctgatgctgcgtctctcgatgctgctgcgcctgccaccaccacagctggtgacgatgatgcgccgagcacctggcacttcgaagtgctcagcccgttcaagtacgacggcgtggtcgtcaagccgccggcatggatcgagatgacctgggacgaagccgaggactaccaggaagccggcgttctcggtgacgaaccggtcaccctggcagagctggagtaa

SEQ ID NO: 504597 - DNA, 945 bp, Stenotrophomonas maltophilia
atgtccgcacagatgacccccggccaggttcgagtcgctgacccgatcctctccgaacacgcccgtggctaccgccaagcgcagctcgtggccaccgcgctgttcccgttcgctgacgtcgccgcctatggcggccaggtgatcgagttcggcaaggaatccttcaagatctacaacgcaaagcgcgctccgggtgccaacaccaagcgcattcgcttcggctatgagggcaagccgtacgccattgtgccgagcgcactggaagcgccggtgccgcgtgaacatatgcgagatgcgagccaggtgccgggcatcaacctgagcacccgcgccgtgaataccgtgctgcgctcgctgctgctggaatatgaggtggacagcgccaagatcgccaccactgctgccaactacgacaacgaccacaaggtcacgctggctggcaacaacgtgtggtccaacgccgcttccaatccggcgcaggacgtcgaaaccggcaaggaagcggtgcgtgacagcatcggcctgtatcccaacaccatgctgttgtcagcgaagtcgttcaagcagctcaagcagcatccgaagctgatcgatcgctcggccagcaccggcattcgcaaggtgaccctggatctgctcaagcaggtcttcgagatcgacaacatcgtggtcggtggtggcgtcgtggctggcgatgacggtgccttcggtgacgtctggggtacgtcggcagttctggcctacgtcagtccgggtgccgacgtgaatgccaatgtggaagagccgagctacggctacggctatcgcatcgaaggcatgccgctggtcgaacttccctactgggacaacagcgccaagagctggatctacggcgtcagcaacgatgccaccccggttctggccggtatggctgccggctatctgattcagggcgccggcctgtaa

SEQ ID NO: 504598 - DNA, 342 bp, Stenotrophomonas maltophilia
atgtcccagaacaccgctctgcttacgctgtccgtgctggccacggcagcccttaccaacaaccgcttcgtatcgccgaccggcggcgtagcagctgccggcggcaacagctacggggttacgcgctccgatgccgcggtcgggcagctggctccggttgacgtcctgggaaccacccaggtcaccgctggtggcgcgatcgcagctggcgcctccatccaggtgggcgcagatggcaaggccatcaccgccgacgcaggcaaggtcgtggcccgcgcggcacctggtgccaaggccgccgccgacggcgacgtgctcgaagtgatcctcatcccgaactga

SEQ ID NO: 504599 - DNA, 1206 bp, Stenotrophomonas maltophilia
atgaaccagcccgccgccaacctgcagatcttcaaagccggcacgcatgttgccgaagacggccgcacgctgacattcagcgacgcggatgtgcagcagatcgccgacagctacgatccggcgttgcacgaagcgcccatcgtggtgggccatcccaagaccgacgatccggcctatggctggggcaaagcgcttcaggccaaggacggcctcctgatggccgaaccgcaccaggttgatcctgccttcgcggagctggccaacagcggccgcttcaagaagatcagcgcctcaatcttcatgcccgattcgccgggaaacccgacgccgggcaagtactacctgcgccacattggcttcctgggcgcgcagccgccggccgtgaaggggctcaagtcggcctctttcgccgacggcgatgacgccgcctgcttcgccatgtcgttggccccgctgggctggacgttgacggatctgttccgtcgcttccgcgactggctgattgatacccagggcctggatacggctgaccaggtcattccggactggcagatccgcggcatcgagagcagcacacgcgatgacgacaactcgcgcacgtcggccctcttcgcgtcgccattgctcacccagttcccgcgcagcgccctagatgcgcccgcgcccgtccaggcaacgcctcccactcgtgaacaggtcaaatcggagatcgaccccatgtcccagcagcacaacgccgagcaggcgcagcgtcagcagcagctcgaccagcaggcttccaccctggatgctcgcgagaaggccctcgccgcccgtgaacaggccgcgcgacgcgaagacgcagtggcgttcgccgaaggcctggtgaaagaaggcaagttgctgccgcgccagcagccggccgtggtggaactgctgttggctcagcccaatggcaaggagccgctgaacttcgcggagggtgaaacgacggtgtcaaagccggccgaatctgtgctgcgcgaactgctcaccagtctgcccaaggtggtggacttcagtgagaagtcaggtggcgacgcgcccaacgcagctgtgaactttgcagcgcccgcaggagtgcatgtggacgccggccgcgcggatctcttcaacaaggccaagacctatcagcagcagcaccccggcacgtcttgggcggctgcagtcgccgcggtcggcggctga

SEQ ID NO: 504600 - DNA, 1527 bp, Stenotrophomonas maltophilia
atgaccatcgcccgcccagagatcggccgcgagattgccaccaccgccgatggcatcgacattacccgtggctacaccgggccgctgctgctgccctttgacagtgtgctgcgcaatcggggtggctatgacctgcagatctacgagcaggtgctgtccgatccggaggtgaagaccaccttcggctcgcgccaggattcggtggtggcctgcgaatggcaggtggagcccggtggcgagaagcgcatcgaccgccaggccgcagagtatctgcaggagcagttgcacgggatcggctgggacaacgtcacccgcaagatgctgtttggcgtgttctacggctatggcgtggccgagatcctgtacaaggtcgacagcacccgtatcggcctgcaggacatcaaggtccgcaaccgccggcgcttccgttacggcaaggaaggtgacctgcgcctgctcacccagacgcagatgaccgagggcgtcccggcactcgcaccgtacttctggaacttctgctccggcgctgaccatgacgatgagccctacggccttggcctggcgcactggctgtattggccggtgctgttcaagcgcaacggcctcaagttctggctgatcttcctggagaagttcggcatgcccaccgcagtgggcaagtacgacaccgaggcaaccgatcctgagaaggccaagctgctgcaggccacccgcgcgatccagaccgacagcggcatcatcatgcccaagggcatggagctggcgctgctggaggctgggcgtagtggcacggccgactacaaggccctgcaggactacatggatgccaccatccagaaggtggtgctgggccaaaccgctagcacccagggcacacccggcaagctgggcaacgaccagctgcagcgggaggtgcgccgcgacatcatcacctccgatgccgacctggtgtgcgaatccttcaacaagggtccggcgcgctggctcaccgaatggaacttccccggcgcggccatcccgcgggtttaccgcgtcacggaagaacccgaggatctggacgccaccgccagccgcgacaagaagatcctcgacctgggctacaagcccaagcaggtctacatggaccagacctatggggacaactacgagcctgtccaggcgtcgctggcgccgcctacggtaccgaccgcgatcgatgggccgcagttcgctgatgccggcggcaccgtgggcagcctgctgcgccggcactacccggcggcctttgccgacagcaccccaaaggcgcctgatcctgccgtcggcctgggccggcagcttgatcggcagctatcgcccattggcagtggctgggtggagcagatccgccagctggtcgatgaggtcggttcgctggaggagctgcgcgaccggctgttcgacctgcatccgaacatgaccctggacgactacgcctcggtgatggccgatgcgatgacggcagcgacgctggccggccgtaccgacgtccagggcgcgggagactga

SEQ ID NO: 504601 - DNA, 558 bp, Stenotrophomonas maltophilia
atgcctcctgtgagcaagatcgacctactgccggccgatgtgcgtgacgagctggatcggcgcctgatcgccaatgccttcggcggcagcatctcgctgtccgaatggctgggcgagcagggctttgagatcagcaaaaccaccgtcaacgaacgcgccaagcggatcaagcgccgcctggcttcgatcagcgcaagcactgaagccatgaagcttgtggccgagcaggcgcccgacaatgccgccgagcgcggcagcgcgctgatgggcctgctgcagaccgacctgttcgaagcgctgctgcagttccaggaggcggccgaccaggacgatgagagcatttccccagccgatcgcattgcgctgtacagcaaggcggccaaggccattgccgagctgacccgctcttccatcgtgcgcgagaaatgggccggcgaaatccgccagaaggcgctggtcgacgcggccagccgggtcgaggaggctgcacgggccaagggccttgacgccgagggcgtggagttctggcgcaacaaggtgctgcatggagtcggctaa

SEQ ID NO: 504602 - DNA, 318 bp, Stenotrophomonas maltophilia
atgatcgttgaagtgcagccgctctacctggtgtggttcgccggcatcggcatcaccctgctcggcggcctggtcgccggtggtcgctggctggtcaaccagctgcagcaacgcactgatcagcagttggccatcctgatcaacgacagcaagcgctggcgcgaggttgagagccacctcaccgacttccgcctggaggttgcgaaggaatatgtccgccgcgaggactatgcccgcgggcagagcgtcatcgaggcaaagctcgatgcagtggcctcgaagatcacgaacatgcaaagcaaggggaacacgccgtga

SEQ ID NO: 504603 - DNA, 519 bp, Stenotrophomonas maltophilia
atggcagcagagcaatccggtaacaaagcactgcccatcgcgggcggaatgctggcaaccatgctggcgttggtgctcgggttggtgcagcccttcgagggctactcggccaagccctaccgcgatgtcgtcgggaaactgacggtttgctacggccatacggcaaacgtcgaacagcgcacctacacccgcgccgaatgcgagcgcctgctccagtccgacctcggtgtcgcctgggacaccgtgcagagctgcatcaatgtgccgatgacggactaccaggcggccgccctgacgtcgttcgccttcaacgtcggtcccggtggagctggggtcaaggacggtctgtgcttcctgcgcaacggccagcagccgcggatccgtgtctacgccaaccaaggccgctgggaccttgcatgtgcccagctgagtaactgggccaatgccggcggcaagtcctataagggattggagcgccgccgcaccgctgagcgcgcgatgtgcgagggccggtactga

SEQ ID NO: 504604 - DNA, 210 bp, Stenotrophomonas maltophilia
atgagcgaacccgcccccagcctggatcttcacctcaaggtccgcactgccttcgtcagcaagggaaccagcctgcgcggctggtgcgtggagaacggcgtcccgccgcagaacgcccgggacgtcctcatcgggcgctggaacggcccgaagggtcaggccctgcggcgccggctgctgaaggccgccggcctgggggcctcggcatga

SEQ ID NO: 504605 - DNA, 234 bp, Stenotrophomonas maltophilia
atgaacgcccccggccgccccctggatgagattccgacccgcgaactggagttgctgctcacctcaacccgcgaccagtacgccaccgccgtgaacaactggcagcgtgctgttgaatcggacgagcctctggccaacaccctgccactggccggcgccgtcgacgcagctgaccgccgcgccgtccggatcctgaaggagctggcgcgccgccagcaggacgccgcggcatga

SEQ ID NO: 504606 - DNA, 294 bp, Stenotrophomonas maltophilia
atgagcgagcaaagcatcttcgcccgcctgctgtttgccctggccgggcacagccgcaccggcctgcgcctgaagcccattgccgacggcatcggcgaatcacccagcaccacgctgcgcaacctgcagcgcctggccgaagacggcctggtcgaacgatcccccttcgaccaggacaactggcgcctatccccccgaattgtccagatcgccctggcccatcaggccgaggtggctcgtgaagagcggcaactggacgacttcaagaaccgctacagccgtagccccaactga

SEQ ID NO: 504607 - DNA, 918 bp, Stenotrophomonas maltophilia
atggcagagaagcaacccaacaagcgcggcgccaagccactcgcccaggctgagccggtaggcacggagctggatgcgggcaagctggccgagcgtagccaggaactgcaggtgatggcgcaggccgaagcgcaggtgaagagcttggccaccacactgggctacgcgggcgccctggacaccgactcgctctggagcatggtcgaataccgccaacgccgctccgtcgaggacatcctcgaaatgggccggggcctgctactcatcaaagagcagaccgcgcatggtgagttccaggaacagattgccacgcgaggattcaactaccggacggcggcgcgcctgatgaccgttgccctgaagttctccaaaagtgacacggtgtcacttttgaaggccgccggtacccaagccaaggttctggaactggcggttctggacgacgaagacctgcaggccctcgaatccggcgagccggttgctggcatcaccgtggacgatgtggagcgcatgagcgccagccagctgcgtgccgctttgcgcgaagccagggcgaatgccgacgcaaaagatcagcgcatcaacaagttgagtgatgatctgaacaaggagtctgagaagaccctcaaggcgcaacgccgctggaaggccgccacgcccgacgagcaactggtcgcactcaaacagtcggtcaccgaagccgagcagaacgttctggctgccatcggcagcgaaggcagcggcctgcgcgcctccttccaggcgttggccgacttcgcctgtgacaaccacgtcgaagaggacgcagcacagttcctgagcgacgtgattggccgcctcctcacgtcggtgcgcatcgcccgcgacgatgaggatctggccatcgcgatccctgtcaccaacgacgcggggatctga

SEQ ID NO: 504608 - DNA, 1176 bp, Stenotrophomonas maltophilia
atgacgttgcgtctgaagcgcctgctcaccgaggccggcatcaagcagggagacctggccagcgcggccggcctgagccggccagccctcaatgccctgatcaaccacggccagcttccgaccagttgcgacccggcagcggtgcgcgctgccatcagttcctgcctgacccagcacggcgtgaccgacgcccactggcatgaaaaggaggggccgacgtgcggggtcacgccagccccggtttccccaccgcaagacaccgataacgacaacgacattcacgacgaggaagatcccatgctactgcgttttcaggctttgactccacaggccaagcgtcacttcggcctcaccaccaatcctttcgccgatccgaccagtgccgaagaggtcttcctgtcgccggatatccgctatgtccgcgagagcatgtaccaggtggcccgccacggtggttttgctgcggtgatcggcgaaagtggcgctggcaagagcacgctgcgcgaagacctggtcgatcgcatccagcgcgaagagcaggcggtcattgtgatccagccctacgttctggccagcgaaggcagcgatgcagtgggcaagaccctgcgcagccaccatatcgccgaggcgatcatggccgccgtcgcgccgctggccaagcccaagagtagccccgaggcccgcttccgccagctgcacgaatcgctgcgtgacagcgcacgcgccggccacagccacgtgctggtgatcgaggaggcccacagcctgccgctgcctacgctgaagcacctcaagcgcttccgcgagctgaaggacggcctgcgcccgctgctgtcggtgatcctgatcggccagcccgagttgggcgtaaagctctccgagcacaacccggaggtacgcgaagtagtacagcgcatcgagatcatcacgctaccgccgctggacaacgagctgggcgcctacctggcacaccgcttcaagcgcgcccaggtgccgctggacaaggtggtggaccacggcgccatcgacgcactgcgcaccaagctggttccttcgcgcggcgcaggctcgctgctgtacccgctggcggtccagaacgcactgaccgctgcgatgaaccgcgccgccgacttgggcgtgccaactgtcaccgctgacgtcgtgcggggggtgtga

SEQ ID NO: 504609 - DNA, 207 bp, Stenotrophomonas maltophilia
gtggaggcgatggtgcgggcgccgcagggtgagcagtggccgttcgccactcagaccatcctgatcccgtttgatgttcaggataagcccgagccgatcaacctggacatcctgcaggtggtgatcgtgccgcgcgccaactgggagcgcatcaccgcgcatgttccggccgatgtgctgcagcgtgaaggggtggctcatggctga

SEQ ID NO: 504610 - DNA, 309 bp, Stenotrophomonas maltophilia
atggccgttccgaccctccagcgctgcctcggccaggtgcgtaaccgccagcgacacagtgcccagcacccccagcggaagaagtccatcgggacgctggtacaggactgccacacgttcccgacagcgtcgcgcgtgggggaagtccaggtgcacgaccctgaaaccgggcgcgagtactcggtcgaggtctggatccacagcggcgtggtggtgatcgcgcacagcaccagcaagcgctggctgctggaactggacgagattctcgacctggccatcgccgccggcattgatcggggggccatctga

SEQ ID NO: 504611 - DNA, 390 bp, Stenotrophomonas maltophilia
atgcagctggccctgctaccgcaagagctgtccccacagacggtgcttttgcagctgcagggccgtcgcggcgccgtcaacggcatcaccgcccgcgacctggtgcagcagatcacctcacgtaccagcaccgccgacgagcgccgcctgcgccagatcatcgagcagctgcggcgcgaggggcacccgatctgcgcccacccggctcacggctaccacctggccgccagtgcggccgaactggaccgcgcctgcaccttcctggtcgggcgcgccatgacctccctggagcaggtcagcgcgatgaagcgcgttgcgctcccggatctgtacggacaactcgggctggacaagcccgctaccgacgaggaatccaaccatgaaccatga

SEQ ID NO: 504612 - DNA, 276 bp, Stenotrophomonas maltophilia
atgaaccatgaacgcaattccgacgtgctgtatgccgccgccaacaccgcacgcgagctggagaacagcggcgtcgagatcctgggcctgcacagcaatggccgtcgcgcggtactgattctggaccgcccgccgacgatggtgggtggccacctcaagcgccgccagcccaacggcagcggcggccaggaccgcgtgatggccgccgagtaccagggcgtgcagctggagtggacccagcgtccgccgatgctgaaggaggtggcacatggctga

SEQ ID NO: 504613 - DNA, 480 bp, Stenotrophomonas maltophilia
atgagcgccatccccagccccgcgctgcagcatgctatcgccctgtcgctgggcggcagcgtggtccggtctgacgacctgatcgcccgggtgatggagcacggcttccagtaccgcggctacgtgtccaacgcggtcgccaaagcggtgcgatgcggaatgatcctgcgcgttggcgaagggctggcccgcaactaccgcctcaaccccgactggaagatcgacccgacggcgttggccgccgcgcaggcacagcgcgtgcgcggcactcggccaggtacgacagggacgcagaaggcccaatccgctgctggcggctacaaaggccccgccttcaacaaaggcccgctgacgccctccatcggcaccgtatgccagtcccaggaggatctggaaggtgagctgccgccttacctcggtggccgcctggtcgattcactgcacaaccacttcgatcgcatctttggcggggtggagtga

SEQ ID NO: 504614 - DNA, 906 bp, Stenotrophomonas maltophilia
atgttcgtacgtaacctggtgctgttccgcttcccaacgagcaccgccttctccgaagtcgaatccgtgttgccgtatggcgcgctgaagccggtcggtccgctggaaatgaactcgcgcggcttcatttcccccttcggccgggaggagcaggagcacctgtcctgccggcagggcgatttcctttggctgaccgtgggcggcgaggacaagatcctgcccagcgcggtggtcaaccgtgcactggagagccgtcttcagatcattgaacaagaacaggggcgtcgaccgggtggccgtgagcgcaagcgcatgaaggacgacatcttgcacgaactactgcccaaggccttcgtcaagaacagccgccacgacgccattctggaccttgccaacggctatgtggccgtggatacctccagccgcagggtgggcgaggccttcgtgtccgatatccgcggcttgctgggcggcttcccggcgatgccgctgaacgccgaagtcgcgccgcgctcgatcctgaccggctggatcgctggcgagccgctgccggttggcctgtccctcggtgaatccgccgaactacgcgatccggtcgaaggcggcgccaaggtgcgctgcagcgaccaggaactgcgcagcgacgagatcgacaagcacctggacgcaggcaagcaggtcacccgtctggccctggtgctggaggacgcgctgtccttcgaactgggcgaggacctggtggtgcgcaagctgaagttcctggacggcgcgctctcccagttggagcaagccgacgacgacggccgccgcgccgagttcgacgcccgctttgccctgcagagcgtcgagattcgccgcctgttcctggtgctggaacaggccttccacctttcaacgaacccgtga

SEQ ID NO: 504615 - DNA, 369 bp, Stenotrophomonas maltophilia
atgaccatcaagcgctacaagatcgaacgtgactggggcgaaggccaagtgcagctggagatcgaccacagcatcctgacgccggagctggcgacggaaatcaacaagttctggaccggtgccgatgagcgccttggagaagccgacggcgacgcggtactggccgtcatcaagatggctggtgccgagttcatggggtgggtgctggacgtgaactccagctactcgaccgagggtatgcagcgtgagttcgatcagctggagggctggccgtcgccccacggcatccgcttggtcgattgggacgaccggcccgatctcgattcctgcctcatgcaggtcgaggaagtggatgtgtctcatggatga

SEQ ID NO: 504616 - DNA, 558 bp, Stenotrophomonas maltophilia
atgtgtctcatggatgagaccgtgtacgacgcggcatggcgggcctacaaggccgcacctcgcgccgtggccaacggcccgtcacgctcagccgttcgagcggcggtggatgcggttcttggctacctgatgccgcctggttcgacgccagcgttcttcgccgaccgcgaactgcggcgggcagtggcagcggacctcatggagatgggcagtgagagccagcgcggcggctggccggccatgcgggcaacctacaccgtcccgcttttccaggtcccgccaggccctttgccgaccgatgtggctatcgcggcccatcagcgggccgagcaggcagcggacctcacgtcggctcacggttgggtagtcgccgacgggcaaggaacccgctggcggaagtggggcgacttcggtcccgagtggacaaccgacagggacgcagcgctgcacttcgctcgtcgcaccgacgccgaggccttcgccaaggaggatgaagacgcatggctgattcagccagtgggagcatccgcgcaagaggtcgaggtgagtgatggctga

SEQ ID NO: 504617 - DNA, 240 bp, Stenotrophomonas maltophilia
atggctgaccgcaagcgcaacttcgccctcgagcagcgtctacgtttcatcgacttcctgctggaccactacggtcgggtaaaccgcagcgcgctgatggactacttcggcatcagcctgccgcaggcgagcatcgatattcgcacttaccaagagcacgctggcgccggccagatgcgctatgacctgtctgagaagtgctatctggcggagaaggagttcaagcgatgctggccgtga

SEQ ID NO: 504618 - DNA, 201 bp, Stenotrophomonas maltophilia
atgctggccgtgactgaaaaccaccaacggacggcccccctcaccaagaaggcccaggtcgccgaggtcctgagggccggtggccgtatcgtgcctggtgcacgcgacggcctgctgcggcttctggatcagtctggccaggagattccggcctggcagaccgccctccgagcggctcagggcgcgaggagcaaggcatga

SEQ ID NO: 504619 - DNA, 465 bp, Stenotrophomonas maltophilia
atgacccgcgctcgcaaggccggcgacggccgtaaccgggtactggccgcgatccacgccggtgccaagaagctcggcctctccgaggacgtctaccgcgacctggtcgagcgtgtatccagggagcatggcgttgcccagcgcagcgccggcaagtgcgatcgccggcagctcgatgcgatcgccaacgagttgcgccgcctgggtggcatccccgccaaggcagcgtatgccgccaagcgctgggccggccgtcccaagggcgacctgtccccgcagctgtccaagatcgaggcgctgctggctgattcggagcgcgagtgggaatatgcacattcggtggcccgccacatgttcaaggtaggacgcctggaatggtgcaacccggatcagctgtccaaagtgattgccgctcttcagatcgacgccaatcgccgtgcccggcgggaggctccttcggcatga

SEQ ID NO: 504620 - DNA, 693 bp, Stenotrophomonas maltophilia
atggcgagggcagaagcattgcgtgttctgttgaccggcgccgccgggttggtggggcagggcgtggcgttggcctgccagcgctcatcgcaggtcggccatctgaccgcgctggtacggcgtccgggcagcctcagcggtgcgggaagcgagcgggtcgtgccggatttcctgcgcatcgatgagcagcgtgacgatctggctggcttcaacgcgtgcttctattgcgcgggcgcgcctccggtgggcaccgccgaagccgagtaccggcgggtgacgctggacaccacactggccgtggcccgcgcgtgggcggcagtgaatcccgacggttgctttctgtatgtgtccggcgccggcgcggacccgcagagccgggtgatgccgctgcggatcaagggcgaaatcgaactggcgctccgcaggatgccggtgcgtaccgtgatgctgcgcccgggaggcgtgcggccggtatcgggaaccggcacgcgccacgcggtgctcaagcccctgtactggggtggcgcgccgctgatgaaactggcgggcgcactcgtcccttcactggtcaccagcaatctggcggtgggccaggcgatgatcgcactggcaggaagagagcatccgcctgccacggtggagtgcgcggacatcaaccggatcgcggcaggcacgcgtgatccggcggcgtga

SEQ ID NO: 504621 - DNA, 768 bp, Stenotrophomonas maltophilia
atgcgcatcgcctggctgttgttgtgcctgccccacgccggactggcgaccccttggctgcgcagcgagggcgtggcgacgtcctcgcagggccggatcctctaccacgaagttcactggcgccgcgacgccagcgagggggccgagcactgggtgctgtaccagtgccccggtggccagccgttcgcccgcaagcacctgccggccagccccctggcgcaggctcgtggctatacgctgcaggaccggcgcagtggccagacggccgagatcgaggccgccagcggcgctgtgtccgtcgtctggaaggaggatgccgccagcccgccccggcagcgcaggcttgatttgccgccggatgcggtgatcgatgcgggattcgacgcggcggtgcgcctgcactggacagcgctgatgcagggcgagcgcgtgtcgatgccgttcctggtgcccgggcggcagcgctacttcccggtgcaggtgcggcataccggcgccctgcgctggcaaggcatcgacgcccagtcgatcgaggtcagcctcgacacctggtatggcggcgtcgcaccccgcctgtcgctggtctatgccaacgccgacaggcgccttctggaattcaatggcaccagcaacctgcgcgatgcacgcggcacctatccgcgggtgacggtgcgcttcagcgcacctcccgcgcaacgccccgcgtctgagtggcaacaggcatgggcgcagccactggtcgaccgctgccctgttacgaacacgtga

SEQ ID NO: 504622 - DNA, 549 bp, Stenotrophomonas maltophilia
atgcgccggttctgggccaacctgcttggcaaccagctggtctggctgtgcgcggtggctggtgccgggcgcggctggcagtggcccgcgttgctggccgcgtcgctgtatatcggcagccagctgctgacgtcggcgcatccccgactggacctgcggctgctgctgctagcgttggcctgcgcttggctggtcgacgccagcgctgccgccagcggcaccgtgcgctacgccgctgccccgctgggatgggcgccgccgccctggatcatggccttgtgggcttcattcgccatgaccctgagcacctcgatgcgcttcctgcagcgacaccctgccctgccgcccctcttcggcctggtgctggcgccactggcctacctgtcggccgcgcgtggattcggcgcggtgcagttcaacagcccgacgtggcatggcgtcctggtcctcggcacgggctgggccattgcgctttccctcctgtgccgcgccgcccttggcggcacgcgtactacgccacaaccccctctcgccggagcgtcatcatga

SEQ ID NO: 504623 - DNA, 627 bp, Stenotrophomonas maltophilia
atgaatggaattcctgcaccgcgtcggctgcggctggcgctcctggacgaccatgaagtcgttcgtcgtggtaccgccctgcacctgtccggcgatgaccgtttcagcatcgtcgccagccatgcgtgcagcgacgaattcatcggcagcctgcggaagatgtccgtggacgtcgcaatcatcgaccttgcactgggccgcgaagaccgcagtgccacagaactggtaagcctgctgcgtgactgcttcgctcgcgtgcccctgctcgccttcgccaccctctcgcccaccacgcacgtcagccagctgatcgccagcggcatcagtggcattgtcagcaaggccgaaccgctggcaatgctttcggatgccatcgtgcgggtgtcgcaggggttgtcacgactgcctcccgattgcacgctgccggccgctttcgacgaactcagccgcaacgagcgtgaagtgctcgatctgctgctcgcaggcctgaccgtctccgagattgcgcttcaacgccatcgcagcgtaaagacgatcagcacgcagaagaccgcggccctgcgaaagctcgggctgcgcaacgatgccgagatctacgccatgcgacgacagctggaggcgatgtga

SEQ ID NO: 504624 - DNA, 2325 bp, Stenotrophomonas maltophilia
gtgagaacggccagtcgaatgcgcctgcacatgccggccctgctgctggcgctgcttctgttgcctgtggcttccgcagaagacgcgccaatccggccatgggagtccggccgcgaggtccgggtggccaccgcacccgccctgcgccagatgcccgccaccctcgccgattcggcgccgatgccgagccttgcacatggctatgccagccttgtggaacgacacgcacggctgcgcttcctggagcaggcctatcccagcggcagcgcctcggttgtcgcggtctgccagcacaaggccgatctggtactggtaatggggcagtcccgccagcagccacgcccgtgccccgggctgctggagtcggtcgcgtttcccggaggaagaaccatgctggccggacgcgccggccaacccctgccgcacgatatcgtggagttgggaacaagggtgctggccgtcgtcgaaggcgggccctacgccgattggcttgccctgcaccatcccagcatcaagcggctgcacctggccgatcggcatgccgcgctggcggcggtcgagagcggcatcgccgacgtcgcaatcggcctggaaacgaccttgcggcccctgatccgccatcacttccgcgggcaactgcagcttcagcggttcgacagcgacttttccaccgaccttcacctgcttacgcgcaacgaggaccggcaactgctgttgcgcatcgagcagggcctgcgcgacatcacactggaagaacatgccagtctgttgcaggcatgggctcagcaggcagtgccagcgaccgtcgagcgcgcgttggactggatgcgcgcgccctcttcgccctggctgctcaccctgcttgccacgctggccggcacccctctgctgtggcgcgcggtgcacagccaccgggcccgcaagggacggagccacgcgcgcgcagtcggcatgatcagccacgagatgcgcaatgctgcgcaggccgtgctggcctcgatcgacctgctcggccagtctccatcgcccaagcggcagcgtgagctactcgcggccgcgcatgcggctgggcattcgctgcgtggcctgctgaatcgatcgctggaattctcacgattggccagcggaacctacagaccccaggcacaaccctgcgacattgcccggctctgccgtcaatcgctggatgccctgcggccacacgcgcgacagaaggggttggcgcttcgcttcgagtgccagcccgaccccgccccggctgttgcgcttgatcgggaggggtttcgccagattgtcggcaacctgcttggcaatgcgttgaagttcaccgatatcggcggcatcgagctacgcctgcaattgacaccgcctgaccatccgcaggagctgctgctggatgtgatcgacagtggcatcggcatcccggccaggcagatgccccttctttttcgcccgttcgaacagagtgaaggcgggcaggcgcgcggcggtagcgggctgggcctgatgatcgcgcatgaactcagccgggcgatgggcggcaatctgtccgcgcacagcgtgcatgggcgtggcagtcgcttcaccctgcgcctgccggtgcaggcagtcagcaagagcgaagggccggtcggcacgcccgaaagcgacacgccactggctggactcgacctgctgctggtcgaggaccatgcgctcaatcgccggatcatcggcgagcagctgcgacggctgggcgccgacgtgcgcgcgcttgccgacggcgccagcgcgctcgccgagcaggccgcacaaccgcgcagcgtggtgctgctcgacatcgggctgcaggacatggacggctatgcattggccacacagctgcgccgtcaggcacaacagccattgcgactgattgcgctatcagcaaggaaggggccccggcacgcaatacgcgcccgcaaggctggcttcgatgccagcctggccaagccgttgcaggtcgcggacctgctgctggcactggacctgcccattgacggctacaccgagcggtccgtagcccctgcctgccgggatctgatctatcgggaagacatccgccacgaactggcgcagattgaacaggccgtggaagccgctgatgcagcctccctctgccaccatgcccatcgcctgcagggcgcactgcagatgtgcggcgccgccgcgcaggccgacactgcggccgacctgtgggacctggctggcgagcccacgcccgactgggtcgatgcgcgacgcctgctgcaagccctgcagcaatggcatggctcccgcactgcggaagccgtgcccagggcctga

SEQ ID NO: 504625 - DNA, 528 bp, Stenotrophomonas maltophilia
atggccatcgctttgatcgcattgatgctgctggaactgctgcttctgttgttctgggcaccgctcttcttccgcaccggcatcgtcctgttcaaccagcgcatcgccgcctctccggctgaactgacccaactgtcactgatcgggctggagtacgaccttcctaccgacaagtggctgagctttgtgttccgtgtactgcccgaccgcagcgtggcgttccgtgagagcttcgcaccgggctatggcggccgctattttccgttgatgcacggccagctgttggtcgacaagcgacgccgcgaggtgcgtgtgatcgggcgatgcagctggttcgcgctggccctgaccgtgctggtgctgcccatcattctggtgcgcccggtggcatggccgatgctgggcatgctgctggtgttctatatggggtatcgcatccagctgcggcgctatgccgaggttgtcgaggcagtgcgggcgcgggtgcggtcggagttcccgcagcgattcgttgacccaaggcggtag

SEQ ID NO: 504626 - DNA, 927 bp, Stenotrophomonas maltophilia
atgagccaggaggccattgcgcgcgaagctgcccgctggtggctggatgggcacgacggcgaccgcgacgagaacgcgttcgagcaatggtgccgggccgatccaagccatgccgcgcagtacctgcacctgcagcagctgtggcaggccggtgcgacgatgcccagcctgcagcggcaacaacaacgacggcagcgccgccgcctgggtgaagccggccttgcggtgctgctgctgtgtgcgctcggcctgtacagccgccatgcctcaccgcctgctgcgcaggtattgcgcaccgcgtccggcgagatccgtgacgaaaccctggcggatggttcgcatgtactgctgtcgccgggcagcgaagtgcatgtccgcatcgacgcacagcgtcgccagctgcagctggagcgcggccaggcctggttccaggtcagcgtcgacgctgcgcgaccgtttcaggtacacacaccgcacggtaccgtcaccgcgctgggcaccgcgtttgatctggccgtgcagcgtgacgacagcgtggtcacggtcaccgagcatcgcgtgcgcgtggacggcggcagcggcaacctgcaggccaccgaagggcagcagctgcgcttcgacggaaagacggcggccctgccgcatgccgccgatgcaggtgcgatggcctggcgcgagcgacggctacattgggtgtccgctccgcttgccgaggtgacccagggcctggatcgctggcatggcgggcgcacctggattgtcggcgcccgcctgcgccagcagccggtcactctgctcggcagtgctgatgatgcggccggcaaccgcgaccagctggccgcgcagctgcatgtgcgcgtgctgcggatcggcgcaggaatgcaggtgtggctgccgccgcgacgggaacaacgcggtgcaccctga

SEQ ID NO: 504627 - DNA, 279 bp, Stenotrophomonas maltophilia
gtggtcgcctgccaaggggagtgggtcgtcagcatgagccagcgcgtcaacgatggcgtctgggtcgccttcctcgatcgccaccggaccggccctggtggaccctgcagggcctgcaccagctacgagctgggccgaacaggggtcgagctgtggataggccggcatgaggcccgcctgcgggaggatgtgagcaagatcgtcctgtggcggaaggcgatccgggaaaaccggctggccaagaccacgctccggccaccctttgacgggctggattag

SEQ ID NO: 504628 - DNA, 795 bp, Stenotrophomonas maltophilia
atgccactaccgattttcccttggcccggcggaaaacgccgcctgatcaagcacctctatccccacttcccgaaccacgacacctacgtcgaagcctttgctggtggtgcagccgcgctgttgatgcgcccagtgccggcccgactggaggtgctgaacgacatcaacagtgacctggttaccctgtaccgctgtgtacggcatcacctggaagagttcgtccgcatgttccgctggtccctggtgagccgtcagatgttcgagtgggcaacgatggagcgcccggagaccctgaccgacatccagcgggcagccaggttctactacctgcagaagctgtcgttcggcgggaaggtggaagggcagtcgttcggcctggtcgcctctggccatgggcccaggctcaacctactgcgtatcgaggaagagctgagcgcggtgcatctgcgcctggccaacgtggtcatcgagcggttgccctggcaggagtgcatcgtgcggtacgacaggccggacacactcttctaccttgacccgccgtactgggagaccgaggggtacggtgtagatttccccttcgagcagtacctggcaatggcggagctgatgcgctcggtcaaggggaaggtggttgtgtcgatcaacgaccacccggacatccggcgggcgtttgacggcttcgacctggttccactgcagctgaactacaccatcggcgggggcaatggccgggataaggccttcggcgagctgatcatcaagagctgggacgacaggcaggcatcgctgctgtag

SEQ ID NO: 504629 - DNA, 789 bp, Stenotrophomonas maltophilia
atgctgatcggatacgaacagatcgctatgaatgtctccctgttggaaggcagcatcttcaacgcgggcgctctgactgatggccggcccagcagcgtctgccggctccgcaacgcgggcggcacctgccagctcagctgcacgctgctggcggcggcgcctgtgcggatcgtcagcctgctgggcctgagctgcccgccgggcactgtggtttccgtgacaggggtcgacgcccaggccgaacccatcgccctgggcgggaatgccgctgggcagcctgctgtcgcgctggcggacggtagcgttgcagcctggttcgtccttgacgaaggactgatcctgtcgggcgtcacgattcaactgcagaccgaccaggtcgacgtgggcgagctgatcatcacgccggcagtagaaactccgatcgaaccacagtggtcgactgagcgcgtcgatcccagcgtagcggagcgaaccctcggcgctgggctgaacgtggtgaagcgccggacttaccaacgtctgcgcgtggccttccgtcgcgccgaccttatggaggccagggctcagggcctggccaacggcatggattgggatgcccttgccgcgcgcgtcagcggctcggctcgcgttgcggtcattccccgctggcagcgggccggcggggcgctccacacctccgaaatccaccgcacagcggtgtacggccaggcggcgcctggagccattaaccacctgggcggcgactactacggcaccgcctgggtgttcgaggaagtccccccactctga

SEQ ID NO: 504630 - DNA, 1983 bp, Stenotrophomonas maltophilia
atgacggaagccgttgccaagttcgccgaggcaccgctcggtcccgatctactggtgctcgatggcggtcgcagcctcctggctgtcggccccgctgcaggactgaaccgtatggcccgcgctgacatcggtcagtccgagggcgcgcatggggttgagttcgtgttctggggggaggccgctgcgacagcgaccgtgggcgtagtcagcgagggtgctgcgaccaatgcagaggtcggattctctaccggtatcggctggcgcctgcacacaggagaggttttcgtcgatggtgtcctggtgacctcgggtgttcccgtggtgaccactgctgtgatcgtgggcctacgcgtttcgatcaccgaccaaggcgtggatgccactttctaccgcgacacccaggtggtggcgcaggcgcaccgtgcggctgggccgcgcgtcttcttcgccgtgtccctggccagcgaggagaagcgcgagctgcgatgtatcgtcaatgcggggcagtggcgcggtcgcggcgctgtgtctgatgggctgcaatgggggctgccagccgaagtggtcgagcctctgcgtctcggcagcgaagactacttcaccgatgccaccgacgatccggcagatactccgttccacggtctgctgcaggccgatggtctgaacactgtggccagcgtctctttctggccttgggacaacgcctcacgcggcggaacggcggcggtgcgcatcctggacgctgaggggcgtttcgatggcatggcactgggcgccatgcgcaacgtccccgtgcgtatcagccaggtgcagcagggcgctcccctcagttcagcagagccggtcggacgctatgtgctggaccgggttgatatcgaaagcgacggcgtcaagtcgctggtcctgcgtgacgcacatgatgacctcgaccgctcactgcatcaggcagtgttcctgccctcggtgagcgatagcctggcctgggcgcctcagccggtggtgatcggctgcgtgcgcagcgttcctactacgggtatcaacagcgatggcagcgtgcgctgggtgagtgatgcgccgctccgcagcctgggtgcgctgctggatcgcggcgcggccctcgatgccggcgatggctatggcttgtccacggatgggcagcagatcgccttgaagtcgcccccacttgggccggtcatcgcggacgtgtcgacccaggaagcgatggcgcctgcaaccctgcagcagttcctggccaacgtgttcggccggcttggcaaatcagcttgggacgctgctggcgcggctcagatcgacgctcttactggctatgccggcatcggctactacgcgggcgaaggcgccactacgcgcacggcgttgcaatcggttctgccaagctatggcgcggattggtggcaggatgccgccggggtgttgcgcattgcccgattgatcgcgcccgaagacacggcagacgatcagatcgcctttgacgttgattggcgcgagttgggcgcggatctgatcgtgctgcccgatcttgctcccaacctatcccggcgaatggcctttcagttgaacgcgcagccgctctccagcgccgacctgattaccgacctggtgcagttgcccccgcagcgccggcaggagctgacatcgccccagcgcgggcaggtttacgcggcgggggaactggccaggcggtatgcccacgctgatgccgccgccccgatgctgtcgtggttcgatcgtcgggaggacgcacaggcggagattgatcgcctggtggccatctacgctgtgccgcgcaacttctacgccggcaagttcaccgccaggcccgacctgcgcctgcaggtcggtcaagtggggcgccttacctacagccgctatgggctgcagggcgggcgcaaggtcatggtcacgggtgtcatgagcaacccagtgaccggtacgcacaccatcaagttctggggaatgtga

SEQ ID NO: 504631 - DNA, 2889 bp, Stenotrophomonas maltophilia
gtgaaagcaggctttctgagtcatgaggcatcgctccgcgccaacgccctgagccttgcctatggccatgccaggttcctggagcagaacaccggcacgacgcttgccggcgacgcccagcactacgtgctgaatcccgagggcgtgctcgccaacaaccggcatttcattgggtacacccgccaggagtaccagcccaatggcgatgctacgaccgagggccaggcgctgctgatcaccggttacgcccacatgtaccaggccaccaaggacccggtctggctgcagggcgcggtccactactgggaggcgtacgtcaatcacttctatgacggccaagccatccctgtgcccgctgcaccctggtactgcaactggatcatcaacggcaaggagccggtggtcgcgcactacccgctgcacccggactatccgacccagggaggctttaagagcgtgccgctgatgttcacccaggggagaacccagatcccgcatggcgcccccttctggggcgagtggctcgacgtggccagctttgcgcaccgagggcatctggcatggccggcgatcaacgccaacgtgcagaagatcgccgaggaagtggactgggctgccatctacagcaactggcgcaggctcagcaccgatactccctgggagcccaaggcatggatcgattggcagggctacctcggcgatgagtacacccctgtctggggctcggccggtcgcggcgtcgagtacgccctggactggatcattacctggtcgggcgaaaaggtggactgggacggcaacgtcatcagcaccgggcaccagcccagcgagttcggcacggtgcagctgcaggacgcagggctcaacggctgctatctgctcaacttcgccgtgaagctgcccgtggcgaacggcggcacgctgattccgcgcaacaagccttggcacaaccgtcccatcaacgtgccggtacctacccgtgccatgtccaacgctgccgatgccgagcagtggtttggcgaggccagtcatctgttgtgggaaatcactggcgaggcacgatatcgccaggcctttgagtgcgtaatggagacgtgccgcctctatgccgacatcgaccgattcgaccagttcttccgccgctccaccgccgccagcacgccctggacagatggcatcagctacgactatgcctatccgtcttccgccgtgcccgagttcgggcgcgatgcttcgggcctgatcacgattcggcaggctcaggctgcgcagcagacgctcgaacagcaggccatctggatgcgcgtcaacacagccagtcagctccacattgagctgggcggctgtggcgacaccggtacgccgctacgcgttcgctgcaagctgcaactgtcgccggtaaaggcagaggatcacccatcggccgttgagtatgtggcgccaattcctgacacaaccgacatgtcggtgaagacgtacaccatccagctgggccagttcatccgagaggcctcgcccgagggtatgccctacatcgtggccgacccacgcatgatcgccccttacggcggtgccaccctggagacccgctatgtcctggatgtcctgggcgatcgcgccggcactacctgccggctggaaatgaacgaagacggcggcgccagcgtggggttttggctgctgcccaccgagcgggccgaggtgaagcggatcacttatcggtctggtgctgacgccttcaacatccgtatcgaagactcggcgggatggcggtggtggtggatggtcccagcgaccagcggcgagtggcgcaccatcgatctgccggtctcggacctgcgattctccggctaccagccaaaccaagatggtcgtccgcgcccggctggcccggactacaccggttcatcggagttcaccctattgctcgatgacactcctgtcggcgccaccggctggctggagtggtactgcatcaatgacgtaccgccgcgattcgactccgacagcgcctacaccatgatgttcagcgtgacgttctcaggcgaagaagccttcaacgcgctgctcggtgactgccggattgagaagtaccgcgatgacaacctggcctacacgccgggggtgattccgttctccaacaacctggacccgttttcccagcagttcgacgggtggcatggcatgccgtaccccggctatcagtatccgtggatctgggcgattaccgacgacgatgcgcccttgaacaacatggtggagttcctctacgactcgcagcaggcctacaagcgccgcttcggcgtgctggggcctggtgcagctgcgtactactggaatcgctgggacagcctcagctacggccctgcagacaccttcgctttcacacactggggcaacggtgagccgtggtcgggctaccaaccacgtgccttcttgggcgcagcgctcgcttggtacacgctcaaacagcgcaaccgagttgttccgattcacctgcgtgactacgtgaacaactggctgcggtggctggcgcagtttcaggcagaccacggcggcttgaatcccaccgagtttccctccgacgcattgccgcgagtgcctgcagacgacttcaccgggcacatgaccggtctgtggttggcaggggcctgctacgcggccctcgccggtgccgatgcggcgccggctcacacggtcatcaacaactcgatgaaagagcttcaggacaactacaaggtggtatcggcgggccacgtcatgaacggctgctggtcgccggctgtgcgcgcttcctccgataacggcatgttcttcggcttctgggcgggcgagatcctgcgagccatcggcctctatctgacctacctgccgaggatgtccgcatga

SEQ ID NO: 504632 - DNA, 579 bp, Stenotrophomonas maltophilia
atggtcgatgcaatcccccaggcagtaggagtgcccgacctcgcggcactcgcgcaacaggttcaggcgctggtcgcgcaggtgcggctgtttcaggaccagcaggtcaacctttacggcacccccgagctgatcgcctcggtgaccgatggcgagggcaacgccaagatcatcccgtcgtgggctgctgtgcagagtgctggcagcgaggctggcgccaacgccgacctcgcggctgcgtcgatctacaacaaggtgatcattgccgatgccggcagcgccctgcagctcgccaccgccagcggcgccagcttctggcagatccagctgtcgcagccaagctgtgcgttgacgctgcagacgcctgcgatcgaagccacacgcatgaagcaagtgaccctgatgctgcgccagggtagcggcgccaaccagatcgtctggccggccaacgtggtctggccgttcgggcagaagccagtgctgtcctacgcggccggccagttcgacctggtcacgctgctcttcaacggcggcaatcaatggctcgggttcttcgctgcgggaggattcgcatcgtga

SEQ ID NO: 504633 - DNA, 1458 bp, Stenotrophomonas maltophilia
atgacgcgtcctgtattgctgttggaaatcggcgacattcctctgccggcagtgacgccggcagtcgcacctgcgggcaactggtcgcaggcggtctacaccccgccggccgtggtaccgccgattcccgaggtcacgcccacgccagtggccgatggcatcctccttgaatgggagcccgtccgtgtgggctacgtccagtacatcattgagcgatcgcgtgcagctactgggccgtgggcagagattgcccgcacctcggcgacccgctacctgtacaccggtccgcgcgatggactgtggtacttccgtgtaacggcaagcgtgaacggccggccgggcctgggcggcatcgcaaacggccagtccaaggacgtgccggggatgcaggagattgtcgaccacatcaagcagtcggagatcggacagcagcttgttaccgcgatcgacggtatcgatgtcaattcggaaacgatcatcaagcaggcgctggagcagtacgagctggccaacggatcgcgacagaaccgtgcctacatcgcccgcgttgaagaaacgtcggtcacggttgatcaggcgcgtgcgatggtgcagcagacggttgctgccgagacggggccgatccgttcagcagttcaggagacgacgaaggcggtagcggacctcaacggcaagtcagaggcgtcccactcgatccgcacgcagctgaacatcaacggcaagcactacatggccggcatcgtggtgggcgtctactccgatggcgacctggtgcagcgcgaagtgctggcgctggccgataccttcggcgtcctgtccacggcttccgatggcacggtgtattcgccgttcatcatcaacaacggcaaggtctacatcaaccaggccttcattggcgacgggtggatcaacaacgccatgatcggcaacacgatccagtcggacaacttcctctgggacgacgccgcaggcatctaccgtgggtggcagatcctgaagaacggccaggcccgattcgcgggcgacgtgctggtgcggggcaccgtgattgcagaggcgatctcaggcaggttccagcgcacccaggtgttcacctggtcgggcgtcctgagcgcggacttcactggtttcaccagcgaattcgtcctggacgcgcccatccgatacggcgacagccaccagccggtgctgatgatcgaactgtcgatggaaaacgatggcggccactctcgcgatggcgtgatcaccatccagtacctgatcaatggcaactgggtggaccttcgcaccaagacattcaccctggcggcatccacccagcccacaaacgtgatgatcgtgcccgacagctatgtgtcgaccgcacgccgctatcgcatccgcgtcagccgcggaaccaacagctggggcagctggcgcctgacgggcgtcactgcccagatcacaggaatgaggtaa

SEQ ID NO: 504634 - DNA, 4785 bp, Stenotrophomonas maltophilia
atgggtgcggtggtgaacgtcgcccgcaccgctgtggccggtgttgttggcgcccaggctgtggcgtcggtggtcaagctgtcggacgaatacgccaacatcagcggccgtctgaagttggccacggacggccacaaggcgtttacccaggcccagtcagaggtgttcaacatctcccagcggacctcgaccgccctggaaagcacggccactctgtatgcccgcctggcgcagtccacggcggaatacggcatcagccagcagcgccagcttgcgctgacggagtcgatcaaccgcaccttcaccatttctggcgcgagcgcggtcgccgcatccaacacgatcacccagttcacccaggcactcgctggcggtgtgctgcgcgctgaagagttcaactcggtgatcgagaattcgccgcgcctggcaaaggcgctggccgatggcctcggcgttggcatgggcgagctgcgcaagatggtcaacgatgggcaggtgtccatcgacaagatcgtcggcgccctggagaaccaatcggcaacgatccaggctgagttcaatcagatgcccctcacggtcgagcgggccatggtgcagctgcgcaacagcgtcacccgctacatcggcgaagcgtcccaggagctgggggcaggcagcggccttgccgagggggtggccttcctcgctcagaacatggaggcggtgggccaggcagccaacgtgctggcggtggccttcggcggcaagctggtggcaaacatcctgcaggcgacggcggcaaagatcgcgtcagctgccgccagccgcgagttggcccggcaggagcttgtcgcggcccgtgccgccgaggtgcaggccgctggccagctctccatggcacgggccggcatgagcgcggcaggtggtgttgcagctgccgagcaggcgctggcgcaggcccagctgcgcacagccgcagctgctgaaggcgcatctgttgcgctgaccgccaaggcggcagctatgcgcgggctcaacgtggccatgagcgccttcggcggtccggtcggcctggccattactgccttgtcgctgttcgtcctctggctgcgcaacagcgaccaggaggcgaaggagctgtccaaaaccgtgacggccggcttccaggccgctatcggaacgctgcagggcttcaaccaagaaacggccaacgcctccttcgccaacctggccggctcgatcgaaacgctcgacaaggccgggcaggaagtggacaagctgcgggggcgctacagcgacctggtgagcgcgaagaacgcgtggatggcaagaacgggcaacacgccccctgggttcgacaaggacctgcagacagccgccaacgccctggatgcggcccgcgtgcgccaggagcagctgaccgccggatacgaacggtcaatcgacgtcgccgcagacctggtgctgaagtccgccggcatcaccaacgccaccaacgcccagcgagcgtcgctggaggaactgctgaagcgccaggccacctcgggccagacgctgcagcagaacatgccgctgctgaccaagtgggcgacagagcagttcaatgtcgatacggccaaccgcctcgccagcgccagcttcgacaaggtggccagtgccgcgcaggcgtcgggcgctgcgatcaaggccgcgctgcagtcggtcaacgagggcttggacaagcagatcaactctctgcagctgcagctgatcgagcagacccagggcaaggctgcgcgtatgcgcgccgagttcatcaccgccgccgcagcgcagggtctggaccccaccagctccgactatcagaagctgcgggccaagaatgagcaggcgatcgcgctgacgctctcaattgagcgccagaccaaggcaacgcaagcagcaaccaaggctgacaccgacgccgaccgcaaggcggaagaagccaagcgcaagcgcgaccagctgatcgaaacccaggcccggtacacggccgaagccgcgctgacctctgccgagttgcgcggcccgctggccgccgcgcaggagcgccagaagcagcgtgaggccgaactggacaaggagctggccaagggcaacatcacccaggctgcgcgcaacgacctggtcaaggcgtcggccgccgagctggccaagcaaacgcaggagctgaatcgccgccagcaagcgccgcaggcgctgctgggcgacatgtcggccgaactgcaggttctgggtctgctgggcgacgcgcgagagcgcgcgcagcgccagatgcgcgccgagcacgacatgcgccaggcgatcaacgaggccaacgaggccggcgcgggaatcaatgctcagatgacgcagagcctggtcaaccaggcggcagcctatgccggcctgtccatccaggtcgagcgcaacgcgggctatctggaggagctggcgcgtgtcggtggcgacaccgtgggcggcattgccgatctgctgatcgatgcgttcgacgatggcctggatcaatccaagagcttctttgaccagctgaaggacatcttcaagcgcggttggcgcgacctggccaggacggtcatggagcagaattttgtccgtccgatgcaggacatgttcaaccagatgctgagcaagggcacctccagcctcttcggtggcggaaccggcggcagctggatgaacaccctcagcggactgttcggcaagggcggcggcaactggcttggcacgctctcggggctgttcggtaagggcgtgggagccaacgctgcggcgagtgccggctcactgatgaactttggcaatgtcggcaaccttgcgggtgtcgcaggtgcaaacagtgggctgctgaccggcgcctctggcgccggcgcaggtagcgctgcaggtgccggcaccaccgccggagcgggcgcagcagctggtgtcggcgcgatccctatcgccgggtggattgctgcgggaatgatgctgaacagcagcttctacaagcagggctggcgcatggatggtcaggccacggatatgaccgaaacactgctcaaatccacggccaagggcaatttccttggcccggtgctgggcacgatgacgatgggcattggtgccgttgatcgcctgctgaagagctttggcatgagcagctctttcgcgtcgctcatctccggcagcgctctgtggacgcgcgccttcggtcgccaggcgcccaaggtcactggccagggcattgagggctcgtatgggtttgacgggttctccggccgtagctacgccgacatcaagcagaagggcggctggttccgcagcgataagaagtggacccagtacggcgacgtcgatccaggcatcagccagctcttcagctcggcggcggcccaggtaaagagcggcgtctccgagctggccaagcagctcgggatggatgtcagcggccacctggccaacgtccgcgtggatatcggcaagctgcagctcgacgcagacccagaaaaggcaaaggcccagctcgaagacgccgtcaacaagatggtcgccaacctgtcgggagaggcagtcaaggcgctgggcctgtccagcctgctggacaaagggtttgaggcgaccgacatcatgggcgcggctgcgggcgccgtggcactgaccaatgggtcagtcgagcagctttctgccaccctggacgtcttccagcgcatggccaaggaatcgggccgaaccctgaccgagcagaccgaagcgatggccagcgccgccaagagctacgccgaagtggccgcgtccgcccaggaagacgtggccaccgccgggctcagctcgtttgccaagtccatgctctccattcgacgcgaagagcagcagcgcattgccaccctgaaggagcaggccaaggcgctcggcggcctgtcggcgcgcgagtccgacctgatggccgtgcggcaggctgccgaacagaaggccaacgacctggttaagtcgctgcagtccgagctggtcgatctcgctctgggccgcgtcaacgaccagatcgagcgcctgggcggctctgcagaaggcgccagcgacaagctgggtgatttcctcaattcgctacgcatgagcgacacactctcggtcaataccgatgcgcagaagcgttccaccgcgtcggacctgatgaacagcgcggctgcggcgggcaacgtggacagcttcatcacctacgctcagcgattcctggaagtcagccgcgccatgaacgcatccggctcccgctaccaggccgactatgccgaggttatgcggatggcgcagcagtttggcgccgatggcagtgccaactccctggagcagctgtatgcccagcgcgaggccctgcaggcgcagcaggaggccgctgctcggctggatcgtgcccagcgtatcgcccagggcgttgcagaccttgccggcgtcaagggcggcgatccgctggagatcctgcgcaacaccacgggcatgaccccggaagatctggccaaggatctgggcctttcgatcgccgaactgtcggagtacctgaccgcccagaacaccgacctcggcgacctggccgagatcctcaacgacctgccaacccgtatcgcccaggcgatggttgccgcgctgcggggcgagacgctccccacggcgtccttcagtggccgcaactccagcgcccctggcgagctgacctcacccggttacggtccttcggagccgctcctggtcgaaatccgtgacggcatccgggcactgggtcgcagcacggaacagcgagctttgaacgacctatga

SEQ ID NO: 504635 - DNA, 195 bp, Stenotrophomonas maltophilia
gtggcggtgttccaacgctgcaggcctcagtggatcaccggtatgcacgcccccgtctacgacggcatcagcgccacggaaattagcgccgctgcgggcctgctcggcgtagagcgcgaggaatacccagatctgttgttctgcctggacgtgctgatccaggcaacccgcgaggcccgctccgaggccgcatag

SEQ ID NO: 504636 - DNA, 360 bp, Stenotrophomonas maltophilia
atgctgaaactcaagaaagtcgccattgtttgccgccaggtgaagctgcggctgccgaccgacaccccggatgccttcaacgaaggcaccatcacggtcggcgtcaagatcctgaccaaggaaaagctgaaggatctggccgacgccgatctccacgacaccgagtatctgcgccagatcctggtgtccgtgtccggtctcggcgatgaagacggcaatccggttgagggcgatgccgccctggccgaggtctacaacggcccctggtcgacctacctgcagaacgccattctccaggactactgggagcagtacggcgaagtccgcgtaaaaaactccaagccgtcgcgcgggcgctag

SEQ ID NO: 504637 - DNA, 981 bp, Stenotrophomonas maltophilia
atggcacagccccaactcgaacccttcaagcgtcgcggcctggcgctggccgtgcgcgccgccgccggcagtcctgtcgtgccggcgccggcaaccaatggcgtcctgctcttcaacggcaccagcgggaccgagttcgacaagatcgaacgtcccatcgaccgcccgttcctgaccggccagcccttcgccgtgggcgcgcgccgcgcctacatcgagggcgaattcgagctgtacccgccgacctcgccaggcggtgccgctgacagcgatcccgattgcggtgtgctgttgctgccggccggtatgaccgtggtcaaggacgccacggagaaaaccacccgctacaaccccatcagcgtgaacatggcgctcagcgatgcgaggttctggcacgccggcaccgtgaagcatgtgcaggccgcccgccacaacctgaccagcttggccatcactgtcggcgatcgcttcaagggcaacgttcgcgtccagggcgactacgagaccatcgccgaggaagccctgccggaaatcgtcctgccgaccacggtgcccaccgtcgccagggcggacaacaccgtgaccaagatcagcgtgctgccgggcggcgctgcgctgaccgtctgggccaagtcgctctcggtggacctgggcaacacgatcacccccaaggaatacacctcgcacaaggaaaccggcatcaccgatcgcgcgccgacctggacgctgcggctggccaggacggccctggccgacttcaacccctggaccctgcgcgatgcggcaacgccgctggccatttcgctgcgcctgaccgagcagagcaagctctacagcgagctgggcattcgcggccagatcgacaccatcaatgaggtggagatcgatggcgactacggctgggagctgtccggcccgtgcgtggccagcgatgccggcggggacgagctgtacatcgagttcggcgattccaccccgtaa

SEQ ID NO: 504638 - DNA, 177 bp, Stenotrophomonas maltophilia
atgaccaacaaacccaccccgatcagcggcggcgcctggcgcgtaatcgatggcgccctggtcgatgaaaccaaggcgagccacgcgccgcccccggtcgcgccgaaggccgccaccgaggcggcgaagcctccgcgccagcggaacaccaccacccagtctcccaccgaggaatag

SEQ ID NO: 504639 - DNA, 450 bp, Stenotrophomonas maltophilia
gtgaccgttggccccttcccagtcggggcgatcattgcccgtctccaggagcaggccaaggtgctgctcgaagtgggcagcgctgctgacctcagcaccgcgttggagcagcagcccaagtcgatcgtggccgcgttcgtgacagctgccgagctgggccagcgctcgaagtattccacgaacggcctgcacatccaggacgtcgacgtcacgatccgcgtggtgctgttcgtccgcaactatgcgggggaagcggcgggaacaggcgcccgcgagcagatggacacagaagtgatccccgctgtacgccaggcgctggtcgggtggaccccggtcgacgccttcgatgcgctctccttccaggcgggccgcgacgaagccttcaaggccggctggctggtcagccagcaggtgcttaccaccaactaccgcatgcaggtaacgcgatga

SEQ ID NO: 504640 - DNA, 507 bp, Stenotrophomonas maltophilia
atgagctacatcaccctcacgcagctggccgagatccccggcgccctggagctggcgcaggtggccacggcgaaggaccagcgccccgtgtcggccgcactgatggacgccacgctgcgcgggggtgatcgtagcgccttcgaccccacggaaatcgttcgcgctgacgcctgcgtggcgcgaatccaagaagcaatcgcccaggccggcgcgctgatcgatggctacctggccaagcgctatcagctgcctttggcacagatggacaccatgctgcccacgtgggcgagaagcatcgtgcgttaccagctccacggcgatcgcatgtcagatgagcgcaccgatcctgttgttcgggattaccgcgacgcaatgaatttcctgcggctgatcgccaaaggcgaattccacctgggcggcgccgacccgaccaccggcaccagcggcctgggcgacttcatcatcaatcccggcaacaaggtgttcggcagggacggccggccgtga

SEQ ID NO: 504641 - DNA, 378 bp, Stenotrophomonas maltophilia
gtggccaaccagcagatcatcgtgaaatcccgacaggagcgcggccgttggcgcgcaggccgtcacttcacccgccagggtgaaaccatcgacgtggctgacctgaagaaaggccagctcgacgccatcaagagtgacccggagctgatcgtccaggacgtggaagccaaggccaagaccaaggttgagccgagcgctgacgaagtggcgatcgaacgccagaaggcagcgaccaagaacgcggccggcaagaaggcctggggcgaagccgaggtcaaggcgcaggcagcggccggtctggatgcagcggcctgggaagcgctgccgccggccgagcgcgtgccgcagatcgaggcgcacctgggcaaggaaggctga

SEQ ID NO: 504642 - DNA, 894 bp, Stenotrophomonas maltophilia
atgcaagtcactcgcggaaatctccaggcgctggaagtagcgttcaacgccgcattcaagcagggcctcggccaggcgccgtctctctatcagcgcatcgccaccgtggtgccgtccagcaccaagtccaacgagtacggctggctgggcaagatgcccggcatgcgcgaatggattggcgatcgcgtcatccacggcgttgctgcacatggctacgccatcaggaacaaggacttcgagctgacggtcggtgtcgacaagaacgatatccaggatgacaacgtcggcatctacaccccgatgatgcagaacatgggcgaagcggtcggcgcgcagcctgatgaactgaccttcggcctgctgaagaacggcatcagcaccgcttgctacgacggccagaatttcttcgataccgaccacccggtcatcgacaaggacgggaagactgtcacccagagcaacatcgattccggtggcaccggcccctactggtatctgctgtgtaccaagcgcgccctgaagccgctgatcttccagaaccgccaggacccgaatttcgtgtccatggacaccgaaaccgatgaagcggtgttcaccaagaaggagttccgctacggcaccgattgccgccgcaacgtgggcttcggcttctggcagatgggctacgccagcaacaagccgctgacggcggaaaacctgcaggccgcctataccgccttcaccagccgtaccggtgatcacggccggccgctgggcctggtgccggatctgctggtcatcacgccgaacctgaagttcaaggcggcagagatcctgacggcgaaccagatctccggcaccgacaacgtgatgaagggcgttgttgaggccctcgactcgccctggattcagtaa

SEQ ID NO: 504643 - DNA, 405 bp, Stenotrophomonas maltophilia
atgaccgcagccacccagggccgcaacaccaatcgccgcgacgctcagcgcgttggccacctcatcaatcccggcagccagatctgggctggcacgatgattgccctcctgaccaacaacggcaacgccgtgccagccggcaccgctgggtcgggtgatgtcgtcggcgtcgctcagagcgatgggttcggcgatggtgatgcccaggccgatgcctggcgcggctacgcgttccacttcgccaacagcgctgccgctgaccagatcacccgcgccgacatcggcggcaaggcgttcgtggtcgatgaccagaccgtggccaagaccgacaacagcgccgcgcgcaaggtcgccggcaagatcatcgacgtggacgccgccggcgtctgggtcctggtcggctga

SEQ ID NO: 504644 - DNA, 1116 bp, Stenotrophomonas maltophilia
atgaccaagccagcccagacccccatcccctccaacgtcgcggtagccgcgtgcagcttcaagttgccgctgagccttgccgatgacggaaccatcgaaatgcagctgacgcctgcaggcgaattccggcccaacgatggccgcgagcttccggtggcggcttggtacatcgatgcggcggttgccgaacgcgtcatcgcccgcttcaacgccaagaacaagccgctcgtcgtcgattacgagcatcagaccctccacaaggaaaccaacgggcagcctgcgccggccgctgcctggatgcgtgcgctgcaatggcgcgaaggttccggcctctgggctatcgccgatcccacggcccgtgcggcggctgcgatcgacgccaaggagtaccgctacgtctccccggttttccggttcgatgagaagaccggcgaagtgctgacgatcgagatggccgctatcaccaacacccccgcgatcgatgacatgcaggcgctctccctgcgtgcggctgccacgttcgcgttccataccgacaccgaggaccacccgatgaatcccttgctcgcagcccttctggctgcactgaaactgcccgccaccacgaccgaggaacaggccatcgccgcctgcagcaagctcggcctgcagttggccacgctggaaagcctgaccaccgagctgggcgtcgatgagggtggcgcactggctgcgtgctccgccctgaagacgaaggcatccgccgcgccggacccgaccaagttcgtaccgctgagcgcgatggaagagatccgtggccagttggccgcgctcagtaaagagcgcaccgacgagaaggtcaccgcattggtcgagcagggtctggccgatggccgcatcctgcccgcgctgaaggactgggccaccgacctgggcaagtccgacattgccgcgctgaacaggttcctggacggcgcccccgcaatcgccgcactcagccagacccagaccaagggcaggaagccaggcggtgaagaagccaaggatgcgcacggcctggatgccagcgagctggccgtctgctcgatgaccggcatcagccccgaggactatgccgccgccaagccgtccgcctga

SEQ ID NO: 504645 - DNA, 552 bp, Stenotrophomonas maltophilia
atggctgacgagccgctgattctgcaggtcgatgcggaccaggcacagcgctggtttggcgaactgcaccgccgcagcgccgatctcagtggcctgatggcccagatcggcgaagacctgaccgagagcacccaggcccggttcgacacgggcatcggccctgacggcgtcgcctggcaaccactggcggacgggtctggccgcacgccgctgaacgcgacgcaccgcaccagggatggcatccaccctctatcgggcgtggactgggtggagatccgcgccgactccaagcaagccaggtggcaccaggagggcacagacccgtatgtcatccaagccaagccgggcaaggcgctgttctggccaggcatgcagacgcgcaccggaaaggacgggaaggagtcgccagggttcgtcaagaaggtcaatcatcctgggctgccggcgcgcccgttcctgggcgtcagcgaggccgacgccgaggccatcgagcaacttgcagtggcttggctggaattggatgccgaagcggggaatttgccccccgcctaa

SEQ ID NO: 504646 - DNA, 1200 bp, Stenotrophomonas maltophilia
gtggctgagatccggggcaacttcggcagcctgcccgaggcggaacgttacttccgcgacaaggtcaatctgccgaccaggcgctggaatgacctctggcagggccagcacgcacgtgcctttgtggttgctggtgccacgcgtgacgccctgctcacggatctgcgcgaagcggtcgacgctgcgatcacccagggcgagaccctggaggactttcgcgcccgattccgcgacatcgtccagcgcaacggctgggtcggctggacgggcgaaggcagccctggtggccaggcctggcgcacggcggtcatctacaacaccaacattcggaccgcctaccaggcggggcgatgggagaccctgcggcatttcccctacctgcggtacaagcacaacaccgttcgcaacccccgcgagcagcacaaggcgtgggacgggatcatcctgccgtccaacgatccctggtgggatacgcactacacccccaacggttggggctgccattgcacggtgatcggtgtatccgaggccaagatgcgggcgatgcgctggaaggtcagcgaacggcctgctgctgtcctgggcgatccgccgccggagtgggcctaccacgtggggcatgcggccaacggccgccagattgccgatcccatcctcgccaaggacgcagctgcgaaatggtccgagctgcctggacggaccgctgcagagtacggccggccggcgcaggttccgctcgatgcggcccaggctcaacctctggcaaccggcatccgcgaccccgagcgcgtgcgccaggtctggcgggagctgtacggggagacctccacgctacgcgatccagcaggcgacccggtgctattgaccgaccaggtaatcgagcactggctggagaagccctcgcgcctggatggtcgggagaagtacctgccgctcctggccgagaccatccaggcaccgttcgagatctgggccaacttcgcccagaacgacgccggcaaggtcggcctgcgccgctactacgtcaagcgggttgaagtgaccgagggtgaaggcgcggcggcgaagcggtacgcgctgactgtgatcgccgaagtgctgcccggtggggtatggggatcgttcgacttcttccggggcaacaagccacagccgcgatcgcggcaaggggtgttggtatggggaaggtcggaaggatga

SEQ ID NO: 504647 - DNA, 1584 bp, Stenotrophomonas maltophilia
atggtgaacacctcccgcatccttggccccgatggccagcccctgcgcattgcccagctggccgagccgcaaaccgcccaggcgatccagctgcagcgtgagttccagggccatccctcacgcggcctcacgccctcgcgtctggccgcgatcatgctggccgccgagcaaggcgacgtcatccggcagtacgagctgttcgaggacatggaagagcgcgacgcccacatctattccgagatgtccaagcgacgccgcgccgtggccagcctgtcctggaagattgcaccacccaagaacgccagcgccgtcgaaaagaaaaatgccgagcagctccaggaagtactggagtcgatggacaacctggagggcatccttttcgacaccaccgacgcgatcggcaagggattcgtgtgccaggagatcgagtggcagcgcctgggcgccgagtggcagcccaagtcgatcctgcaccggccgcagagctggttccagttcaagcgcggctatcagcaagaaatccgcctacgcgttggcagtggcgatggcgaagcgctccagccctacggctggatcacccacacccacgctgccaagagcggctacctggaacgctcggcgctgttccggatcctggtgtggccgtacctgttcaagaactacagcgtcggcgacctggccgaattcctggagatttacggcatcccgatgcgcatcggcaagtacccgccaggtgcatccgagaaggagaagctgacgctgctccgggcgctgatgcagatcggccacaatgcggcgggcatcatccccgaagggatgaccatggatttccctgcggttgccgaaggcgaccccaaggcgttcgagctgatgatcagctggtgtgaacgcagccagagcaaggcgatcctgggcggaacgctgaccagtcaggcggatggcaagagcagcaccaacgccctgggcgaggtgcacaacgaggtgcgcaaggagctgaaggacgccgacgccaagcaggtggccaccacgctcacgcgcgacttgatctatccgctggcgatgttgaacggcctcattccgcagggcgatcgccgtcgctgcccgcgcttcaccttcgacctggccgaaacgaaggacattggcgcctacgcgaccgcgctgccgcccctggtgaaactgggcatgcgcatcagtccgacgtgggtgcacaccgagctgggcattcccgaggccggcccggatgaggtggtgctggtcgacggcgccgaagccgctcctgcaggcgtggccgcgctcactcgcgccggtctggaggcggcaacttcgcaggctgcgcgtggcaaggacagggaagaccagctcgcggccctggtgggtggtgagatcgatccgttgattgccgactgggtcgagaagatccagcagctggtcgatacggccccggacctggaacacctccgacaggggctgctcgatctgctgccatcgatgagcgccgatcagttcacccgtgccatgcagcacgcgctggcgatcggcggcgctgcaggcatgttcgacgcactggaagacagccgtggctga

SEQ ID NO: 504648 - DNA, 1647 bp, Stenotrophomonas maltophilia
atggtcatcgcaaacgccacgcgcccgaaggctgcgccgagcaagacccgcctggcacaggccgtcgaccgagccgatcgcggcgaggatttgctgcgcaacgaactgccggcatcgctcgccgtcgaggtcaacagtgcgatcgacgccgtcctgctgaagtaccagcaggactgggttgccgatgacagcgacctgaaggttgcagagaagagccgacgcgtaggcctcacctgggccgaagcgtcagacaacgtgctgaccgctgccaagtcccgtcagggcggcgggatgaacgtgtactacatcggctacaacatggacatggccatcgagtacatcgaggcctgcgccatgtgggcgcgcgtgttcaaccaggtggccgaagacgtcgaagaaggcgaagaagtcttcaaggatggcgacgatgaaaagtccatcaagacctacaccattcgctttgccagcggcttccgcatcgtggccctgtcctcgcgcccggcgaacctgcgcggcaagcaaggcgtggtggtcatcgatgaggccgcattccacggcgccctgggcgaactgctgaaggccgccctggcgctgctgatctggggcggcaaggtccgtgtgatcagcacccatgacggcgatcagaacccgttcaacgagctggtgaacgagatccgtgcgggtggccgaaagggcagcgtccaccgcatcacgtttatggaggctgtcgaacagggtctgtacggccgcgtctgcatgcgcaagggcgcggtatgggacgtggatgcccaggccgcgtgggtggccagcgtctatgccttctatggctcggcagccgaggaagagctggatgttgtgccaagccaaggctcgggcgcctggctgaccacagccttggtcgaacagcgcatgtacggcgccccggtcctgcgctacaactgccccaagggcttcgagcagcagtcagataacgcgcgccgcaccgccgtccaggaatggctggatctggaagtcggtccgctgctggacgcgctggacccggagctgcagagcgtgttcggccaggacttcggccgttcgggcgatctcaccgtgatggtgccagcgcagatcgagcagagcctgcgtcgccgcatcccgttcctgctggagttgcggaacatgccgcacaagcagcaggaccaggtggcccagtacgtcatcaaacgcctgccgcgcttcatcaaggctgcggtggatgcacgcggcaacggcaacgccgtggccgagttcctcgcccaagagttcggctacagccgtgtcgccctggtcatggcaacggagacctggtaccgcgagaacatgcctccgctgaaacaggcgttcgaggacgacaccatcgctgtcccgcgcgacaaggacgtcctgggagacctgcgcgccatcaagatgatcaagggtgttgcccgcgtgcccgagcgctccaccggcaaggacggtgggcagcgtcacggtgatgccggtatcgccattgccctcatgtactacgccagccgccaccccggcgcggaaatggcatggacgccaatgccacgcagcagccgcggctacgacaccgtcgctcatcacgacgacgacctctctattccggaacccgaagcatggtga

SEQ ID NO: 504649 - DNA, 567 bp, Stenotrophomonas maltophilia
atgactgccccacgtcgcggaaagtccagcatccagcgcctgccgccggagcagcgcgcccatgtggagcgtttgctccgcgaggaccgcctgacgctggcggagatgatcgccgagctgcagcagacgttccccggtgagccggctgcggaagtgtcgaaatctgcactgcatcgctatcaccagggcatctccgccatgacagctcgcatgcgggacattgaagctgccgcccaggcggtggtgggcgagctgggcgaaggtgtcggcgagaaggccggcgcactgctgggccacgccattaccactctggcaaccaacgcggcgctgaaggcgcacgaaagcgacgagacgagcatcgaagacatccgcaagttggcgcgtgctgccaacgacgccatgaacacgcagcgaatgagcgtcaacgtccgccgtgcgatcgcgcaggaagcccgcgaggccctgcagcgagagcaggccgccaagctggagaacgtcgtcaagtcgggcggcctgtccgaagagcgggcccaagagttccgcaagaagatcctggggatcggctga

SEQ ID NO: 504650 - DNA, 306 bp, Stenotrophomonas maltophilia
atgacccacaagacctttgccgaacgcatgcgcgaagaccgccgcctggtgctgctgcgcttgctggccgaacagaatggctaccgcgccaacagctccacgctgcacgcggggctgcaccacatggctgtggcgggcagccgggacgatgtcctgaccgacctgacctggctcggtgagcagggcctgctgcgggtcagcgaggcggtgcccggcgtcctggtggccgaactgacccagcgcggccaggacgttgccaccggcatgacgtccgtgcctggcgtccgccgtccgagcgcgcggtaa

SEQ ID NO: 504651 - DNA, 276 bp, Stenotrophomonas maltophilia
atgaatgaccccgtgatggccgggccgatggtggtgggactgctggtgctggtaacgggcctggtgtcgatcaacctgctggtggggatcgttctgtggtggcgccactccggcctggccgaccgcgtcacaaaactggaggtgcactaccagcatcacctgtcgcgcaaagaagtccagcaggtgttcgagcgcctggcgagtctggagggccagctcgacaacaccaatgaaatgctgaagaccgtccaaaaacatctgttggagaccgattga

SEQ ID NO: 504652 - DNA, 204 bp, Stenotrophomonas maltophilia
atggcgggcgcaaccgagaaggacctggcaaccctgcgcaacgagtacctcgacctggcactgcggtgcagaactgaagccaagaagctgcgcggcgaccgcgccgccgctctggagggccaggcgcgcgcctacgcaggctgcgcggccgatctcttcgacctgatcaatggaaggaaacacccgagtgcaagacgacgctga

SEQ ID NO: 504653 - DNA, 651 bp, Stenotrophomonas maltophilia
atgtcagtgagccggattgagtccaccgcaggaaagctgctggcgatcgcgctgctgctggccaccgcgatcgccgcaggcctgtgggcaggcaatcgctgggccgagggtgggcgcgcgatcaaggaccgcggcgaacaccaggcgtacatcaaggacctggagcagcagctcaccgacctgcacacgcgggccgccgatacggccatcgcctacgcccaggcgatcgaccgcatgaacaccattgccgaatccctggagcacacccgtgaagagaaccgcaggttcaccgaagaccagcgagtggcgctggaaacgttgctggaacgtcgccctgagctgcgtactgctcgcgttggcgctgacgtcctgcggcactggaaccaaagcaaccaaggcaagcccgccaccgccacccccgcccgcgatccaggccagcctgaagcaggaatgcccggcgctgccgatggcacccaacgaccttctggcgaccctgctgggcaaccacgacctggtggcctccctgtatcacgactgcagcgcacgaggccgggcgttgatcctggccacggacgactgggaggcaacggcatggcagtggtactgccgggcgctggagcagtcgcaggtacgagcggcgggctgcggtga

SEQ ID NO: 504654 - DNA, 693 bp, Stenotrophomonas maltophilia
atgaggcggcgcggctaccccgatcgggcactgcgcctgctggtcgcggtggtcctggcattggttgcagtcttggccatcggcagctactgcagcgcagctgccgcagagcccaagcaggcggcggtccgcgttgcccccgcctcggcgctgtaccgccaccgtgttgagcaagctgccgcccgtgcttggggcgtgcatggcagccctgcgcgcctagccgcgcagctgcatcaggaatcgggcttccgcgccgatgcacgctcaccggttggcgcccagggcatcgcgcagttcatgcccaagacggcgacctggatagcaacggtgttccccaaggatctggcggcgttcgatccctggaatgcacagcaggccattcttgcagcggcgctgtatgaccgctggctgctcgaccgcgttgcggtgtacggcggcgggacgatgtctgagtgcagccgctgggcctttacgttccgcgcctacaacggcggtgagaaggccctcaaccgcgagcgcagtctggcctatgcggccggcgccgattccaacgattggcaccaggtcgccaagttccgcgcgcgcgccgactgggcgcaccgcgagaacatcggctatccacgacgcatcctgctggtgctggaaccggcctacatcgcggccgggtggccggggagttctccatgtcagtga

SEQ ID NO: 504655 - DNA, 324 bp, Stenotrophomonas maltophilia
atgcaacccaacaaccccttcctgcgagtcacctcggccattggctcgctgctcgaccgcatcggctacatctggctgtggttcgccatcagcctggtgctgttggcggtggtcgccctgatcaatcccgtgctggtggcttcctacatctgggccgcgtccaagctgacgctggcggctgccatcggctttggcgtggacctgaccgtcttccgtggcgccgatccccggcacctgcaggacggcctggagaagtcgatggcgcaaacgcgccgtgtgaccctgatcgcggcagccatgattgccgcagggttgatcggatga

SEQ ID NO: 504656 - DNA, 504 bp, Stenotrophomonas maltophilia
atgctggcttttgcattgctcgccctggcgagctgcgcgaaccacaacgacagcgccattatcggccaggcctccgcacagtcgccggctgcgccaccgatcaacaacccgatcatcgccgttgagaatctcgatcaactgtccagcgtggtagttgagtccagcgtccaggcggacatctccttcatgcaggccaatgcactgctgcgaaaggaatcgctcaaccccggcccggcctcgctaaacgactttgccttgctcgcgcaggatcggcggaaggacatcgccaagaagtacgcgcttgcgatccgcacgctacccgaatccgacctgcgggaggccatgaaagaggatttctcagcacagatggcgtactacgagaatttccggatggttcacatggacggaagtccgcagtggcaggctggactggcgcatgcgaagcagcgccttaccgaaaccgctggccgggtccgtgttgagatggaactggcagcgccgtaa

SEQ ID NO: 504657 - DNA, 429 bp, Stenotrophomonas maltophilia
atggttgaacagcgcgatctgatccgcatgcccgaaggcgaagaggctgctgcgctcatcgagcgtggcggcatcgatctgcccgagtcgcgttgggcggctcagctggtcgcgctggtgcaggtgatggaactggcattccaacggagcggcgcggatgaggaactggccaccaggctcgccttggcaggcgtcctggcccaggccgagtatgccggtggccgaatgatgtacctcccgcgcgggcagcgcctccgcaatgccctccgcgacgctgagatctatcggcgggcaaagcgcggtaacattcaggaactggcgcgggagtatgggctgacggatgtcagcgtttatcgaatctgccgcgagcagaaggagctgcacctgtccaaggtgcagagtcattttgacttcaaggaacaggggtag

SEQ ID NO: 504658 - DNA, 606 bp, Stenotrophomonas maltophilia
atgaaggcgacttgccccgagtgtggctgtcagggccatatcggcaccttctttgtcgaagaggacggcaagcgcctggccatgactatggccgacatgcccacgaaggagctggcgaaggcggtgctgggctacctcggcctgttcaagccaccgaagaccgccctgcgcctgcagcgagcagcaaagattgcgcaggaggttgcagacctggtcgcaatcggcaccgtatgcaaggacgaacggacgggcgtccgtcgccctgccggtccagcagcctgggcagcggggatcgagcagatgctcgcccagcggtccgcactgtccctgccgcttgaatcgcacggctacctgcgggcggtggtctatgggctggctgacaagcaggacgcggcggctgagcgcaagcgcgaagaggatgcacgctctggcaagcacctttcgcgctcggctggggccgtaggactcgacccctcgccgcacgaagagacgccactgcaacggcagctggcgtggattgcccagatggaggagtttgggcagttcacgaaggaggaagccgaagcggaacgccgtaaggcccacgaaaagcacggagagggatga

SEQ ID NO: 504659 - DNA, 279 bp, Stenotrophomonas maltophilia
atgagcgcaaggcgaaaactggatgactgctgcatcgtgaccatcgggttcgtgcaggtactgatgccagcggcagatggactgaaggccatggcgctcctgcggaacgccgtcgaggtcgagcacgacatggcgcgcgggtatgggaactgggttgccggcgagcggccgcgttgcgaaatgcagatggtcgaaccccgcaacattcgcgcgtcggcggacacaactgcgcctgctgctcggcctcggaagccgcgactgctggggcacgacggatga

SEQ ID NO: 504660 - DNA, 255 bp, Stenotrophomonas maltophilia
gtgagcagccaacagctgtttgaagatgcgatgaagggcgccaccaaggaggcgctgcaaacgacgtttgaacgggttgcccagctgcctccgccgcaggtcattccatacctgacgcagatgacgctgatcgcggttgaactgctgcgagcgggcggccagcaggacacctttgtgcgggagttcctggctgaggcgacgcgcagcctggacaacccgcctttcctcacgatgaaggacctgcgggtcaactga

SEQ ID NO: 504661 - DNA, 429 bp, Stenotrophomonas maltophilia
gtgattagcaaaagggacccgcgacgggcacagatcgccaaaatccatgtggctgccacccaactcgggttggacgaccccacttaccgggacctgctgcgccgtgtgaccgggaaggactccaccgctcgtatgtcggtcggtgagcgcgaccaggtcatcagcgagctgcggcgcttgggcttcaccggagccaagaggctggacggcagggctgcctttccgggccggccggaaacggtcgatgacactccgatgctgcagaaggtcgaggcgctcctggctgacgccggccggccctggagctacgcgctggccgtagccaatcgcatgttcaaggtggatcgcctggagtggctcaaaggcgaccagttgcaccgtctgatcgctgccctgcagatcgacgcgaaccgagggaaaaagacgtga

SEQ ID NO: 504662 - DNA, 723 bp, Stenotrophomonas maltophilia
atgaccgcgcccaacgactcgcgtgtccgcgcgctccgcaagatccaggcatgcctacggctggctgcgtcagacaatccgactgaggccgcaacagcgctccggcaggcccgtgcgcttatggagcagtacggtctgagtgaagcggacgcagcggccgctgaggttcgatcgtccgaggcacccacgggctatcgcggcggagagataccgcaatccctggttgccctggccgacctggtggcgagcggttatcgctgctccctggtgatccagcgccgccgctgcctgggtgtccgctccgggtccgttacggttacgggtaagaccgtggtggagttctacggcaccggctcggacccggaggtggccgggtatgcgttcaccgtgctgcggcgccagctgcagcgcagcagggctgctcacacccgacgcattcgtaagcaggcgaaccgtgatcgtcgcggcgaggagttcgctcgcggattcgtagcggctctccgtcgcctgttctcgcaagaggagatgacgcaggagcgccgatcttcgattgaggcggcgattgctctacgccacggccagctgggcaccacctccggcaaggaaatcagcaaggggcgtgccagcgacaacgaccgctgggcgggcttcaaggcaggcgaacaggcccagctcaatcaaggcgtgggcatgggcacgcgtcagctggaggtgatcccgtga

SEQ ID NO: 504663 - DNA, 285 bp, Stenotrophomonas maltophilia
atggccgctgagaagcccattgcagaggttctgcagctcgcggcggagattgctgatcggacagtccgcagcgacatcgagctgttcgccaaggacgtctatgttgacggggtccagcactacgacctggacgctcccaggctctacgacgaagacgtgtcgatggttcgggacgcgctggagtacatcgatctgcgcggcgaaggcgtcttcccgtgggtgatgcgccgccacccgcaacatcccaacctggtgcggtttgaagaccgggcggtgggcgtatga

SEQ ID NO: 504664 - DNA, 615 bp, Stenotrophomonas maltophilia
atgcaagccgccaccattcctgtcggctaccggcaggacgccaagggcaacctcgtgcccgagaagaacatccgcgccatcgaccaggcgcgcgacgaacttgttgaagagctggtcgccgaggccaagcgcctccatgaggcactggccgcgttcaagctgcgggcgcatgctgacatcgcggcgttcgtccagctcagcgcggagcagtaccgcgttgtgatcggcggcaagaagggcaacgtcaccctgctgacgttcaacgggcgctacaagatcatccggcagattcaggagaacatccgctttgacgagcggctgcaggcagccaaagcgctgatcgatgattgcctgaccgaatggaccgaagatgccagcccggagatccaggccatcatcaacgacgcgttccggctggacagccagggcaacatccgcactggtcaggttctgtcgctgcgccggctgaagatcgaggacgaccgctggcagcgcgcaatggaggccattgggcaagccgtgcaagtggtcggcagcaagtcctacgtgcgcctatacgagcgcgacgacaagggcaagtatcagccgatcaccctcgatatggcgggggtctga

SEQ ID NO: 504665 - DNA, 441 bp, Stenotrophomonas maltophilia
atgatcacggcctcccagctgcgcgaagccttggaggacgtgccagcagcagagcgagcctctgcagtgttcagtctgcaagggcaaggtgagctggagaccgaaggaactggcaatgcggcagttcactcgctgaggcgccctggcgaccaggcggctaccgcgatgcacgtcgcaccattctccgtagaggacggcgtaatcaagatcgccagcccaccggaaaccctggcggatagcttctcgctcacgaccgaagccagtcagcgtggtggccaggatgatccgatggctcttcgcaagcgaatcgagaccatcaaccaggacatccacgaagcgctggtcgatgcctgcagtatcgagctgccacacctcgccatccagcacctgctggaggccgatcgcgccacccgcgccgctgccgaaaccgttgctcgctga

SEQ ID NO: 504666 - DNA, 291 bp, Stenotrophomonas maltophilia
atgagcagttcgaccaaggcaatgcccacctttgatgacctgttgaagaccgcccagggcgccgtgtctcagcttgccggccatggatgcgtcccgcgatccatctcaatcacaggcggcaagcccctgatcgtgatcgacccgccgcgcgaccacgcgttcctggctggcgtgcagcacgtccgcaaaggcgcgggccagatggtccagcgcgcagtgatggccgcaccgttcttcgggtgccagatcgaatgggaagtctgttcgctggccatccagacccgccactga

SEQ ID NO: 504667 - DNA, 219 bp, Stenotrophomonas maltophilia
atgagcgctcagatcccgcgcatcaccgccgacctgatcagtgccctcgcaggcatcagccagctcgatcgcaaggaagcactgccgcagcgctgccacctcgtccaggtcattgccgagcgcgggacctcggtcgatgacctgacggttggcgagttgctccggctcgccaaccaatccaaagcccacgccaacgtacagagagggttccccgcatga

SEQ ID NO: 504668 - DNA, 1230 bp, Stenotrophomonas maltophilia
atgcagacgaacctcgccaccggctaccagcggcgccaagcctacctgcagcgcatccgtaacgagggctcccacccgccccgacaccaggcgcaactgaggttgcgctctggcgttgaccaccgaaagcagcccaaggccacgggacccggcggcagcgtcacccgccggagaaccaagctggcctcactcaaacgcccgccccttccacctgtctccccgctgcacccgcaccactccaaggaaccactcacaatgaacctggctgtcacctcgatcactcccgaagaactgagccccgaacagctcgccgatctgcgcgaacggctgcggatcacgctgcaggaagacaccaacctcagccaggcccgcttggcgagggagtcggatatcagcagcgccacgctctcccagttcctgggcggcacctacgctggcagccagcagaacgtggcccgcaagctctctggctggctggcgtcccgcgatgagcgcatcagcaacggcgctctgcccgagggcccggactatgtgcgcaccccgaccagcgagaagctgcgtgctgtgctgcagtacgcccatatggctggcgacatcgcagtcatcgcgggcggagccggcctcggcaagacggttacgaataagcgctacgccgccgtcaacccgaacgtctggcacgtcgagctgactcctgccactggtggcgtgttgacgtgccttcaggaaattgccggcgtcatgggactgcgcgacctggtcaacaccgccgcctacatccagcgcgccatcttccagaaggtccgcaacaccaacggcctgctgatcctggacgaagcccagcacctgaccgtgcaggcattggaccaggtgcgcgcgatcaacgatcagaccggcatcggcctggtgctggtgggcaatgagcgggttatctcgcagatgaccggcggcaaccgcgcccccttcctcgaccgcctctacagccgcgtcggcaagcgcctgattgtccacaaggcggtgaagggcgatgcggacgcaatcatcgacgcctggaacatcaccgacgccagctgcagggatcagattcgccagattgcggaccgtcccggcgccctgcgcgtgctgaacaaggtgctgcgcctggcggcggtctacgccaaggcgaagaaggaacccatgtgctgcgagtcgatccgctatgcagcgcaggagcttggggtctttgcagcatga

SEQ ID NO: 504669 - DNA, 1995 bp, Stenotrophomonas maltophilia
atggcagacggttccctgccgaatcggggcagcatcgatctggcttcgctggccagcgccctgggcaagtccaagcgcgcgatcgaaatccgcgccaaccgcgaaaagtggccatttgagtcccgcaccgtccgtgggggccaacagcgcatgtttgcggtctccagcctcccgctggacatgcaggcggcggtagctctggcgacgcaggccactgcgccggcagcaaccccgaccgcagcccagcagtccagcgcggaccgcatcgcctccgcctggaagcgctacgaagcagtaccccagcacctcaaagacgaagcgcaccgccgactgcgcgccctgcaggcggtagatcagctggtcgccgatggccggccggtcatggatgcgcgcgccctggtcgccgcgcaactgcagcgcgagaacgttggcggcgccagcgtggccagcctcggccgctgggcggcgctggtggccaaggtcgagaagcaccaccgcctggccatgctggtgccggcctacaccggccgcactgcgcgggtcgaaatcccggccgaggcatgggatctgttcaaggcggactatctccgtgttgaagcacccaccgccagcagctgctatgaccgcttgcagcgcatcgcagccattaagtcggaatggccggcgctgccatgcttgaagacgttccagcgccgaatcgacgcggaactgccgcgtgcagtgctggtgctggcccgtcaaggccaggagaagttcgatcagacgttcccgacccaggagcgcgaccgctctgtgtttcacgccctggaggcggtcaacagcgacggccacaagttcgacgtgttcgccaggtggcctgatggcacggtggcgcggccgatcatggtcggcgtgcaggacctctacagcggcaagctgctgggctaccgcatcgctgagaccgagtcggccgacctggcgcgcttcgcgttccgtgacgtcatggaacgctacggcatcccgtcgaaggtctggctggacaacggtcgcggcttcgcctcgaagatgctcacgggcggcaccaagaaccgattccgtttcaaggtccgcgaggatgatccgaccggcgtcctgaccgcgatgggctgcgagattcactgggccacgccgtaccacggccaggccaagccgatcgagcgcgcatggcgtgacctctgcgaccgaatcgccaagcaccccgcgttcgcgggcgcctacaccggcaacaagcctgacgccaagccggagaactacggcagcaaggcgatcgccctggacgagtttgtcagggtggtcaacgaggaaatcgccgcccacaacgcccgcgaaggccggcgcacccgcaccgctgccggccgtagtttcgacgccgcattccaggagagctactccagggcgccgatccgaaaggcaacgcccgagcagctgcgcgaactgctgctgtccacagacgtggtgaccagcgaccgccgcgatggctcggtgcgtctgtccggcaaccggtactggagcgaagcaatcgccccttacgcgggccagaagctgatgctgcggtttgacccggaacagctgcaccaggctgtccaggcctacaccctggccaacgtctatatcggtcaggccgagtgcatcgcggctgtcggcttcgcagataccggcgcagcccgtgagcacgctcgcgccaagaagaactaccgcaccgcaactcgcaagcagctggacgccgagcgccggatggaggtttccaaggtcgccgcgcagttgccttcgccgatgccagaagaactgccgccggcaggcgttatcgcgcctatgttcggccgtcgcaagacttcgcgcacggaagaagccgaacgcatcgtgcagcagcgtactggcaccgacgacaaccagaccgcctttgtgtcgctgatggaccgcatgcagtccgagcagcagcgcaacagcctctggagcactgccgatggggaggcctga

SEQ ID NO: 504670 - DNA, 456 bp, Stenotrophomonas maltophilia
atgaatcgtcacccccgccaggctttccgcccgcaagacttctttttgagcccgcagccggtggcccaggtacccggaaccatggacttccgcgaagccgtcagcgtgatggtcggccagatgctcgaaaccgcccatgccgctgggctggaccggtacgaagtagccgcccgcgccagccgactgaccggccagcacgtctcaaaggcgatgctcgatggctacaccgccccgagccgccagaccttcaacatcccgctgtggctcgccccggtgctggaagtcgtgtgcaacagcgccgacctggctggctggcaggcggacaccatcggtggccagctgctgctgggcgctgacacgctcgacgccgagattggacggctggagcgccagcgagccagctcgatgaagcggcttcgcgccctccgcaacctgagcgaaaggagtggcgggtaa

SEQ ID NO: 504671 - DNA, 351 bp, Stenotrophomonas maltophilia
atgtcagcaacgaacaccccgagaaaagccagtcccgctaaggactggcatgccgccgacatcgtagcggccctgcatcgcaagaagatctccgtgcggcagatcgcgctactgaatggctacaccaacggggccagcctcaatcctgcgctccgccggccatacccccaggccgaggccctgattgcagaggcgctcggaatggaaccccaggccatctggcccagccggtatgacgccgacggcaaaccgaaccgtggccagggggggcgcaagccgctgctgccccctgatgcaaagcctagcagcctccgcgcaggccgcaatccacaaatggatgcccctcaatga

SEQ ID NO: 504672 - DNA, 423 bp, Stenotrophomonas maltophilia
atggccgctctcctccaggtctcgaagaccacatatggacgctgggagcgcggaatccgcgaaatcggctctgatggcctagcggcgctcgtcaagctgggatggaatgccaattggcttctgactggcgacggcccagagcgcctggattccggccctatccagcgtcaaaacaatgacttgccccagtctcaggtggtgcgccacacgtctgtgaagatcgccgcgcaactgcttcaggaggcgcttgatgacgcaaatgccacgctggccccggcccagtacggcgaggcgcttgttctcctggcgcagctgctggaaaaaggactgccggaggccgaagtgcggccgtttgcccggcagacagtcgggatgatcaccacaggggcaccgaatggagcaacagcgtcaactggtaggtaa

SEQ ID NO: 504673 - DNA, 387 bp, Stenotrophomonas maltophilia
atggataccaccgcagaacatgaaatccaccacctgcacgacaaactgcagggctggttccgtgccgacgtcagcaccgatgcgctggatggtctgatggcccatttctgcgcagacttcagcatggtcggcatcgcagggcggcggctggatcgcgatgccgtgcaggcgctgttcgtgggaggccatggcgcgcgcgccgggttgcagatcagcatcgaggccgtgcaggccgtggaagcgccgtcaccgttggcggtgctgcgttatcgcgaaggccattcgatcgatggcggcacgcctgcttggcgggagtcgctggcggtgctgcggcaggaagccgggtgctggcgctggctggccctgcacgaagtgccggcggcctga

SEQ ID NO: 504674 - DNA, 600 bp, Stenotrophomonas maltophilia
atgatgaccccgtatcccacatccgtgctccccgccctgcgccctgtgtcgcgccgccatctgctgcagctgcaggtggctccggtcacccttcgcccgttccagcgcaccgacctgccgagctggcgcctgttcgacgaccgccgccgccgcggccggcatcttcaacccggcatcgacgaagaagcccgcttcctggcgcacatgcaccgctcgcgccttgagcaggacaacgaccagctgatgctgggcgtcttcgacgacgaacacggcaccgtgctggaccagttgcacgtccgcctgcattcactgcattcacgctgcgccgagctgctgtcactgcagcattggcatccccacaccgatgcgaccctgcgggccctgtgcccgttcctgttcgaggatgtcggcctgcaccgcctgttcgtgatgttgccgcccgactgcggcgccccgtttgcccacgcgcttcgcgcccgtggctttgaacaggaaggcgtgctgcgcgaccagcacctgggtccggagggctggcaggaccgccagctattggcgctgactgcgccgatctggcgcagccaccagcttgcagcgggttag

SEQ ID NO: 504675 - DNA, 1056 bp, Stenotrophomonas maltophilia
atgtccgttgcccccgcctgtgtgttgcctgcccccgaagcaccgttgtcgttgccgcgcccacgcgtggtcatgctgggattgtgggcgctgctgatcgccaccgcggtgccggcggtgcacctgagccagcaaccgggtggtctggttccagcggcgttgttcatcgtcggtgccgagctgccctggatgctggcgacgccagcgctgtgggcggcctgccggcgctggcccttgccgggacggcgccccctgatcggctggttgttgctgggcctgctgctgacaccggcattgactgcgctgggctgggggctgggccatctgctgctgcagctgtggcaggcgcagccgctgccgtcgtcgcgccacgtggcccgagcaatcggcgttaccacgttgttcgcctttcccaccttcatcgcagtggccggtaccggtcacggcctggcctggttgcagcggctgaacgcgcaatcgcaggccctgcgacttgcccgcgaggtcgcactgcgacaacacctccagcaccatttcctgttcaacgcactcaatgccatcggtggcctggcgctgctgcgtccactggcggcggacgcggccctggtgcagttgtcctcgttgctgcgcgacaccctgcaatgcccggcgcaacgtccgctggcggatgagctgggcgctgtacaggattacgtgtccctgcagtcgctgttgcatgacgaggcgttgcatctgcacctgcaggccagcgccgaggccctgcactggccggtgccggggctgctgctgcagccgctgatcgagaacgccgtgctgcatagtggctggcaggcgggggatcctcgtctgcagatcgagctgaaagcggaggtgcagggtagcgggttggaggtggccgtgttcaatccctgcctgcgtcctgcgcgcaacgaaggcctcggcagtggcctggccacactgcagcgccggttggcgatgatcggcggccatgtgcaggccggccacagcggcagcggctacagagtctgcctgttcctgccggaaccgatggcatga

SEQ ID NO: 504676 - DNA, 732 bp, Stenotrophomonas maltophilia
atgatgcgcccgttgagcgtgctgctggtggatgacgtggcattggcgcgtcaccgcctgcgtgagctgctggcgcacattccgccggtcagggtcgatgctgaagcggccagcctggaccaggcacgcaagcacctgcaggggcggcgcttcgatctgttgctgctggatctggtactgcccgatggccgcggctgggaactgccggcgcagcagcctgcactggctgcgcacaccatcttcgtgaccgcactgccacagcatgcgctgcaggctttcgagctgggggtggccgactatctgctaaagccggtcgcgctgccacgactacaggaagcgatcacgcgggtgcgtcgcctggccgggctgctcgacgatgggcaggccaatacgcaggttctggccgtgccggcggtgggtggaacgcagtacgtaccgttggcgcagatcgactacatcgacatggccgggcactatgcgtgtgtccacgtcgggcagcgcctgcatctgctgcgcgagacgatcgcgcggttggccgagcgcctggcgccgggcggcctgctgcgcgtgcatcgctcggtgctggtcaatccgttgcgcgtgcagggcgtggtcgagcgtcacaacggggatgcgctgcttgagctggccgggggcgcgcaggtgccggtcagtcgcagctatcgcaccgccttggcgtccgctctggacgcgcggctgaaacacggttga

SEQ ID NO: 504677 - DNA, 1323 bp, Stenotrophomonas maltophilia
atgcggaaacgagcggggtggggatggttgctgtgtgcgctggcgattccggcgatggccgatgtccgcgttgaggttgatgaccagcacgggcgtgccgatcgtattccggtgatcaaggtcgagggccttgccgtcgccgagacggtgcgcctgcgcctgtcgatgcaggacagccggggccagcgctggcagtcagaggccgtgctgcgtgccgatctgcgtggccaggtcgataccaccggcagcggatcggagcagggcagctaccggggcatcgatgcgggcggactgatctggtcgatgcagccgcagcagaggcgcgccagtgcaatgccgctgaattggcgacgcgcggccgatggcatgggcttcctgccgcagacgttcgaactggaggttgagcgggccggttcggtcgttgcacggcagaccctgcaacgtcacctgatgctgcctggggtgcgggtgcaacgggtcgatatcggcgggcgcgaggcgcgtctgtacctgccagcggacaggcccgcccggacacgagggccggcgctggtgacgctgggtggcgcggaaggcggcttcgagggcggcgaccagtacgccgcctggttggccagcaacggctacatcgccgtgtcgattgcgtggtatcgcgggcccggtgtgcccaaggatctgattgacgtgccgctggagaccgttcgtgatgcggtgcactggcttcagcgacagcctggcgtggatccgcagcgggtcggtctgctgggcggttcctggggcgggatcgcaaccatggccaccgccgtccatctgcccacgctgcgcgcggcggtgtcctgggttggcagcccggctccgttccgtggcattgcgcgcgacgttgccccggccgatttcagggccgtggatcgctcacccctgagttggcagggcaaaccgctggcgtggctgccgtatcgggaggatgtggactggggacggccggggccgcagtgggcgcctgcattgcaggcggcgatgctgccgatcgaaacgatcgctgcacggacattgtgggtgggaggcggcgatgaccgcctgggcgactccggcgtgatgatggccgttgcccagcgtcggttggccgaagcagggcgaggtgatcgcgaccggttcctctactaccccgatgcggggcatctgatcacgccgattcttcagccgagctcccatcgccatgacgtgggtccgttccttgaagtcgggggcaccgccgaaggccatgcgcgcgccgaccgtgaagtgggcccggccgtgctggcgttcctggccgaggcgttgtga

SEQ ID NO: 504678 - DNA, 459 bp, Stenotrophomonas maltophilia
atgagcgcgatgcccctgacccgacgcctgttgcctgcactggcctgcctgctgatggccggcggcgcgcaggcgcagcagcaacccctgaccgggcagatgctcggcggcagcgcaccagtggcagcggccccgcagccgctgcagtccgaggcattggccacggtggaccttgcagcccctgctccgtcggcatcaccggccgccgccccggcgatcattgccaccgaccacgtcgcatccgcgccccgccctgcacgcacgcagatcggcgataccgcgcgcgacctgttccgcctgcaggcatcagggcagcaggcggggcaacgcctgccgatcctcggcgaccaggccacgctgagctacgcccgctacttgaagagcttcgaacacgagatcccggacttcttcgaaaccgatgtcgccaagtccaagggaacatcctcatccggacgctga

SEQ ID NO: 504679 - DNA, 678 bp, Stenotrophomonas maltophilia
atggcccgccactttcagcttcgaatccagcgcgccatctacagaagccttcaggccccgcagtgcaccagccggcgcgccgctgatgccggcggccgcttttgcaccggtatcgatggatgccacctgcgcaccgccgaggccgatgttggctttcgcgtggacatccgcagcaagccccgggacggcgacctgcttcggcgccgtgttcgcggccagcttcacctgcacggtggccggcagcacgtcacgcaccaccggcagcgccgcggtgctcaactgcaggccgacgcgcgcatccgcgctgattgccgggctgctctgggcctggcttgcggcagccgcaagggccacctcggcatcgaccttgaccggcatgggctgggtgtacttggctgcaagtgcctgcagatcacgcagcgactgattggattcggaggcccctgcgtggccactggccagtgcacacagcagggccagggcgagcgtggtgggcatcagcaggaaggcgcgcggatcccgcgcggcactgccaccgctgtcgccggtggccagttcggaggccacgaccagagcattgagctggcggttccatacacgccggtagatgcgattcatgagcacttcccccgtaggcgaacaactggaatgtcagtggacttgccgtttggcaggtga

SEQ ID NO: 504680 - DNA, 537 bp, Stenotrophomonas maltophilia
atgcaccacatcccccgtcccaatcgtttggcgctacgcggcatgcacctgatcgagatgctggtggtgatcgccgtccttgccgtcctggtggccgcgggctggcccgcgctgcatccgctgctgttgcggcatcgcgccgacgccctgcaactggccctgcatgccagtctttccagcgcccgaagcgaagctctgaagcgccgtgaattgatcgggctgtgcgccagcgacgacggtgagcagtgctcactcgactggagcaccggctggatcatctatcgcagcggcaggcatcgggggacaccggcatccgccgaggacatcctgacccaccaccagggccggaccgacatcgcaatcgtcgcccaggccagcagtggacggccgttgctgttcttccagcctgatgggcgcagtcccggcgccaatctcacactacgcatctgcgcaggaaaccggctgcatggcaggttggtcatcaacaatggcggccgtatccgcagcgagcgtgtcgaccgcaccctcccctgctga

SEQ ID NO: 504681 - DNA, 201 bp, Stenotrophomonas maltophilia
atgatcaagacgaccttgaagaccgtgatgctccttggcatggccgtgaccggcctggccttcgctgcagattcctgcgagttctgcaccctgaagtacgagcagtgcctgcgtacatcacatggaccgctgggcaagacctccgagcagtgcctggccgaatacaagctgtgtcgtgaaatggactgcccgtcgccctga

SEQ ID NO: 504682 - DNA, 249 bp, Stenotrophomonas maltophilia
atgaagctgtctgtcctgatactccccctgctgtgcgtgatcagccttccggcgctggcgcagtcctactccgacagccgccacaatcgcgacggaagcgtggacatccgctacagcgatgggtcttccagccgcatcacgcgcgatctgtccaagcgcgtgatcgccgagcacagtgacggcagccgctcgcccaccacctctgacctcagtggccgcaatcgcagcacctacagcgacggcagctag

SEQ ID NO: 504683 - DNA, 435 bp, Stenotrophomonas maltophilia
atgaactggaaacaagcgatttccctcggggtgctgttgaacattgcatccggcgccggtgccgcatcggcgatcacctacgacaaggacggtcgctacggctactcgatgaaccaacgttccttgaccaccgcgatgcagcagtcgctgcactactgcgcagcgcgatcacgcaattgtggtcaatccgccagcacggccaacgaaggctattcggccatcgccacaggcacgattgcgctgggctttgcactggcagagaagacgccggatgctgcgcagaagaaggcagagagaatgtgcagggagcgtgccaacgattgcgtgcttgccctgctgtggagggaagcgccatccgatgagcttgaaccgccggtccacccaggcgcacctgtttcggtgcccgcggccactcccgaccggcgcctgcgatga

SEQ ID NO: 504684 - DNA, 306 bp, Stenotrophomonas maltophilia
atggccgatatcaaccgacgcgtttcatgggcgatggttccgctcgcgctggtggcgctcgctgcctgcagcccgccgggcgacccagcgcagaccgtgcagcgcgatgccgatgcgcagcatgttcccgcacctcctgtcggtgaggcgatggagatgcagccggcggcgccggctgaaggcgtgacccagcccgaagcggtgcagctgcgccggaccgatggcggtggcatcgagatccgcaacgtggacgcagcggacgggcagggggctgacgcagcgcccgccgcacccctgaaaccctga

SEQ ID NO: 504685 - DNA, 390 bp, Stenotrophomonas maltophilia
gtgacggacgtggcccagcctgcggatgcagcgctggccgccggactggaacatctggaacgcgcactgcacaccccgcaggtgcgcggtgaccgtgcgcgtcttgcggcgctgctggatgaggatttcagcgagatcggcagttccggccgctgttacggccgtgaagcggcgttggcggagattccgctggagcgggcgcaggtgcagatcgaatcggagcagtacgcggtctcgctgctgacgcaggacctggcccaggtgcgttatcgcagccgctatcacctcgatggccagccgcagggctgggtgctgcgcagttcgctgtggcgcaggcacgcacaggggtggcgggtggtgttccaccagggcacgcccgaggcacggtag

SEQ ID NO: 504686 - DNA, 1224 bp, Stenotrophomonas maltophilia
atgccaaagaaggtcactcagccactcgctgccgtccagattcctgagctgaggccgggattccatccagaaggcaccgttaccgggctgtacctacgcgcgaccgctatgggagcgaagagttggattctgcgcatcgtcatcaacggcaatcgccgtgacatgggattgggcggctaccctgcagtaaccctcgcggacgcacggaaagcagcccgtaaggcacgcgaagcagttgcaggaggcgcagacccggtgacggaaagacaaacgcgcagaagagcgtgcaaggccatcccttccttccaatggtgcgccgagcagaccattgccgcaaagcgccccgagtggaagtcagctaaacatgccgcccagtggactagcacgcttgctgccgacgcctatcccatcctcgggaagattcctgtagatcaaattgagctatcgcacgtcctggaagtattggcccccatctggacggtcaagaacgaatcagccacacggctacgcgcgcggctcgaagctgtgctggcttgggcaacggcatccggctaccgaaagggggacaaccctgcgcgctggaaggggaatcttgatgccgtcctggcgaagcctagcaaggtagccaaggtgagccaccacaaggcgctgccgattgatgagatgcacagtttcgtggcgtcgctgcgcttgcagcaaggtatggcagcgcgcgcgctggagttcctaattctgaccgccgcccgctccggcgaggttcgtggcgcgacatggcaggaaatcgacctaaatggcgctgtgtggaaggttccagccgagcgcatgaaagccagcaaagagcatcgcgttcctctcagcgcgcgtgccatagcgcttcttaaggcgttgccacgcatggcgggtagtgagcttgtctttccagcgccaaggggaggcaggttatcagatatgaccatctctgccgtaatgcgccggatgcgggttgacgctgtaccgcacggttttcgctctactttccgcgactggtgcagcgagcggactggctaccctcgtgacgttgccgagatggcattagcccacacaatttctaacaaagtagaagccgcctaccggcgaggcgacctgttcgttaagcgcgtccacctgatgaatgactgggagtctttcatcaacctcccgcccgcaaattctgaagtgatcgcacttagaaggaacaaggcatga

SEQ ID NO: 504687 - DNA, 651 bp, Stenotrophomonas maltophilia
atgcgcgccatctgtttcgttcttgcaaccagcgtcttgctgggctgcaatcaaagcccgcctagcgctgcgccgcgcgttgagccttctgagcccgcgcgacctgagccgtccaagtccgtcctggggctagaactgggtcaggatgccaatcttccagagtgtgcaaaaagtagaaattacggctcgatctactatgcgaccttcagcacaaacatctgctggaaagacgtgtcggccagcgacagcaaatcactgaagcccagagagatgccgaaggaaggaaagcttcaagccatgttcccaagcaaggaagtacctaggggagtgtatgacgtcgccgacgttgtcgtgcttggggggaagattgagcaaattgacttcaaaacgctcagcacggctgaccaaacagaagtatcgacgatgctttccagcaagtggggagccccaaaccgcaccagcgtaagcgagcttcagaacggctttggagctcgattctccagcctgcaagaacagtggaactttgctgacttcagcatcatttatatcggcttagtcaatcatgaagaagggttgataagcttccagtcacgagctgcattcgacttggagcaaaagcgtcaaagggaacaaagcgctcagggcttctga

SEQ ID NO: 504688 - DNA, 273 bp, Stenotrophomonas maltophilia
atggatttttccggtgacttggatgccttcgctgccgagcagaaaaagcgcatcgaagaaatgttacgcctgacagaagagaacgctaggtccgtcttagcggagctgctaggggacggggtcaacaccatcactgcgattcggctaaacgctgacactggcaaattctatgcagtggaagcacctacagtgatcattgaagcgctaaggagtgcggggctccttgaggaagagggtggagacgattcggccaccacagagggaaaactctaa

SEQ ID NO: 504689 - DNA, 1017 bp, Stenotrophomonas maltophilia
ttgcctagcgtcttcttttcctattgccacgcagacgaagaactccgcgaccagctcgagaagcagctcgcaatgcttaagcatcaggggattatcgaaacgtggcacgaccgcaggatcgtcgctggccaggagatcgataagacgattgatgagcacatcaactccgatgacatcatccttcttctagtcagtcccgacttccttgcctctccttactgctatgaccgagaaatgaagcgtgcgctggagcggcacgaatcggacgaagcaaccgtcatccctgtcatcttgcgggcctgcgaatggcatcacgccccttttgggaagcttatggctaccccaaccgatggcaagcccgtaaagcagtgggcagacctggacgacgcgttcttgcaagtggctaaatccgttcgcgctgtggcggctgagcatgcacgaaagatgggcgtaaccaaagcggatctagtgcctgcctcagctccgctgcggcttgcccgccccactacgccaaccgaggctaccaaccccgctcccgaagcaactttaggaccgcgttccagcaacctccgattggctaaagcgttcacgcagcgggacaaggatcacttcaaagcggagacttttgaatacattgccaagcactttgagaattcgttgaatgaactccagttgcgcaatccaggctatgagggcactttccggcgcgtggacgcaaatcgattctttgccaccgtctacgaagacgggcatgacgtggcccgggcaactgtctatctgggcgggatgctcggaggcattcactacatgcaaggcgagacgcttgacagcaactcctacaacgaggccctcaccattggtcacgatgaccaaaccttattccttactagcatgggaatgtcggcgtttggctccaatcgcgatcaaaagcttacccagcaaggcgcggcagagcttctctgggagcaactgatcgggccgcttcaaagctccagcaaacatcccaggaggcgctga

SEQ ID NO: 504690 - DNA, 339 bp, Stenotrophomonas maltophilia
atgaaagacggcatttaccacgttcgcttttcgtcaaacatgcagggcgtgggcgtgggcgagggcatcgctgtattcaagggatcgggtgtcaatgggggcgactctggctacacgtattcaggggttatgcagagcaccgacgccggctttacggccaagctgactatcaagcgctgggatccgggttctgaatctgtgtttggtgggctcgaccagttcgagctcgagttccggggcagcgcaactccatcgggctttgttgccaagggcagcatcgtggggcacccggaagctacgttgacagcggaaggacgctacttggtccctgcggcctaa

SEQ ID NO: 504691 - DNA, 756 bp, Stenotrophomonas maltophilia
atggccgccgctctggcagccgcgctgtcgctgagtggccagattgcatcggcccaggaagccaccaagtccacccagcaggcgcaacagcccggcttcttcaggcagctggggaagagcttgaaggacgctggcggccagatgattggagtgaagcccaccggggctgccgctggccaagccaataactaccagcccatctacgccccggtcagcggtgcagggaagctgcccgggctcttcaaatccgataaccaccagctcgcccagcagggccgattggagtggccccgggtcgctttgacctaccttgaatggggcaccaccctgccgtgctggaccgtggaggcccggatttggactagcgctacggactcgaccacggagaccttccggacctgcgccgatgcagccctgacggagaccgacgacttgggcgacaccgccgagctcaacagcgccgcgctgtggaaaggcagggataccttgatgggcgttcgggtgcctgccgccaagcccaacaccggggccagccggtccacaggccccaacccggctagccagccgttcgtggtcaacgtgtctcgccccggcgtgtccgacaaggccgtcgacgtggccctgagggtggcgtgggttgctgccttcatccaaaccgccgacctgcacccgggcgcgtcggggatgctgactccgttcaaggacagccggatgtggatcgcggggttcaagccggaaggcaatcgagaccggtaa

SEQ ID NO: 504692 - DNA, 252 bp, Stenotrophomonas maltophilia
ttgaagaaggttatctggaagctgatgatcttcttcgcttcatgcggttcgctgctttcaggcttcttttggttcatgtccgccagaatccagcgcgagttgatggatgctcccggtgctcccgagcagttctcaaagacgatgttggtcttgtcagctgacatgaactactgggccgcccttggtgctttttgcacaggcgcggcactggtcttgtccgccatgtttgaagattcgaacagcagcgattga

SEQ ID NO: 504693 - DNA, 1056 bp, Stenotrophomonas maltophilia
atgtttatctacgtcgatgaatccggcacgttcgtttctgctgagaagagcaacagttggtgcgtcgttgctgggtatgtcgtcccagaggtggccaggaagcaggtagagcagtcgctggcactgctcaaacggcgcttggggcgcggtatccaagatgaggtcaaactgaaagacctgtcagaagccaacctgacgcgcttcctgggcgagcttggtaagctcgaagcaacgctcttcgtctctgcgattgacctgggtcatcaagacccagaagtggtggtggcgcaccaagcaaagcaggtcgagagcgtaagagccaatcgtccaaacatgctctatgaagagggacgtgcttccatcgatgatctgtcggacaggctggaacgtctttctccacagctctacacccagatggtggcgcaaatcagcctgctggatcaggtctttcgggtagcgacgctttattacgtccaacgcttgccggcgacactaagcagcttcaaatggcgcatggatgagaagaactcggttcgaccgattttcgagcagacgattactcatatgaccccgggcatcatccaggcaaagtcttttcgagaccccggtgtcttcgtggagggtttcgactactcccacttcgataggaactttagaagtgccccccaggacattccagcctacctccaagaagcggttgatcatacgatcaagtccgcggtgaacttgggagcggtcatgcgagattccaagttcgttcgctcgcacgatgttcctggcattcaagtggccgacctgttggcgtcggcctggcgcagggtgctgaggggggagtttgaggacaacgagggcgtcgcgcgtcttctgggggtgatgacggttgaggggcaaacgcccaatccctccatccacctgatgacattgggcgaagagcagttggcggaagggacagcgtatcgcgcggccctgaatgcaaaacggacctgtaggccaatggtctacaagagagcggccaagggccgcaatagccctaaggcaaagccttcagggggttaa

SEQ ID NO: 504694 - DNA, 1521 bp, Stenotrophomonas maltophilia
atgggcctcctcatcggaagaggccccaacgtgacctacaatcagctcgcaaagatcgctgccaacttcggcttgcgagactccatagttcatatctgggcctatagcctgcatgttggttatgggcaccaactccccatcgagtatgagcactctcggccagggctgccgaaccagatcaaggcctacaccttcgagttctacctagatctctacctgagagaagtgcttcagcacgcaggagcctcaaaaggcgctcgctgttcactgcgaaactggcaagacctaggcacgctgcacaacgccatccgtagctacagcgattctaaggcaaggtgtgacctggatatctggacaaccatgcaccgaatcggccaccaacagctgcctcattttgatcgatttggccccgcctactttggacgctactggtcactttacaagcggggtcgcctttcaaacgttgttttcaacgcactgggactgacatcggaggactacttcctgctggccggagctacccaagcgctcttcatgagcagctacgaagtgcccttggccccgcagctcgccaagcttggcctgagtccctcggtggtcgcagcccgagtggcagcaatcactggcacgcccaggctattacgcgaccgatgcaagctggacgctaggtatgattcttcgtgggactacacacccaaccccattgtcgtaaggccgctcatccagctccgcgccgacgcaccagatcaccttgcctgtccgcgaccacagttgttggggaagcgcttactcgccgggctcttttatgacctcgcggacgctgccggcttcgcccaagcttacggcgatgcatttgaggaggtggtaggggattgctttggcctcatccagggcgaaacggcggctgagcgtcccgccccatacgtagtgaatggggcacagcaccaaggcagtgactggctgctgacggataccaacgccaccgtgtttgtggaatgcaagaccatgcgcattcccatcccggcaaagcttgcggctaacccgggcgatctggaggccggcctgaagcgtttggccaaggcagtcgtccagaactatcgcaatattcttgatgcaacgtcgggccgagcaggcatccaagtgctagacggaccgatttattgcctggtcgtcaccctggaagactgggtgctgtttggcgacaagtccgttgacgcgctttcgaccctggtggaaagcgagctcgaggaacggggtatggaagccggaatccaagagcgctacccctttgccgtcgtaggctatgccgcgcttccgcaactggtggattcgatcagccagcacggactgcgcatctttacggaaaagtcgactcaacgcttcaaaggctacctctttccgcagttcttgaaggaggccaagctctccaacgggggagcagcatcctcaatgtttgaacgggagtggcacgacttcatgggaaggctcagagcacgattccccaaggcctccatctcttaa

SEQ ID NO: 504695 - DNA, 147 bp, Stenotrophomonas maltophilia
atggcaaagaacgagcagacgagcccgaaagcggcgaaggccgcgagtggtgttttgcgtgacgatcgaaccggcagcaagtccaagacggcggcaggctctgccctgagccaagcccccgacaagggcaagaagaccaagaagtag

SEQ ID NO: 504696 - DNA, 735 bp, Stenotrophomonas maltophilia
atgacagggaatagtccagtagcgcagggctcgactagttcagccggcccggcgctagacggctaccaatggcccgaggcagtccgtttcataccgtattggggtgacctttactgggagggggtaaacggtcaacgggtgctcttactgggcgagtcgcactacaggcgagaggggctgagcgattcgctcgaagtgacccgaccgttcactcaagatcatttccgcgagatggccaccccgatccggagcggccgggacggccccttctttagggcgctcgacctggtcctcactggtcgacaggacttccaactccaggaagccgccgaagcgtggaggcgcgtggcattcttgaacctttcccaggcgttcgcgggttcgcaggcaagtcatcggccgcggaatcaggctcttcgcgacggtggcgatgttctgtgggaggaaatcctgccggtgctgaagcctaacgtcgtgcttgttctgggccggacagcttggcgactcttcagtcatggtaagccccagccggggttggagcccttctcagccaaggatgtgaaacgaggggagcgaaagcggcgctacattgagtcccgtgaaatctggtcgctcgattaccggggaggctccgcgctgatgacgtgggtctaccatccatcatggaacatagacacgtggcaggatcgcgcgggagcgttgggtcaccttgtggcgcttgcgaaagagagctga

SEQ ID NO: 504697 - DNA, 1074 bp, Stenotrophomonas maltophilia
atgagcgggactgaggaactcaccaaggtttttaggaagacggcgagcagcggtaagctggactacgtccccgtcgtcgtgctcaacgagacgtcgaagacgaagcttcacatcttgggattcttgatccctcacagcgaccacaccgggttcaaggtcaagctcgagggcttcacaaagacgaagggggcatcttgggtagaggacagggaaaagaccatcaatctgaccgaggtgtccacgctcaagctcttcaaataccttcagactcatcttccgttgaccgatcagccagaggctggtgagttcatcctgatcaaggtggcgaacggggccgccgatcttaccgggcacgatccccagtccctggttggcgcgctgaccaaagtgctttctcattcggatttggtccagcatctggccaacacggagctgactcatgagctgaccaccgcgctccggggatctattcgtcttagtgagatgcgctccgcagttgctgagctgcgttccagcctggggcgcggggagtcggctgagcaggtctaccagtcatggtgcgagaaacactgctgggccttcggcaatgcttacgtggtccgggacgaggtgcgtgcaatcaccactggggacaacattgatctgatgttgcctaacgtcattgcgggctatcgagatatcgttgagctgaagcggcccgacatggaggtgcttctgtatgacaaggcccacaagaactactacttttccgccgaggtatcgaaagccatcggtcaatgccaccgatacctagacatgctttacgagtttgctgacaaaggactgcaggaccacaaggaggtcgtggcctaccacccgcgtgccacgatcgttattggtcgctcccatgactggagcgatgagcggcaacgcgcgctccatgggctcaatcggcggatgaacgggattaccgtcatgacctatgaccatctactggcgcaaggggagcggttgttggaaatgttgtcccccgcagcggggcccgaggccgcgtcggtcaacatcgtcgaacttgacgacgacattccctggtag

SEQ ID NO: 504698 - DNA, 231 bp, Stenotrophomonas maltophilia
atgagcgtttcagtgcacaaggatgcgccccacctaaaggtgtgcgaggggaatcccgagtcgggcacgaccccatacatcgcgttcgaggaatacttgaccattccagggcttgaggacgctgatattcgcttggagttcgctaacaagcctagtcttgaagaggtggaggagctgcggcgcaggctgaagagtgctggactggtctttgtggtccagcggaggccctag

SEQ ID NO: 504699 - DNA, 1107 bp, Stenotrophomonas maltophilia
atgaagataaagcttacgaacattccagtctccgaactcactaaagggtataaggacaatgctgaacttggcgtgcgtgggtatgatgggaagctaaacatccgccccgcttaccagcgcgagttcatctataaggagaagcagcgcaacgaagtcatcaagaccgtgatgcgaggcttcccgctcaacacgatgtattgggcggatgctgacgatggctacgaactaatggatgggcagcagcggaccataagtatctgccaatatgttcacggcgatttttccgttgtagtcgacggcaacccaatgtctttcggaaacctaacctccgataagaagaaaaatattctagattacgagctctccatttatatctgtgaaggatcagatagcgacaagctggattggttcaaaacaatcaatatcgccggagagaagctaacgcaacaagaacttcggaatgccatatattcgggaccatggctcacagatgctaaacgctggttctcgaagagtgcggcgccagccgtccaagagggccgagaaaagctcgtaaaaggctctcctattcgacaagaaatactcgagaccgcactagactggcgctcacaaggcgacatcgaaacttacatgagcacctatcagcaccaaaaagatgctcaagatttatggcaatactggcagtcggtattcgcatgggttaaacgcatattccctaatcaggaaagcgcacgagcccgcctcatgaagggacttccgtggggatatttctacaatgcccataaaaatgagacatttaatgcgcaggatctcgaagaacggatttccgctctaatcgaggatgatgaagttgataacaagaagggtatttacgagtatctcctgacagggcaagaaaggacgttaagcctacgagctttcgatgaaaaaaccaggcagaagaagtatgcggaacagcaaggcaagtgccccgtctgcaataagcagttctcaatagaggaaatggaggccgaccacatcctcccatggcacagcggcggaaaaacgaatatcgacaactgccagttgctttgcaagaaagacaaccggactaagagcggcaagtag

SEQ ID NO: 504700 - DNA, 1137 bp, Stenotrophomonas maltophilia
atgaaagtaaaaatagttaaagagaaacctgacgtgaaagccgccagcaatcacacacttggtcaagcgaagtcagctaagcaggatgagttctatactcaacttgatgacatcgaaaaagagcttaagaactacaagccccagcttcgtggcaagaccgtgttctgcaactgcgacgacccgtttgagagcaacttcttcaagtattttgcactgaacttcaatatcctcggcttgaagaagctgatcgcgacaagctattcaaagtctccgatcacgggcaagcagcttccactgctggacatcgagggattgaaacctgaaggcaaagatccctacgcagtgattatcagtgaggtcccggaccacagaaatcgtggcgcaacagacattaccgatgtagagtatcttctaaagcgtaaagcaaatgttgctcataccttggtcggggacgaaaactacgcagccggagattttcgcagcagcgagtgcgttgcgttattgaaagaggcggatgtagtaataacaaatccgccattctcgttgttccgccagtttgtgtctcaacttgttgaacacaagaaaaaatacttgattatcggcaatgtgaatgcgatcacatacaaggaaattttcgatctcattcaaaaggatgagctatggcttggtaagagtatccatagcggggaccgagagttccgcgtccccgatcattacccactcgaggccgctggcacccgcgtggatcaagacggaaggaagtacatccgcgtaaaaggagttcgatggttcactaatatggacttcgagagccgacacgaagatattccgctgtataagagatattcagccaaggagtatccaaagtattacaactacgatgcaatcgatgtaagcaaaactgccgagataccttgcgactatgatggccccatgggggttcccataaccttcttggataagtacaacccgacgcagtttgagattcttggatccagccgcacgcttggcactccaatgtcgcaactcgccgaaaaaggatcatattcaccaggcggccctcggttttatcttcccgaagccaaagggaagttccgaagaatgtatgatcggcttgtaatcaaaagaaggacctaa

SEQ ID NO: 504701 - DNA, 816 bp, Stenotrophomonas maltophilia
atgcctgctgcgcgcaagagagcaatggccaaagaggtagttggtccgactccgcctcaggcgcaggctcccgactggaaaaaccatcccgttctgatcgtcggcggcgcagttgtcgcaacggccataacgtgcctgacgtacttcaatcaatttgcacttccgcagcgaaccgcggccttggagcataaggccagtcaggcgacagaagaggccaataggctcacggacgcgctaggtgtcgagcatgacttgaacaagaagctccaaagagatgtcgcgggtctccaaaagcgtgaaaaagagttgtcagggcttttgtcagagtccagagcaatcaatatgttccaagcgggaagtgcatatccaaatggattttcattggtgaaggttggaatgactgaggcggatgtattcaagtcatatccggttgattcaattacgccaaatgagcgcggctatctgagtgtgaagtttgaaaattctcctttttcatcagccacttactactttgatgaaaatacagagagtaagatcattactcatattttattcatggttaattataagttccggcaaggtcagttggggctcgtcaagcgcatgtcggagaatcttggcaagccattcgtcatcccgcccgactattacgcatggcctgcttctggaaatgtcaatgttttcatgggtgacgacacatcctatatcgtaatgcgccctggatctcgacctgcaagttggccaacagagaaagagaatgagatcgtctgcaaggcggctgcgcaggcgaagggagtctgtcccatcaatcaataa

SEQ ID NO: 504702 - DNA, 408 bp, Stenotrophomonas maltophilia
atgaccaaccgcaccgccatccatccccgcctgcacgccctgatcggcaacatcgccaccgacgtgcctgaagaccttgcgcacgagatcgaatgcgccttgcaggaacagaacctgcccatgcagtcgcccaccttcttcgcctgcctcaacgccatcagccacgccgatggcgaggacgggcagccgtgccgcaacctcaccctcggcgccagcaatcacgcctcgctgcgccgctcgatgtccgggctcagcgcagtgctcgatctgctgcaggccgccgaccgagcgcgtgccgaggccggcccggaagaacagctgggcgccttccataccgacggactgatcgtggccgcacggcaactggtgcgcgaggccaatcactgtctaaacgacggcccgtactga

SEQ ID NO: 504703 - DNA, 1074 bp, Stenotrophomonas maltophilia
gtgggactgaacatcacgccggcattccgcgtggtggccaacaaccaggacatcaccgacaccatcaggtcgcgcttcaagtcgctgcggatcaccgacgagaccgacaacaactcggacatgctggaactgcagttggccgaccatgatccttccgatccgatccagctgccgccggcaggcgcggagctggaagccttcatcggttacgacggtgacgtgcggcgcatgggcctgtacatctgcgacgaggtggagatttccggctacccgggcagcatgaccctgcgcgcccgcgcggcgccgttcgaggccagcaagggcggcaagaacgatctgcagacgcagaagacacgcacctggaagaagggcacgaccatcggcggcatggtgcaacgcatggccggcgaacacggaatggaggctgccgtgagcgggtcgcttgcatcgatcgcgctgccactgacggtgcagtcgcaggagtcggacatgaacctgctgctgcgcctggccaagcagcatgacgccatcgccaagccgggcggcggccgcctgatgttcgtcaagcgaggcgaatccaccagtgccagcggtgagcgcattcccgacgtcaccctgaccccggccgatggcagtggctacaaggtgaacatcgtctcgcgcgagaagaccggcaccaccattgcctattaccgcgatgtccgcggtgccacgcgccaggaagtgaagctgggcagcggtgagccgatcgtgcgcctgcgcatggcctacgccgaccgcgaaaccgccgaagctgcagcgcgtgccaaacaccaggaacaggcccggcagacgcgtacgctgagctacaccctacccggccgcgagacgctgatggccgaagccacggtggtgatgcagggcttccgcgatggcgtggatgggcagtggctggtcaagcgcgccgagcacaacatcagccacgatggctacgtgaccagcatcgagtgcgaacaacccaacagtgccgacgcagtgaaggcggcccgcagtgccgccgccaccgaaggcaagcaggtcggcagcgaggtgtag

SEQ ID NO: 504704 - DNA, 468 bp, Stenotrophomonas maltophilia
atgaagcgcgagttcgtaaccggcacagtggacaagctgctgtcgcagttcaaagccaacgattccggcaacgctccggtgctgctgatgctgggtggtttcaagttcagcctcaacaccgccgtgttccaggacatccagcagagcaacgagtatggctgggcagcgcaggaatgcatcggccagatggctgcgctgcagtacaccgggcccggcaaggccagcatgacgctgcctggcgtcatccactatgcgttccgcggtgccggcaatgagctctcgcagctgcgcaagctggccgcgcagggcaagccacagcggctgctgaccggcaagggcgggaacctggggctgtgggtcatcgacaagatcgacgccaccgcctccggtttcactgccgatgctggaatccaacggcacgaattcaccctctccctgcggaagcacagcgatggcacgaacgtataa

SEQ ID NO: 504705 - DNA, 672 bp, Stenotrophomonas maltophilia
atgcaggagttcctcagcgttgtgttcggttttccgaccctgccgtacagcatcgtgctggcggtatcgctgatctattgggggcttgccgcatttggcctggtcgacgatggcttcggcgatcttggcgccgatggcgccctggacggcggcaacgatctcagcggcctgtcggccctgctgcagcgcttcggcctgggtggagtgccggtcatggtcgtggtcacgctgctgggcttcttcggctgggcgctgacctatttcatccatcttttcgtgctgctgccgttgccggacctgctgcgctggacgatcggcgcggtcgtggccgtgctggctcccctgcctgcggtgccggtcaccgcgcttctgctgcaccccatccgtcggttcctgctgcgcctgcggccggtggcccaggcctcgttgctggggcgcatcggtgtggtcgcctcgccgaaagtggatgcgcgcagcggccacgccaccttcgatgacggtggcgccgggctggtgctgcaggtgcgcagcgacattgaactgcagcgtggcgagcgcatcgtgctggtcgagcacgtggccgcacaacaccattaccgggtggtccgcgccgatgcggtcgccctcgacttccaggacaacctgcttccgggcaacaaggagaatcactga

SEQ ID NO: 504706 - DNA, 840 bp, Stenotrophomonas maltophilia
gtgaccgcaacgacgaccgccgctggcgacggcggcggttcccggcgcttcgtgccgccgccgcgtgcggcggtcgatctgcaggtgtttgaacatccgctgtttgccggcttgcaggacttccgtgatctgctggacggtgcggcatggccgtccattgctgcgcttgatgcgcggctcgcgttgcccggcaagcgcctggtggaacaggatgccgcgctgctggccgacggcctgcattacgaagcgcgcatcgcgcaggggcatatcgccacccgtgccggcaactggcatgacctgttcaatgcgctggtgtgggcctcccatccgcagctgaagcgtgcattgaacgcgcagcaatgccggcatatcgatgccatgccgcccggccagcgcaatcgcgcacaggcggcgctgacccagtttgatgaaaccggcgtcatcgtgcgcgtgcgcgatgaggcggtgctgcgcgcgtgggaccggcatgactggcctgcattgttcgagccgtcatgctggcagagcggtgacatcgccatcgctgtggtgttcgggcatgcgctgatggagcaggcactgctgccggggcgattgctggtcggcaagtgcgtggtggtgcagggcgatgtcgatgccgcctgtgttgacgcggtgaccgcggccattgccgagggcagggcagtgactgatccgctgcagctgcggcccctgccattggccggtactcccggctggcacgccgtgcaggattgcgccttctatcgcaatgccgactattttcgcccgctgcgagcaggacgcgcgtacccgccaccgttgctgcggttgccgttgtag

SEQ ID NO: 504707 - DNA, 573 bp, Stenotrophomonas maltophilia
atgagcatcaagagtgaccgttggatccgccgcatgtccgagcagcacggcatgatcgagccgttcgaggcagggcaggtcaagcaggccaacggcgagcgcatcgtcagctacggcacctccagctacggctacgacgtgcgctgctcgcgtgagttcaaggtgttcaccaacatcaactcgaccatcgtcgatcccaagcatttcgactcgggaagcttcgtcgacatcactgccgacgagtgcatcatcccgcccaacagcttcgcgctggcgcgcaccgtggagtacttccgcatcccccgcgacaccctggtggtgtgcctgggcaagagcacctacgcgcgttgcggcatcatcgtcaacgtgacgccgctggaaccggaatgggaaggccacgtcaccctggagttcagcaacaccacgccgctgccggcgcgcatctatgccaatgagggcgtcgcgcagatgctgttcttccaggccgcggccgatgacatctgcgagacctcgtaccgcgatcgtggcggcaagtaccagggccagaccggtgtgaccctgccgcggacctga

SEQ ID NO: 504708 - DNA, 1041 bp, Stenotrophomonas maltophilia
atgctcggcttcgagaatgtagccgagcatgggctcggctctacaatctgctgcatccaaccacggatgttgatcgtgcgcgcactcctgtccctgggttctctgctgcttgcgatgttgctgttcgctgaagcgaacgcagccccaccaacctggcatccgccgcagggcaccaccgagctgccgttgtggccgcagggcacggtgaaggcgccgccaaaactgaaaggtcccgagcaggttggcgaagcagtttccaaggccagcggagaacgctggacgatgctgcagaacgtggccgtgccgaccctcaccgtgtttccgccgaagggaccggccaatggcgccgcggtgatggtggtgcccggtggtggttaccgggtgctggcgatggacctggaaggcagcgaaatctgcgattggttgagcgcacagggcatcacctgcgcgctgctgaaataccgcgtgccggcgtccggcccgaattgggatcccgactgcaactgtcgcgacaacccgacggtgccgatggccttgcaggacgcgcaacgtgccatgggcctgctgcgcgcgcaggcacagcgctggaacatcgacccgaagcgggtgggggtgatcggtttttcggcgggtggtcacgtggtggcgggattgagcacgcacgcacgtcgcagctacacagcggtcgacgcggccgactcgcagtccagccgtccggatttcgcgatggtgatgtactccggccatctgtgggccgggcatggcaagggactctcgctggtcagggacatcgtcgtggatgacgcgatgccgccgacgttcattgcgcaggccaccgatgatcgcaccgatgatgtgcgcgaatcactcgcctactaccaggcgctgatcgatgcaggcgtgcccgtcgaaatgcatctgttcgcccgcggaggccacgcgttcgggctgcgcatgaaggatgcaccggtcactgcgtggccgcggctggccgagcgctggatgcaggatatcggcatgctgccggaacgccagcggtag

SEQ ID NO: 504709 - DNA, 717 bp, Stenotrophomonas maltophilia
atgcgtccctacacccttgcagcactgctgagccccctgccctgcgcggcccatgcactcgacctgccgccggtgcagtacccgacgctgccggcccaggcggccactgccaccggcttcgtgcccgagggctggacgctggagtccagcatcgaaggcgatctcgaccgggatggccgcgcggacctggtgctggtgctgcgccagcaggatccgcgcaatgtcatcgagcacgatggcttcggcccatcgccttacgacagcaacccgcgcattctcgccgtggcgtggtcacgcccggccggctatgtgctggcggtgcaggaccaccatctgattcctcggccggacaacccggtgatgagcgacccgcttgaagatggcggtgtcagcatccagcgcggcacgttgagggtggcgctgttttccttctccagcgcgggaagctggtcgatgggtaccaccgccttcaccttccgctggcaggacgatgccttcgcgctgatcggctatgaccagaactcggtgatgcgcaattcaggacaggccacctcggtgagcgtgaatttttccacgcgcaaggtgaagcggaccgagggcagcatcgaggacgacaaggaaagcgtgcgctggcagccactgcgcggcagccgccgctggacgctgcagaccgttggtgatggctgggtgttcgatccgcaggccggcggcgactga

SEQ ID NO: 504710 - DNA, 1317 bp, Stenotrophomonas maltophilia
gtgttgaagattctgcgcggactggggtggaccctggcgggcctgctggtgctggccatcgtggtgtggtgtgcctcacgcatgtggccggtgccggaatcgcgattgcaggcgcagcaacggctggaggcgcggctgccggcgaacgggcgcaatggctatccgctgttgtggacactggcctttgacgacctggatgccggtcagcgcgagcaggcgctggccgaggatgtgcggcgctgggaggccgacccgcgcggtggcaacctcaccccgtctcaccttgcggcgaaccacgccgaactgcgcgcgcgggcgtccgccagctgcgggcccagcgcccgcgactgcctggcacaggtgcgggccgatccgcagcggtttgccgaggcccatgccggccatcgccagctgcacgcacggctggacgcgctggccgaagcggaccacttcgtgtcgccgttcagaccgaagggcgacggcatcatggtgccgctgccgacctacgggttgatgctcgatgccaccagtgcacgcgcactggcctatgtgcagggggacatcgatggcgcgctgcgtggcagctgccgtggcctgcagctgggtcgtcggctggtgcccggtggcagctatctggtcgagagcatcatcggcgccagcctggtgcaggccaatgcgcagctgctggccgacatgctggtggaactgcctgccgaccacccgctgccggccgaatgcgaacgcgccatgcagccgatgcgggccgacgagcagagcctgtgccgtgcaatgcagggcgagtacgcgatgagccgcgcggcaatcgcgtcttcggcccaggaatttggcggggtcctggtgctggaccgcagtagtacgctggcgcgcgtggcgggcaatctgggctgggcctgtggggcggcagcgaccgcggcactggaggcggaccgcccgctgccggtagcggcgccgctgcagcatgacttcgggtgcctgtcgaacgtgatgggctgcgtgctgaccgacatcgctggcccggtctatcccgcctattcgtcgcgcacccaggatgccgcggcgatgctgcgcctgctgggcgcgcaacgctggctgcggcagcaggcgggggacccggtggaggcgctgcaacggttgccggcgcagtttgcctcgccggtgcgggcgccacagctgtccgccaacgggcgttccctgcaggtaccgcgtcgctcgcccacccgcggcaacgacgaaagcccgtggctgtcggtgccgttggcggccggcgccgccccaaccgccgctgcccgcgactga

SEQ ID NO: 504711 - DNA, 147 bp, Stenotrophomonas maltophilia
atgcaggacagcaagccgacatcacgaagccccctcaggatcatcctttggagcctcatcgccgccttcgtgctgttctacggcggctatcatctgggcaaggacatggcgctgcgtgacaacgcccgccaagcagcaggcaagtaa

SEQ ID NO: 504712 - DNA, 1164 bp, Stenotrophomonas maltophilia
atgtctgctgctgttttccttcgcccccgcgctgcgggctggcgttccctgctgttgctggccctggtctcggccagcctgccggctgccgcgcagtcgatggcctgtggcacctacaaggacagcagcggcaacaccacgctgaccctcgagagtgaaggccacggctccctgtccggcccctaccaggccaccgagaacctgcgcatcgcccgccaggaggacgtgctcggtaccggcaacctgtccaccggccagctggagaactggtacttctcggacaacgaccgcacgatcagcacgccctatcgcgagttcacccgtgagcgcgccgccgcctgcaaggcgatgccagagcccgtcgaagacggttgcgtgatgaacacctccgagtgcctggaggcgctgccggaggccgcacccgtgaaactgcacgcctggtgtgccgagggcgtgggcgcagcctgcatgcggttgctggagacctaccaggaacacgccaacgcagcggcaccgaaagtgacggacccgccgatgcctgagatctgcaaggaggaatcaccttccttcgacgccgaaggctgcatggcggcagccaggaaggtcgcctcgcagatggcaggggaggcaatgctgggcctgcggcattcggtcgatgcgcccttgccgccggtgcagctggatgagctggcggcactctgccgcgaacaacacggcgagaccttctgtgaagcggcggccgagtcgctgtggagcggcgggcgcctgcagcaggcccgcgaggcattgcagctggcctgcgcacagcgcgcggatgcgccgtcctgcggaccggccaaggacctcgctgttgttgccggtgcaaccgcagcggcactcgaaccgatcgccgccaccgccctgccctgcggcagctttgtcgccgaacgcagcgtgctgtcgcagctgcgcttcctcgatggcggcatcgtggaagccggtggcgaggacgtgcgcctgcgcgcgagcctgcgcgacggccagatcgtcctgcatcgcgatgtcggcagtgacttcgttctgcagctgctgcagaacggcaatctggtgggcgtcgacaacggcaaccgcttcgcctactacgagcgcaaggcgactgcgggcaacgtccgctgcactccctga

SEQ ID NO: 504713 - DNA, 1182 bp, Stenotrophomonas maltophilia
atgccgctagatgctccgcgcttgcttgcctggtcgcccgtgaccggtgcccttctgctgttcctttccttcccaaccttggcaaccggggtcgcgtgtggcgtcttcagtgacgagtacggaagctcgaagcttgttgtcgaggcaccggatagaggacatgcaatctcccacgatggaagtcattcccgattcgcgctgcaacaatccggggacgacatgatcatcatcaacctcagcaccggctatgcccgctccgtgggtgcagatcagagcggacaggctcttcacgacgatggaacgcactactcgctgatcgaaccgtcgcagtgctcggccgcactcaggcatcccgcagacagctgtctcgcagatcccaagcaatgcgtggacatgcggcattccatggaaaccaccgctcttgagaatgcatgtgcggaaggcgtgccctacatgtgcatggcattgccggagaagtacatcgagcatctgatcgataccggcaccattgctccgccgggggaactggccaccagaatgcgggcgacgctggagaggcagctggccgcgatgccgctgcccgccgagtgcctggatcccgacagcactacctcggggccagcgtgtctggctcagctcgaggaagaacccgagctgttgagttcattcaggaacgcgattgtcgccgcttctttggggctgcatgcagccactgtggccaccgccacccttcccaaggatcacagggaaacgttgcatgacttctgcacgaagacgcctgatggtgcgttctgccacaaagttgccgatctgcatgcttcggcaggcgaccttggacgggcaacggaggccctggaactggcatgcaccggtggtcggagcctcgactgcgcattgctggaaccacttcggggactgggcccggacctgcagccagccaagggcgtggagcttccgcaaggaacgttcgtctcttcgggcggcatcataagctccctgaccttcactgaagacggcagtgtctccgcgccgttcggccaactgcaggcccggctggaaaatgaccgcatccatctcaagcatgcaagggttggagagctgatcctccagccgctgctcaacggagatctgctcggcatcgggcagcacgttggattcgactacttcagggcgaccgagtag

SEQ ID NO: 504714 - DNA, 1122 bp, Stenotrophomonas maltophilia
atgcgcttgctggctcttctccctgcactactgatgttcgccgcactgcctgtagccgccgacgcgttgcactgcggcgagtaccgcagtgccgatggcggcatggcgctggtgttcaccacccccagcaccggctaccgccacaacgacgtcagcgagccgcagccgctgtgggttgatcgcagtgcggcgcagacgcgcctggtcatgctcgacgatggcgtggcagagccgatccggatcagtgcagacgggcaacgcatcaaagacgatgtgccgttggtctacaccctgcgccagccccgcacctgcgccgccgagcccagggcgattgccggcagctgccgtgccgctggcagccactgcatcgcgcagctgcccaccgcttcaccgggccaggcccagcgcgcctgcagcgaaggcgttggcgcgggctgctcggcgctgttgcgacaactgcgcgatggcgtaactgcggccggaaacgatgacaccggccccgcgcgctttgaacgcccgcccgtctgccgcgaacacacacccggacatgacccgcaggcctgcgaggcgctgacccacgatgcgctggctgccgccatgcagcgggtaagcgaacgcctgcaaagggaagacgaagacacgctggatccgccgctgccggccactgcacgcgaacgtctgcagcagctgtgcctgcagcaccgtggtggccgcttctgcgtggaagcggccgaacagcagttgaacgcactggagcctgcgttggcggtgcaggccctgcaggtggtctgcgatgctgggcgcgtcagcgcctgcgaacgtgtcgcaccgctgcgcgatctccgcgccgagctgcgcctggtgccggcccagcaggtgccctgcggtcgctatcaggccgatggaggcgtgatcgacatgctcgacttcggcgatggcacgcgtggccgcttgcatgatggcgccatccacctgcagcagaacggtgaaccccttgtcctgcgccagctcggcaatggcgacctgctcggcatggatgcgcagacgggatatcagcgttaccagccggtgcccggcacggcacaatgcacacccccgcgcgagggccgcggttcgccgtag

SEQ ID NO: 504715 - DNA, 558 bp, Stenotrophomonas maltophilia
atgtcagtgccgcttccacccccctcgttgcagccttcgccctaccacgcgtggattcggccgctggtccaggcctccttctggctgtccgcactgctgaccggctacttcgtactgcaggggctgctggtatggccactgcacgacgttccactctggcaactgctggccggtgaagtacagcatcggcagatgcacagcctgacctggctgctggcacaccctgtgggtgcctcgatgatcgccgcactgctctgcctgctctcggccgtggccagccggggcctgctgcgggagcgccgctggggcctgtggagcttcgtggtgatgctgctgttgagcgcgctggccaatttcgcgatcacctggtggctggacgtgttcatgcgcgacatgatcgtgctgcttgccgacgatccggacatgcagcaatcgctgcagccgcggcgctggatgatgaccttgaccctgctcggcacgtcggtcctgttcctcggcctgcagggctggctggcctggcgcctgctgcggcaggatatccgctcgcgtttccactga

SEQ ID NO: 504716 - DNA, 777 bp, Stenotrophomonas maltophilia
gtgctggtgttcatccttcttcttctgctggcatgtgctgcactgatcgcctcacgccgattccgcaccgcggcgctcctgtcggtgctgcccttcatggccttgtccagtgcaacgggcccgatcacgcaatggatgctcgaccgggcccaggccagccctgcgttcacgacacctgcagatcggccgaagacaacgatcgtgctgctgggcggtggcatcgagcaccatcccgagggctccagcccgggactggcggggtacagccgattgctggtgacggcgcagcgctatctgctctgccagcggaagtacgagatctgcagggtgatcgtgagcggaggtgcctcaagaaaccgtaagaccagcgaggcctacgtctacgcgcgcgagctggcccgtctgggtgtgccgagggatcgcatcgagcaggaggacgccagcgccaacacctgggagaacgcccggaacagcagcgcgatgctccgccacgatccatcgcgcgtggtgatcgtgacctcgggtcttcacctcaggcgaagcctgctttatttccagcatttcggcgtgattgccgaaggcctgcccagcgaccgactacgcgccacgcccggctggctcccctcgaccttcaacctgctgctggccgaggtgatgttgcacgaacgtatcggcgtgattcgttaccacgcctacaacagactggggtggaacgaaccgccgatgccaccgatccccttcaatccacagacagccacccacgcatcgccgcactga

SEQ ID NO: 504717 - DNA, 1746 bp, Stenotrophomonas maltophilia
atgtccaatgcccgctctggcctgctcgagcctggccccgacgccctgctccaggcggcccgctcactggagatgaatcgactcgcattgttgctgtcctgcctgcaggagccgagggccagtctgttcagggtggtattgcaggcgctgacggtgttgtggtgctggctctggatggatggaccgcaacccgtgctggccaacgatgcggcgagggtgttgcccgcgtccattgcgctgcttttcgcttccgtggcatgggcggcgtgggtgaatctgtacaaggaccgcggtgtggcatggcgcgacgcggcgggcctgcttctgagcctgatgatggtcaccgtgcaggtcgatgcggccttcattcttctgatgacgctcaatgcaaccttgcctttcctcgtgatcgcagcgacaacggtctacgggcggaaggcaatggctccggccatcgctgcggcgacgctgggcctgctgtgggctgcgcccgagggttactggacctcgcggccggcgtacctggcgtacgccttggcgctgactgtcctgctgcctgccgtcgtcgccaccatggtcgctgccatgcgcgatatcgcactgcgtgccgtcgcctcgcgtgaggcccaggggcggttcgtgggaacgatgagccacgaactgagaactcccctgaacgccatcatcaacggcatccagttgctggacatggagaccgccacggcggcccggcgcggcgcacttgcgatggtggcccgtcaggcgagagcgctgcggcatcgcattgacgatgtccttgatgtggcgagtatcgagggtggaaagctgcggcttcgtccccagccctgttcgttggcggccacgctcgatgcaatgcaggaaagctgcgcagcggccgctgcagagaagggcgtgttgctgacggtcgatgagtgcgatcctgcggtgtggatgctggccgatgcgggccgcatcgaacaggtgatcagcaatctcgtctgcaacgggatcaagttcagcccgatgggtggggaaacccgagtgcgtgttgattgcacccgaatcgatgagcaatggcaggtgcgtgtcatcgtctccgattccggccgcggcattgacgagagcgatcaggaatcgatcttctcgccgtttgtgcaggtgagcgagggggatgcacgttgcgagcagggggttgggcttgggctctacatcgtgcggctgatttccgatgccatgggcgcgacgatcgaggtgggtcgcagtgcgtggggcggtgcctcgttcacgtggcgcttcactgctcccgccatcatcggcgaggcatcgtcaccgtcgcttgaggaggttttcaaggcgcattcgagatcggtgcgatccctgcattgcctgctgttcgaagatgtggagaccaaccggcaggtggtcgagcggttgatggaatgcgcgggccatcggctgagttgccggaacgacgggcgcgatgcgcaggctgcgatggcctcgcttgcgccggacgtggtgctgctggaccttcatatgccgggttgcagcggttgggacgtacttgaagcgatcggctccagaacggaagatccgcccatcctggtgatgagtgcggacacgcgtctgcaggtcatcgagagggcgcgttcaatgggcgctgccggcttcctgtgcaaaccgttggacgtgcacgaggtgctgcggatgctgcatgaggtggggtcccggggatccattcagtag

SEQ ID NO: 504718 - DNA, 486 bp, Stenotrophomonas maltophilia
atgcacgcgtggtacctcggtggcatcgaccaccgccccttcctgcccctgttcgagatgagtgacaacgcgctcgctgcactgggaatccagcgtcgctgggcgggcgattcaggaggacacccctgccggatcagcctgagcgatcctccctgcggcagcgaactgctcctgctgtcccacgtgcacctgccgttgcactcgccgtatcgcgcctccggcccgatcttcgtgcagcgcggcgtgacccgttgcgtactgcctgccggggaggtgccaccttatgtgcagcgccgcatgatctcgctgcgtgcctacgacagcgcagcgctgatgcgcagtgcgcaggtctgcgccggcaccgaggttgccacgcagctggacacgatcttcgccgatccagcggtggccttcgtccagctgcacaacgcggcacacggctgtttctcatgccaggcagatcgggtcggcaccagcgccacgtag

SEQ ID NO: 504719 - DNA, 1524 bp, Stenotrophomonas maltophilia
atgcaaagacaccacctcgcgctggccggaatgctggccagcctgatgcttgccggttgcaaccaaacgtcgtcggtcgacgcgaagggcagcaccgacgcgcccaaccgccgcttcggcacgatcggcttccagccctgcaccttgtccaccgtcggcgccagcgccaacgtggaagcccagtgcgccaccctgcaggtgccggaggatcgcgcccatcccgaaggccgcagcatcggcctgcgcatcgcctggctggaatccggcgacggcagcagccagcccgatccggtgttcttcctggccggcggccccggccaggccgccagcgaggtggccgtcgttgtcgataccgccctgcgccaggtgcgcaagcagcgcgacgtgttcctgatcgaccagcgcggcaccggcggctccaacccgctcagctgcctgggcgccgacggcaaggaactgcagctggacgaagacgccgcgcccaccgaagcggtgatgcgcgacttcgccacgcagtgcctggcctcgctgaaaggccgtgccgatccgcgcttctacaccaccaccgaagccattgccgatctggacgccgtgcgccaggcgctgggcgctgaaaagatcaatctggtcgggggttcctatggcacccgcgtggcccagcgctatgccatggcctacccgcagcacacccgcagcatcgtgatcgatggcgtggtgcccaacgatctggtggtgggtggcgagttcgccaggaccttcgacaacgccatcaccctgcagtcggcgcagtgccgcaaggatgccgcctgcagcaagcgcttcccggtggatacccgtgaacagctgcgcagcgtggccgacaccctgcgccgcacgccggtgacggtcgattaccgcgaccccggtacgaacgcgccgcgccaggacgtgctttcgccggacagcgtggtgggcctggcgttcgccttctcctacgtgcccgagtactcctcgctgctgccgctggtgctggatgaagccgcacagggccgctacgtaccgcttgcctcgctggtgcgtggcgccacccgcagcatggatttccagatcaatcgcggcatgcagtggtcggtgatctgcagcgaagacgcgccgcgctaccaggccccgcctgaaagcgatgacgcgctgttcggtgccgaagcagcgcgcgcgttcttcgctgcctgcccggtgtggcctcaccagccggcgccggccgccagcaccgcagcgctgaagggcgatctgcccgtgttgctgctctccggtgaactggacccggtcaccccgccgcgctacgccgagcaggtgctcaagggcctgcccaacggccgagcgctggttgcccgtgggcagggccacggcacgctcaacgccggctgcatgccgcgcctgcttggccagttcatcgacaccacccaggccaaggcgctcgatgccagctgcctggacacgctgagctacgtgccggcgttcacctcgttcaacggatggaccccatga

SEQ ID NO: 504720 - DNA, 792 bp, Stenotrophomonas maltophilia
atggatatggtagatcagacattcatcgcgttgatcgatcccaccctggcggacgccggcgatggtcccgcggtgctgtcgtcgcaactgcgcgcaaccggacgacgccgtacagcacgccaccggcatgtgcgcggccagctgctgggtgcccaccacggcgtgctgcgcatcgaagcgggggatctgcagtggctgcttcctgcggggcacgtcgcatggataccgccctcgctgccccacgcactggcggaggcagaggagttcgatggctggagcctgtacttcagcgctgcggcctgcgtggaactaccagcgataccacgtattttccagcccagcacgctgctgcaggcggcgacggcgcgggcgctgcaatggccccatgcgccactggatgctgcgcaggcacgcctggccggcgtgatcgccgatgagattgccgccagcacgccgctgccgctggccctgccacaaccgcgtgaccggcgcctgcgccagatcgccgccgcgctggctcgcgcgccgcacgacaaccgcaccgtcgaggcctgggccgccagcagtggcctgtcgggccgtagcctggcccgccactggctggccgagaccggcatgacgctgggccagtggcgacagcgactgcgtgtgctgctggcgctgccacgcctgctggtaggtgatccggtgatcggtgttgcgctgtcgatggggtacgacacgcccagcgccttcatcgccgtgttcaagcgcgagatgggggtgacgcctgcgcggtatggggaggggtga

SEQ ID NO: 504721 - DNA, 591 bp, Stenotrophomonas maltophilia
atgcgcttcggcctgatgcttttctcatgggtgatcgccgcacctgtactcgccggcgaatgccagttcgacaatcgcgccgaactgctggcgatgccacccgatgcattcaatcaagggcccggggagggctgggacgcacttgtcgagcgcgcaggctgccagttggaactggctgacctgttcgccgcataccggcgccaggccaaggcaagcggccacccagagctggcctggcacgaggcgcaactgcgtgcctacgaggggcaacgcgatcccgccagcgcactgatgcggttgacgtacaagcctgccgacgccgatccggagggttggaacctctacgtggatgcgaccatcgcctttctggatgacgacctgccggcactacgacgtgcgcgcgcgcgcttggccgccctgccgctgccacccggtaccacgctcagggaagggatggtcgagatgcgtagcgcgcagggcctgcagcacgtcgcatggccaccgcggctgaaggcggtggacgacctgatccgctgcatgtaccagccctacgcactggcgtccgactcatgcccgcagtcgcaggactga

SEQ ID NO: 504722 - DNA, 297 bp, Stenotrophomonas maltophilia
atggatgccgcggccaagcccccatggatgggtttacggcgtctcccgcaaccggatccaccccgcctcccacaggaagccagcttttgcttcggctgttgctgttgctccggcttgcagcaggtgcagggcgcagccctgccgaaccaccctcactccgcaacgtgctcgacctgccgtggctccggcttggtatcgggcagctgccagaagatcatcgtcgaggtcagggtgatcgcgcccacgcacaggaacgtggcatgcagcgcggcggtcgcgctgttgctgtccaggtga

SEQ ID NO: 504723 - DNA, 636 bp, Stenotrophomonas maltophilia
atgaatccagaaacgctgcttgatgctttccagaatgcacacaacgaatacttccatctgctgatgaagcattacccgtctggcagaaagcagggccatgacgacgaattcggggcaccccggctctacgagcttgcagtggaggttcatgcatgctcgattgcattgggcccaacgccattgaaacgattgtgtgcgctggggctggagcaactctacccattcgacaatcccgtggatatctacacgtggcgagtcgaagtaagacaaaagaagatcccgcacactctattcgcatcaattgccattcggatcgattccgaacttgccagaatgcgtcggctactcgaactgaccccagatgcgctggtcaacgagcttctgcccgaccggcagttcctgcgtcacagcggcgaaccatttttccccgaatccaaggctgaagcgacgggtacagcacctgcgtcaatggacaatgccgccttggggtcggtgatgtacgtcggcagtatccacgtgaactcggcaccagagcatcaagccgtgaacaagctggaacgcctggagaaaaccacggccatcggctcgcactcatccaccatcatcaatgcgattcggctgttcttcggcacctag

SEQ ID NO: 504724 - DNA, 594 bp, Stenotrophomonas maltophilia
atgagcggcagcgacccgaagcgcttcgacgtggcggagagctcgccgttccgcgtgctgtgggtggtcctgccgctgctgctggccttcgccatcagcgtctacgcgcagcttcacaccgcccgcgccaacgcgccgtgggtggaagtgaccctgtcgccgccgtggttccgcatgggcggcagcgcggcatggagcctggcggtgatcgccgcgctcggcatcgggctgggcctggccttcttcaggcgccgggttgagttcgatggcgacatgctggacgtgcgttcaacgatgtaccggcgacgggagccggtggcgcagctgcgcctggaccaggccgaggtggtcgacctcggccacgatcgccgctacggcatccgtttcaagaccaacggctattcgatgccgggcttccattccggtcatttccgcctgcagggcggtggcaagggttttgcgctggtcaccgaccgcagccgcgtcctggtgctgccggtacgcgatggcagcaccctgctgctcagcctggaccggccacaggcgctgctggaggcactgcgcaaggtggccgcaccggcaccgcagcagtaa

SEQ ID NO: 504725 - DNA, 1290 bp, Stenotrophomonas maltophilia
atgtcccgtcatcgcagactgatcatgttgtcactggctctgctcagtgccccggccttcgccgctgaaccacaacaggtggccaatcggctgcttgaccacctgcaggccggccagatcgccgacgcagaggcgatgctgaccacgcagatggccgaggccgttcccgccgacaagctgggcgcgctgtggaagtcactgggtgacctgcaggagcgaggtgcccccgaagtcagtacgcagcagggcatgcacctggtggtagtgccactgaagttcgccagcggccgcgtcaatgcgcaggtagcggtggatgcacaggacaaggtggccggcctgatgctgcggcccgccgcggccgacaaggcaccaccgccaccggccgatgcccgctacagcgaagtggacttcagcgtgccgcaggcgcgcggcgccctgtctggcaccctggcactgccgaagggagaaggcccgttcccggcggtggtgctggtgcatggctcgggtccgcaggaccgcgatgagacgatcggtggcagtcgcccgttcctggatgttgcccgcggcctggccgcccagggcatcgccgtgctgcgctatgacaagcgcaccttcgcccgcccgcaggatttcgccaatgaccgcttcaccgtcgatgacgagaccacgctggatgcggaggctgcactggccagcctggccgccgacccgcgcgtcgaccgcaagcgcgtgttcgtgatgggccacagccagggtggcatgctcgccccgcgcatcgccagccgctggccgcaggcgcgcggcgcgatcctgtgggccgcacctgcacgaaccctgctggaactgctgccggaacagaaccgctacctgatggcactggacggcagcatcagtgcgcccgagcaggccttcctcgaccgccttgacgcccagatcgccgcagcacgcagtgatataccggcgccagcgagcgaactgccactgggcgttcctcaatcgttctggaagagcgtggaggcggtcaacgcacgggccgatgcacaggccctgcacaagccactgctgatgctgcacggcggccgcgatttccaggtacccgatgccgactgggtgctgtggcaaaaggcgctggccggccgcggcgacgtgcagtggcaggcctatccggcgctcaaccacatcggcattgccggcagcggccccagctcgctgcaggaatacgcgcaaccgggccatgtcgatgcgacgctgatcgatgacgtggccacctggatcaaggcgcagcgatga

SEQ ID NO: 504726 - DNA, 720 bp, Stenotrophomonas maltophilia
gtgaagcggcctccttccacccgacgggtgttttcgctggtgctgctggtgctggccggcgtggccgtagccggcggtgcactgggaacgatcgccgaaacgctgggacatccgctgcagcccgaccgtccgccgaggccatctgaatcgcaaccgccgcgcgagcaggccgactcactggcaacggcgcccggactgcagtccgacccgataccccaccgcagcaaccggctgttcgattcggagtacctgctgggcgcacgccaggcactggagcagttgcctgcattgtccggacaccggctgacggtgttccacagcatccacttctacgacgatggccgcatcaatctggacctggtcgatccgcagcagccggaccacgtcgacagctaccacttcgaacgtggccagtggcgcaagggcaatccggtgaacccgcagcagttcgcgccgaccatcagcctgcatcgcagcagcacacccctggccaacatcgatttcgatgccgtaccacgcgtggccaaggcactgcaggaacaacgcaacgcattgcagaacccggcctcggaagtcggccacgtctacgtgatcgtgcgcaaggctggcaagctggcatggctgccggacgaggttgcaggcgaccgcgaatcggcacgcctgcagttcgatgcacagggcatcgcgcgcagcgtcaaaaaaggggacggagggaattaa

SEQ ID NO: 504727 - DNA, 291 bp, Stenotrophomonas maltophilia
atgcctcaatcgactcacaactccgattaccagcttttgctagccgtcctaaaggcggctcgtaagcgcgcgggagtgtcgcaggtcgatttggctagccgactgggcaacacacagaccttcgtctcgaagtgcgagcgcggtgagaggcgcattgacgccgtggagctggtcgagttcgccgaggcactcggaattgcaccgcagaacctacttgccgagtacctggatctgcgcggcggcaaatcttcagcgaaggcgggcaaaggcaagaagtcgcgcgggaactga

SEQ ID NO: 504728 - DNA, 291 bp, Stenotrophomonas maltophilia
atgacggccgctgagaagaaggcgcagcaggagaagtggttcggcgccgagaccattgtggctgccgagcgagcggtgaggcgcgaactgaaggacccggacgccgcacagttccggggcgtgcgcgccaactacaccgaggagttcggcgtggtcgcctgcggccgggttaacgcgaagaacgaactcggcggatacaccggcttccggcgcttcgtgttcggggatgaacgagtgatccttgaaggacgggacaatgtcgcccaagcatggacggaagcttgtctatag

SEQ ID NO: 504729 - DNA, 618 bp, Stenotrophomonas maltophilia
gtggtgaaaacctacatcgaactgattactgcaaaccagtccagtgcgcttgaagagattcaggctatagagaccctggaagatctcgccgagttctttgatggagcgtttgcccctaattctgatgcaaggctctttgaggttgcatcttatgtggcgctggccgagcactaccgaggacaaacggtgctcatcggttcatcagcagacacgctggagcgcaagccgcttgctttgtttcgtacgggtcgtaccaatgcgaacgacggcggtatcgacttcgtactgcagccacttgggcgattcttccaagttacggaaaccctggacttcaggaagtattttctggacttcgagaaggtcaatcgttatcccttctcatttgtcatcaaggtggatgcggacaaggccgacgtaaaggcacgcattcgtcgagacgccgagcgatcagatcagtacagcgaagaaactatcgcgctgtatatgacgctttttgaagaggtatataccctgaaagatcttcgggaggtggtggaacacctcccgattgaggcacttggccgcgtgaaagagcagctttccctacagttccagttggagtatgggctgctggactga

SEQ ID NO: 504730 - DNA, 879 bp, Stenotrophomonas maltophilia
gtgatacgcgagttcgctgccgacgggcatacggtagttcacggcgatgcgattgagggcctcaagtcgatcgatacgtcttcgattgacctgatctttgctgaccctccctacaacatcggcaaagactttgatggaattcacgatcgcgtggacgaggcggagtatctcgactggtgctggaagtggctcgaagaatgctatcgcgtcctgaagcccaccggtacgttctacctaatgaattcgacgcagaacatgccccacatggacatctactgccgaaagcggttcgaaattttgtcccgcatcgtttggtcctatgacagctccggcatgcaggcccgaaagttctatggctctctatatgagccgatccttcatatggtgaaggatccgaaggcgtacacgttcaacgcagatgacattcttgttgaagcaaagacaggcgcgaagcgtgggttgattgattatcgaaaagatccaccacaaccgtacaacaccacgaaagttccgggtaatgtgtgggactttgctcgtgtccgcttcaagatgggtgagtacgaaaatcatccatcacaaaagccggaagccctactggaacgcgtgatccgagcatcgtcgaatccaggcgacttggtgctggatccgttcgggggatctttctcaacgggagccgttgccaagcgattgggccgccgctccatctctattgaaaagaacgaggcttacatcaagattggcttgcggcgtatcggcattccttccgactacccggaggaagacctgatgaaacagaaaactaggaagactcagaacctgtcgaagcggcaacgagacaaggactcagtccagcagcccatactccaactggaactgtag

SEQ ID NO: 504731 - DNA, 456 bp, Stenotrophomonas maltophilia
atggctgtggcgatcagaagtgctttcggtggcaagaacagccgaggccagcccagcgtgacgaaccgggcagcccatctctgcgacgcacagcaggcccagtcccccggcggcatcccgccgtcgcgggagccctggagatggagcacgcctgtgactaccccctacgaaccgaagaagctctcccccgaggagatggcggagctgcacgcgctccccgacgacgcgctggcgaccgcccaggaggcggccgcgttcctgcgcctcaagtacaacaccctgtcgtggtaccgctgcaacggcggaggcccgaagtacacccgcgttgggccgaagctgatccgctaccgcatgggcgacctgcgcgcgtacgcgaagggacaaccgatgggcgagggaatgcggaaagtcggcgccgcgatgctggcggctcgcaccgccaaggcggagggctga

SEQ ID NO: 504732 - DNA, 2403 bp, Stenotrophomonas maltophilia
atggccgcacaagaaaacgcccacggcgtgctagaccgtgggcgcaaggttacaaccgaccgggagacggagcctgccagagctcacgggatcaatgatgccgtgggacgcagctcgccgacgccgtcattcgacgtcgatggtctgatccgcgcgggcctcacgctgatcccgctccacaggtgggacgccaaggacgcgaggggccgcgaccgcggcaagaccccgcgcgacggcgcctggcagtcgagggactacgacagccgcgaggtgttggagcaggcgcgccgcgacggcaggaacgtgggcgtgcgcctgccgccgacgtggatggtgctcgacgtcgacccgcgcaacttcggagggaaggacgaccccgacaacgcagccggacgcgacccgctggccgagctggtgcgggacgcgcggctcgacctgtccgcgtgcccgcacgtcgtcaccggatcgggcgggcaccactactacttccgcaagcccaccgacgtgcagctcctcgacagcctggagacctaccccggcgtggagttcaagagccaggggcgccaggtggtggcccccggctccgtgcacccgaacggccggcgatacgagtgggacgacctcgcgccgttccccgaggaggcgccgccgatgcccagcgcgctgctgcgcctgacgcgccgccccgtgcgggcccacggcgaggcggccgggcttggcgagctcacgcccgagatgctggccgcctcgcttgagcacctggacccctgcgacttccaggaccacgactcgcagtggctgccgctgatgatggcctgccaccacgccaccgcgggcgaggggcgtcaggagttcatcgactggagcacgcaggacccgaagtaccgcgacgacgcctggatcatcggccgcaagtgggactcgctgcacgccagcccgaccggtggacgccggggccgccccgtgaccgtgaagttcctgcacaaggtcgtgcaggaggcgggcggccaggtggcgcgcaccgaggcggaggacgacttcgacgcgtgggaggaccccgaggacctggggcgcggcgtggacgacgcggcgctgcgcgagccgccgagggcggatggtgtcgccgccgtcatcgaggagatgaacgcccggcactacgtcgccctggacaacgggttccaggtcgtcaccgaggagcccgacccgatcttcaacgggcgcatgcgctaccagcgcatgtccaagagcgacttccgatcggcctacgagaaccagctcgtagagcgcaacgacaagctgatgagcagggccgacctctggctcaggagcccgcaccgccgcacctacaaggggatcatcttcgacccggcgcgcgagcttgagcacgagggctggctcaacatgtggaagggctggtccgtcgagccgaggcccggcaactggtcgctgctgcgcgagctcatccgcgacgtgctcaccgacggcgacgccgcctcgttcgagtacgtgctgaactggatggccttcatgttccagcaccccgagaaggtcgcggaggtcgccgtcgccttcaagggcgagaagggcacgggcaagggcacgcttgggcgcacactcgccaagctcgccggggcaagcggcctgcacatcgccaacccgtcgcagctcgtggggcggttcaactcccaccttcagaactgcatcctgctgttcgccgacgaggcgttctgggccggcgacaaggcgggcgagtcggtgctgaaggcgctcgtgacggagcccacgctgatctacgagggcaagggccgcgacgccgtgatgggcaggaaccatgtgcacatcgtcatggcgtcaaataacgactgggtcgtgcctgccggcatggacggcgagcgcaggttcgcggtgttcaacgtcaacgagcggcggcgtggcgacagggagttcttcaacgcgctcaaccgccagctcgacgagggcggcctcgcgggcctgctgcacgacatgctggccagagacctgggcgactggcacccgcgcgagagcgtgccgcagaccgaggccctggccgagcagaagctcatgagccagggtcccgaggagtcctggtgggacggcctcttggaggccgggcgcctacccaacttcctgggcgacctgccctgggacactgaggccgtcgaggtggacaaggacgagctccacgccgactacgtcgtgcacgccaggatgctcggcgtcaggccgaagacgaaggcgggcctcggcatggtcatcaagaagaaggcagggttcggggacaggcaggtggtgacccacgacggccgcaagacctggcggtgggtgctgcccaagctggccgacgcgcgggccatctgggcgaggcgcgtgggccgcggctga

SEQ ID NO: 504733 - DNA, 252 bp, Stenotrophomonas maltophilia
atgagtgagagcctgagcgtggccgaggtcgtgcggcgcgctgcccagatcgacgccatgctggacgcgatcaccggtactgcgcccgatgtcgtccaaacgatgggcgggcgcgacgccttggcccgacgcagcgagatgacgtgcctcggaccggtcccgcgcttggatgccgagacctgggggcgcatggcgcaggagtatgaggggctacgggagcacgcgagcgtcaatcggggagacaaaccataa

SEQ ID NO: 504734 - DNA, 282 bp, Stenotrophomonas maltophilia
atggccaacaatctaatagtgtcttacgacctgtacagcccaggacaggattactcaaaagttactgatgcgatcaaatctctcggctcgtgggcaaaggttcacaagtccgtctggtacgtcaactccagctacacagcgtctcaggctgttgatatggtatgggcagcgatggaccgcaacgactccctattcattgttgacgctactaacaacaatgcggcttggcagaacttgaatgagaaggtgtccgatcatgtaaaggatcagtggcacaagtga

SEQ ID NO: 504735 - DNA, 240 bp, Stenotrophomonas maltophilia
atgatggcccttgcggcactgatcgccgcgatgcagaacaggtgcgatctgttccctgagctggaagccgttgccatgtccaacggcgtgatcgtcggatccaaggagtttgataaggctgccgccctggccgggcaaccctactgtcgcgcgctggacctgtacgtcgaccgcgagaccaagcgcagggcggacgccctggggtcggggatggcgcacctggccttcctcccggcctga

SEQ ID NO: 504736 - DNA, 255 bp, Stenotrophomonas maltophilia
atgagtaccttcacccgtatcgccaaggaccccgtggggatggcgcgtcttgtgacgaactatgcccgtgtcaaagagcttcagcagaagatgtcgatcgaagagatcgcggagatcttcgacgaagacccgcaaggtttgagtaccttcgttgagtacgcagatgcctacgtttccggcgagaagtccctctcgctcgacattactaccaagagtaaggaggcgtttgcgcaggtcgcctccgcacttcgctaa

SEQ ID NO: 504737 - DNA, 531 bp, Stenotrophomonas maltophilia
atgcgcaggacgcttttcctgatcgcgccactggtgctgctgggctgttccagacccactgcacaaccggaggttgcgccagtgccggcgccagcgagcgccgatgcacaggccgttgcagacaccgacgcagcaccgctgcagcgagcaacgatcgatccgctgttcgccgcggtcgctgccgacgccgaaccaccatcggtgatgctcaaccgctacgtgatcgcgctgctcaaccgcaaccgcagcgccagcgacgcggcatgggcgattccaccggtcgatccgcaccgcgcagatgacgctgccatacgccaactgcaggacctgcgcacgctgcgcctggacagtggcaccccgctggcacgcgatggccggcagccatcccggttgctggaggtgccggtgcggctccgcgcgaccaccgcacaaggcaccttccgcttccgcggctggtatcgcgtgcagcccagcccggacggtcgcgcctggcagatccagtcggcgcaactgcggccaacgctggactga

SEQ ID NO: 504738 - DNA, 339 bp, Stenotrophomonas maltophilia
atggcatcggtggccgcctggagtctcgccaccgatgccactggcgtggcggtattcgccgacgaagccggcaccgaccacagccgcgtggtccgcgcgttctgtcctgctgatgcgcccagcgtgcccgaggacccggtgaccggcagcgccaatgcgctgatcggcgtctggctgcggcagcgcgatgccctgcccggccgcgagggccgctacgtggccagccagggccgcgaagtgggccgcgatggccgcgtgcaggtgcaggtcgacgcgcagggcacggtgtggatcggcggccaggtgcagtgcgtgatcgacggcagcatccattggtag

SEQ ID NO: 504739 - DNA, 786 bp, Stenotrophomonas maltophilia
atgacagaatggatccagcaccagtttgcagtgctcaaggcgttgcccatgtggatcagtttcaccgggtgcgcgctgatagcggcaggggggagtctcgcagcgtatgcggtggccgaacgcctgtgcaatgcccgaacctatgcaatcacgccgactcgagcgatggagctgctcttcgctggcgtcttgatctcgttgttctcgccgattgcgatgcggatcgtcaacggtgcgatctactcgtatcagtttgatgtcgcgttgctgttctacttcgggccactgatccccctgggcgtatggcttgtgggtgtaatcattgtgggacgggtcatggtagcctcgaaaccagagcttgaggggggcgaagctcgcgatcagtacagatacaaccttgaagagatcggccgatcgcgatatggcctgcacatcacgcctcgacatcacaaacgctgctgccgaatttttcgcatgcaagtgttctggcgcaaaccctcaatttcgaacgtgggtgtgatggcgaggagcacgttgaagacctgcctaatcagtgagctgcagtcgggggacacggttgagatcgttacacccaatcaaaagctggccaagttggttgaatggatggcggcgaccggcatgccagccggctacaccattgcatccatagagcgccggctcgggcgcgtgacaatgatgctgggttatctcagcggttgcggttggtcgtggagaactgcgctgaagaaccctttggtcagaggtttcgagatcacgaggtcatga

SEQ ID NO: 504740 - DNA, 867 bp, Stenotrophomonas maltophilia
atgaaaacccctgtccgcagagccgcagccctcgcactcctgctgctcacggcactgcccggcctcgccagcgaagccgtcgccgcgcagaagcccatcgcagtgcagatgtactcactgcgcaatgccggatcgctcgaccagcagttgaagatcgttcgcgacgcgggcgtgcacgcggtggaaacggtggggacccagggcgtcagcgccagcgaactcaagcagttgctggacaggtattcgatcagggcgatctcctcgcacgttgcgctggccgagctgcgcagagacctggacggcgtggtggccttcaaccgatcgatcggcaacgccacgctggtggtgccctacctggacgcgaaggaccggcccaccgatgccgcaggctggaccgcactgggccaggagctgggccggctttccaaacaggttcgggccaagggcatgcgcctggcctaccacaaccacgacttcgagctggtcgacttcaacggaaggaccggcctggaactgctgttcgctgctgccggccccgacctgcagaccgaactggacctggcctgggtggcgcgctccggacacgacccggcggtgatgctgggcaagttccgtgaccgcctgttcgcggtgcacgccaaggacaatgcgcccaagggccaggcccaggacgaaggtggattcgccgccgtcggccagggcgtgctggactggaacgcgatcctgccagccgcggccgccgcgggcgtgcactggtacatcctcgaacacgaccaaccgcgtgatccggccaaggtgatccagaccggtgcggactacctgcgtgaacacctgaccgtcagcccgcacgccagcgcacaacgctag

SEQ ID NO: 504741 - DNA, 735 bp, Stenotrophomonas maltophilia
atggctgagccgctggccaccctgcagcagcgctgggccgaccatgtacgcgacccatcgatgcccgcgcctgagggcatcgatgcacggcggatggcggtctaccgccgcctctgcatcgacagcctggacagcctgctggcaggcagcctgccgcgcctgcaggcgcaactgggtgatgcctgctggcgcgacaccgtggagcactactacgcgcggcatgcctgccataccccactgttcccgcagatcgccggcgaattcgccgcgtggctgggcgtgcaggcagacctcgcgctgccgggctgggtggcggaactggcgcattacgaaagcacgcagcaggcactgcacattgaagcgcgggacaccggccagcagccattgcatgcgccacaggcaggcagcgtgctggcgctgtctccactggtgcgggtgctgggctaccagtggcctgtgcatgaggacgccggccagaacggcgcgcctaccgcgatgccgacgttgctgctgctgcgacgcctgggtgacttcagcctgcaggtgcaggaactttcaccgctggcatatgcgctgctgtcggcgttcggcgatgacggcgcccgtgcggaagacgcgctgcaggtactggccgatctgcatggcgtggccgccgacgaactgcgcacagcctgcattccgctgctgggcgagctgtgcgcggccggcgtgctggtggtgcctagcgactgttga

SEQ ID NO: 504742 - DNA, 144 bp, Stenotrophomonas maltophilia
atgctcggctggcacccgacgcgagcggtagaagccgccgagcatggttcggcgctacagccgggcgccgggcttcaatcgccgcagctgccgctgtcactactccccccatcactgctgcagtcggagctgccgtggctgtga

SEQ ID NO: 504743 - DNA, 858 bp, Stenotrophomonas maltophilia
atgaacgccgtcgtccacgccgagcggccctgtcgcccccgcgtggacagcgcgcgactgggccgcctggccatcgccagcctgcacgccgaactggcctgcacacccaagcctgggctggtcaccccctttgataccggcagccatgacgacatggacgccggcaccttcctgcgcagcctgtttgccctgcgccactacttcaccgcgatcgcccatgctggcgtcgacgatgcgcccttcgcggtcctgcgcatgcatgggctggccgccgaggccgcgatgctgcgggccaccggcggcatcaatacccatcgtggtgcaatcttcagcctgggcctgctggtcgctgcatcggcacgctaccgccaactgcacggccatgcgggttcggctgcacaggtgtgcctggccgtgccgcactgggcagccgacttcgccagcgcgccactggatgccagcagcccgggccagcgggcacgtatgcgccaccgcgtgccgggcgtacgcgagcaggcggcggccggctacccggtgctgcgcgagctggcgatgcccacgctgcgtcatgcactggaggaaggcctgacgcacgatgcggcgctatgccagaccctgatgcagctggtcgcgcagatcgatgacctcaacctgctgcaccgtggcggcgccgaaggcctgcactgggcccagcaggaggcacgtggctttctggaaagcggcggtgccttcgcagtcggttggcaggcacgccttcacggcatcggtgagcgcttcgtcgcacgccgcctgagccccggtggcagtgctgatctgctggcctgcagctggttcctgctgcaacaggagggcgtatga

SEQ ID NO: 504744 - DNA, 660 bp, Stenotrophomonas maltophilia
atgcggtggcccgcggcgatgcctgagcagcccgcccgccacaccctggcctggttgtcggcccacgccgactggcgcgccgacgtggctgcgcaggaaccccgcctggcggcgtggttcgcgcagggcctgcctgcaatggtggcgcgccgcgccgcggatgaccccgacccgcgcctgcgcctgggggtgccgctgccgccgagcgagggcaagctgcggctggcgctgcgcgtggctccgcacgaggcacgtcgactgcagccaccgcccgcgctggacgaggtcgttgccagcggcgtacccgacgactggcgaagcgcactgcaggcgatgcagcggctggcaccggcacgcgtgttcggtgcattcgcctggcagcatctgagcggtttgccgtatgtgcatccgcgctcggacatcgatctgttgtggcagataagggccgcaggccaggccgatgccctggtcgagcgcctgcaggactgggaacgcacgcacgcgcgccgcgtcgatggcgagctgtgcctggccgacggtggcgcggtgaactggcgcgagtacgccggatgcagccgcgaggtactggtcaagcgtgtggatggtgctgcgctggaagcccgcgatcgcttgttcatcgccaacggggtggccgcatga

SEQ ID NO: 504745 - DNA, 711 bp, Stenotrophomonas maltophilia
atgagcgcaccgctgcagtccctgctcgatgcactcttcccgcgcggccaccacatcgacatccacgactcggtactgaccggcacggccaccaccgaggatggcgaggtgaccgtgatcggcaccaccgaccgcatcgaggtcggcgtcgaccacgcgctggcgctggccgggaccgtgctggccagcaccgccacccacccgcaacggccgatcgtgatgctggtcgacaccgccggccagcgcctggcccgtcgcgatgaactgctgggcatcaatggctacttcgcgcacctggctcaaaccctcgacctggcccgccgccgtggcgcgcgcctggtcaccctggtgtacggcgaatcggtaagcggcggattcctgtccttcggcctgatggccgaccacatccatgccctgcccgatgcacaggtacgcgtgatggacatacgtgcgatggcgcgagtgaccaagcagccgctggaaaaactgcaggcgctcagccagagctcaccggtgttcgcaccgggtgtggccaactacgtggcgatgggtgcggtggaatcgctgtgggatggcgatcgtgcgcagcacctgctgcaggcgctgcgcacacccagcgacggcgatgcgcgcgccgcgctggctgcacagcgcggcggtcgtgcactggcggcggatgttgccgatgcggtggcccgcggcgatgcctga

SEQ ID NO: 504746 - DNA, 1644 bp, Stenotrophomonas maltophilia
atgaacccgagctgggatacgttggagcgcagtcgccagtcgcgcctggagcgcgccgcgccgtgggcgcgcgggcaccaggtcgcggccgacgacgtgcgcgaactgctgcacgcgctgctggagccgggtgacaaggtctgtctggagggcaacaaccagaagcaggccgacttcctggcccaggtgctggccggcctcgacccggcacgggtgcacgacctgcacatggtgcagtcggtgctgtcgctgccctcgcacctggatgtgttcgagcgcggcgtcgcctccaggctcgatttctccttctccggtccgcagtcggtgcggctggccaacctggtggccgaagggcgcatccagatcggcgccatccacacctacctggagctgttcggccggtacttcatcgacctgaccccgcgcgtggccctggtggcggcgcaggccgccgaccgccacggcaacctctacaccggcccgaacaccgaggacaccccggtgatcgtcgaagccactgcgttccggggcggcatcgtcatcgcccaggtcaacgagatcgtcgacaccctgccccgcgtcgatatacccgccgactgggtcaacttcgtggtgcaggcaccgaagccgaaccatatcgagccgttgttcacccgcgatccggcgcagatttccgagatccaggtgttgatggcgatgatggcgatcaagggcatctacgccgagtacggcgtgaaccgcctgaaccatggcatcggcttcgacaccgccgcgatcgaactgctgctgcccacctacgccgagtcactcggcctgaagggaaaaatctgccagcactgggcactgaacccgcatccggcgctgattccggccattgaatccgggttcgtgaagtcggtgcactcgttcggttcggaactgggcatggagaagtacatcgctgcccgtggcgatgtgttcttcaccggcgccgatggctcgatgcgttccaaccgcgcgttctcgcagactgccggcctgtacgcctgcgacatgttcatcggctccaccctgcagatcgacctgcagggcaacagctccaccgccacccgcgaccgcatcgccggctttggcggcgcgccgaacatgggctcggatgcacgcggtcgccgccacgccagcgatgcctggaccaaggccggccagcaggccgcccgccctggcgaaatgccgcgcgggcgcaagctggtggtgcagatggtggaaaccttccgcgagcacatggcaccggccttcgttgaacgtcttgacgcctgggaactggccgagcgcgcacagatgccgctgccgccggtaatgatctacggcgacgacgtcagccacgtactgaccgaggaaggcatcgccaacctgctgctgtgccgcacgccggaagaacgcgaacaggcgatccgcggcgtatccggctacaccgccatcggccttggccgcgaccgcgcgatggtggaaaacctgcgcgaccgtggcgtgatccgccgcccggaagatctgggcatttcgccgcgcgatgccagccgcgacctgctggccgcgcgctcggtgaaggacctggtgcgctggtccggcggcctgtacgacccgcccaagcgcttccgcaactggtaa

SEQ ID NO: 504747 - DNA, 2193 bp, Stenotrophomonas maltophilia
atgtttccgaccctgcccaaccgcctgccccgccgcgcgctgctgccggctgccctgctttcgtcgctgtccctgctggccgcacccagtgcgttcgctgcggccgatggcgccgccgatgccaagaccctggaccgggtcagcgtccatgccgagcagtccgctccgccatccagcaccacccgcctgccgatcacgctgcaggaaaccccgcagtcggccactgcgatcagcctgaagcgcctgcaggacgaatcgctgttcagcatcaacgacgtgatgcgcaacgtcaccggcgtcagcgtgtccttctatgacacccagcgcccgctgtactacgcacgcggcttcgccatcactgacttccaggtcgacggcatcccgacctacagcggttcgaccaaccaggaatacgacaccgccttctacgaccgcatcgaagtgatccgcggcgccaacggcctgctcagtggcgccggcgtgccgtcggccacggtgaacctgctgcgcaagcgcccgggcaaggagttcgatgcctcgttcgcggtcagcgccggcagctgggactatcggcgcatggaggcggacgtgaccgcaccgctgaccgatgacggccgtttccgcagccgcgtggtcgccgcctataccgatcgtggcctgtattacgaccgctacgacgagaacaagatggccggcatggcggtgctggagggcgacgtcaccgacagcacgacgatcaccctcggttaccagagccaggacaacaacccgaccggctcgacctggggcaccgtgccgttcttcgacaaccagggcaacttcgcccacctgccgcgttcgaccaacctgtcgccgaagtggagctactggaagcgcgagagcaacaccgcgttcgccaacctcgaacagcgcttcggtgacaactggctgctgaagatcaacaccgcctacacccgtggcaacgtacagaacgtgcgcctgtacggcaccggcaacccggacccggtgaccggctcgggcatcttcctgcgcgcggccgccggtgattccaaggacacccgccgtaatgtcgatgcctacctggccggcagtttcgatctgttcggccgtgatcacgacgtgaccctcggtgcacagtggtcggacctggaaggcaccaccaacaccctggcgctgaactacccgaccgactgggcgcgctgtggcagcgaacgctgctactacatccccaatgtgtacagctggaacggcgacatctccgaagtgacctaccgtcgcaccggcgcacgtcgcgtcgccaagaccacgcagagtggcgtctacctggccacccgcctgcgcctggccgatccgctgtcgctgattgccggtgcgcggctgagccgctgggaaaccctcagccgctcctacaacgcggcaggcgcgtataccggcaccagcggcgcctacaaggtgagcgatgaagtcactccgtacgtgggcctggtctacgacatcacccccaacgtgtcggcctacgccagctacaccgagatcttcaatccgcagaactacaaggaccgcaacgagaacctgctggcaccggtacagggctcgaacctggaggcgggcatcaagacgcagtggttcgatggccgcctgaccgccaatgccgccgtgttcgaagccaagcaggacaactacgcggtgcgtgacatgggcgtgccggaaggctcgctgagcgatggcacctcggcctacatcggcgtcaacggcaccaaggcgcgcggctgggagatggacgtcaacggcgagatcctgccgggctggacggtcaacgccggctacacccacgtcaaagtgacccgcgccgccaccgatctgctgtacgccaacccgcccaaggatctgctgcagctcaacacgcagctgcagctgcgcggcgcgctggaacggctgagcatcggtggcggcgtgcagtggcagagcaaggtacagggctacaacatcgcctacccgctgggcggcacggtcacggtcaaccagccggcgtactcgctggtgcagttcaacgccaactaccgcatcagcgacaactggacggcgacgctgagcgtgcgcaatgcgctggacaagacctactgggccaacctggactacaacaacttcggcgagccgcgattcgtgtcggccagcctgcgctggacgttctga

SEQ ID NO: 504748 - DNA, 1035 bp, Stenotrophomonas maltophilia
gtgaccgaggcgagcgcgcgcgaggtggcttcgctgatcacgcaaccgggctttgccgagatcgtgcgcggcacgctggtggcatcgcccgagcaggccgtggccctggatgcggtgatggagcgctttgacccggatgttcgtacccgggccagtgccgccttggccagcaacgatcaacggttgcgccaggccaagggattgtcggagcagggtgagggcctgctgcagctgcgcgcctatgttcctgagggccagtcgctggcggacaccgctccgcaacagctgtgggtggccagcctgccgcgcggcaatgaccgggactggaccaccttgaccgcctacgacgcgcagggccgcgcgcatgtgctggatgcgaagcgtgcgccgtcatttccggtgctgatcgtcgatatcgatacccgccgttcggtgcaggagggcatggcgctggtcaacgccgggttgcgcgcacggggcctgcagtcacccgagcgcatccagctgtcggccgatggcgcgcgcgcgtcgctggatatcacccgtctcgaccgcatccgcctggccgatgaccaggagccgtgggcattgggcgcggccgaggtgttcgcagtggtgtccgggctgcaggtcggcaaggccgagccggaaatggctacggtcgacatgccctacctggactatgacaagaccgactacaccccccggcaggcgctgatcctgtggggcaactaccgcttcaacgcggccaatgtccagctgttcgaggatgacggcgacaccaactaccaggacctgttggtggcgctgagcaacggtgtgaaggcggcactgggcgtgtttgcgccggagtattcggtgatcgccgatatcgcaggtgcgattctgaaggcgatgccaacgtcgtggttctccaacgacatcgattacgtggacagcttctacctggtacagcgtggccaggcgtacaccgatcgcatgggcgcggcgaacaacgccagggtcacgctgacgccgatcacactggtggagtag

SEQ ID NO: 504749 - DNA, 879 bp, Stenotrophomonas maltophilia
atgtccacagcttcaatgaaatcgctggccgtgctcgccctcgcaggcacggccacgctggccggctgcaagcccgcagtggcccccccgcctgcgccggcgtcggaggccgccacgtcggcccctgccgagccgacggcgcacgtgagccgcaccgcacgactgcgggcattcctggtccagcgctatggcaagaaggccaggctctccggtgaatggcacggcagctggaacgacgacggcgagacccgcccgatggactggcacgtctgcgccgagcaaccggtggtgagcggtgacagctggcagcagttgctggcggtctgcggcgcactgtccgaaggcgcacacatcgatgcgggaatgatcgacttcttcgtgctgcgcccgaagggcgatggcttcgaagtggccagcgaactgaccggcgaacgcttcggcagcggcggccagcccggcacggtcagcgtcatccgcgccggcagcgacttccatggcttccgtgtcgaggacggctggttcgggcagggcttctcgctgctctcgcagtcgctgatcctgccaggcccgaacggcctggtcgccaccggcagcgtccgcagccatatcgacaatgacgcccagtacgagtgcgacaacctgggtcccggcaccgacccggacaccgccgaagactgccgcacccgccgcttcagcatcgatttcgcactgcgtttcgacgacagcgatcgcagcgcgcgcatctggccgctgctgatcgaggaaaccggcaccacctgtggcggcaagcaggtccggcaggaacaccgctttaccctggacccgaagacctgggcctattccttccccgaatcgctgcgacgcgaaggctgcgaatga

SEQ ID NO: 504750 - DNA, 771 bp, Stenotrophomonas maltophilia
atgtccgagccgaacccaccgcgccgtcccctggccaccttcctgcgcacgacgccggagggtgaggctgcgcctgcgaccgatgcgcgcacgcagcacgacgttgagcacacagcgcctgcaatgcaggcgccgaccgagcccgttgatctggcacatgcgccgacggcggagatgcgacacgacgatgacacggtcatcgttgatgacaccgcagccatcgaaccggcaccggtcgtactaccggcaacgacggttgccgccgatgcacccagtttcctcggcaacccgcgcccacctgccctgccaacgccgcgctggcactgggtgctggtcgccgcgctggcgctgctgctggtcctgcagagcgtgctggccgatcgcacgcggctggccgccgacgccggcaaccgtgcatggctgggcacgctctgtggcgtcctgcgctgcagcctgccggcctggcatgaacccaccgccttcaccatgaccagccgcgagatccgcccgctgcccgggcaggccggtgtgctgcaggtgcaggccagcatccgcaacgacgcacgctgggcacaggcctggccggacctgcgcctgtcactgtccgatgctgatggccgtgtgatcggcagcggtgtgttcacgcctgcgcagtacctgggcgagaaccccggtgcggccctgctggaaccgggccagagcgcgcgcgtcgcgttccgggtacaggagcccgccgcatccaccgtcgcattcaccttcgacttcctctga

SEQ ID NO: 504751 - DNA, 426 bp, Stenotrophomonas maltophilia
gtgaaggtgctgccgcacgtgcttgccagcatcctgctgtgggccggcctgtgcggtgccaccgcggcattcgaccgcaaggacgaaggcatcgactgcgcgcatccgaccaccacgatggagagcgacctgtgcgcctcggacgtggccgcggccgctgacgccgaactcaatgccgtatacgccctggcgcgaaagcaactgcgcacgccggccaaaggcggcagctgcagctactgcggcgatgccgagcagcagctggtgctggcgcagcgcgcctgggtgcagctgcgcgaccacgactgcaacgcggtctatgccctcaattccgatggcacggcacgcaacggcgcacagatgcgctgcctgaccaccctcgcgcgcgatcgtacgcgccagctgcgcgagttctacgaactgctttga

SEQ ID NO: 504752 - DNA, 534 bp, Stenotrophomonas maltophilia
atgcgccgatacctgtttgcttcattgatgtacctgttgctggttacgtcggcaccgcctgccttggccggcgagctcaccccggccgagtcggccggcctgcgcgaggacgtacaggcgatgttgaccgcattcgccaagggcgatgccgagctgatcatcgcccgcacgcatcccagcctgaaacgcctggccggtggcgatgagacctacgcccagtcgacccgcgataccgtcaaggcattgcacaaggctggcgtcgtcatcatcagtgacgaggccggagtgcccggccgcacctatgccgccggtgacgaagaagtctgcttcgtaccgcggcagtcactgctgcgtgtgcgcgaaaccgctatccgcagcacctcgttcatggttgccgtgcgccacgtcggcacttcgcagtggcgctaccttgatggcgccgggctgatcgacaatccagcgatgctccggcagctgttgccggcactcgagccgggcgtgatcctgcccaagggcggagtggaaacgctgtag

SEQ ID NO: 504753 - DNA, 597 bp, Stenotrophomonas maltophilia
atgcatagcctcatcgtcaccgcccatcccgaacccggttcgctcacccatgccatcgcccagcgcatcggcgacgccatcgctgcgagcgatgccggcaacaccgtggcccacgccgacctgatggccgagggcttcgatccgcgcttcaccgcgcaggaccaggcgctgttccgtggcaccggcgtggtgccggccgacgtggccgccgagcatgcacggctggacgccaccgatacgctggtgctggtctatccgctgtactggtggtcgttccccgcgctgctgaagggatggatcgatcgcgtgttcacccagggctgggcctatcaggacggcgccgatggcaaggtgcagaagaagctgcagcgcctgcgcgtgcacctggtcggcgttggcggtgcgggcgcggaaatgatcgaacggcgcggctatggcacagcgatgaagacccagatcgacatgggcatcttcgactactgtggcgcgcgcgtgctgtcgtccgaactgctgctcgacgccgacagcggtgccgcgcaggcacacctgcagaccgccgtggaaatcggccgtaaaattggtactccgatgagttga

SEQ ID NO: 504754 - DNA, 846 bp, Stenotrophomonas maltophilia
atgcagccgccgcggactatcctgcaggcctccttcgccatcgccgcatgcatgccgtctcccacctccgcgcgcgacccgctctcgtccatcaccctcgatgcagcaaccctcacggtgatccaccagcacaacgccgacatcgcacgacagccggcgtcgctgaccaagctgatgaccgcctacgcggcctacgcatgcatcggggagtacgggcactcgtgggacgaaacggtcaccgtcgctgacgacgatgtgcatgccgtggccgacgacgaaacgcgcatggggcttgtccccggagagaccgtcaccctgggacgtctgctggaaggcctgatgatcgtctccggcaatgacgcggcactggccatggcacgtcatctgggcggatcgcagcctgcattcctggaacgcatgaaccggcacgcgcgccagctgggccttcgcagcacgtggttcgccagcgtgtcgggcatcaccacgccgcgtcatgcatccagcgcgcgtgacatggcggtgctggccgcctgcctgctgaacgatcatccgcagatcctggcgatcaccgcgcagcgcgcgtttgaacatggcagcttcagccgcaacaaccagaacgccctgctgggcgatgacggcgtggatggattgaagaccggttatacccgcgctgcaggcttctgcctggcggcgaccgcgtgccgggcggtacccgggcgtgcgcagccggtgcggctgatcaccgtggccctgggttctgaaagccgcgaggcacgcgatgcacgggtacgtgagttgctggccgacggtttcgctgcgctggccggcaccgccatggatgcctga

SEQ ID NO: 504755 - DNA, 372 bp, Stenotrophomonas maltophilia
atgaactcgatcctgcacgttgagatccccgccagtgacctggcccgtgccattgcgttctaccagcaatggctgcgggtggacgtggatgcgccgatcctgctgcatgactgccagatggcgtacctgccgttttcggatgacgcggagggtgccagcatggcgctggtgcaaggtgcggactacaggccctccgagcagggcgcgcgcatctacatcggcgtggatgacctggatgccagcctcgcgcgcgcgctgcaggcaggtgccgaactgcgcttcggcccggccgatgccggcgattggcgagtggccgagatccgcgacagtgaaggcaaccgcatcgcgctgcaggcccgggcagttctgtag

SEQ ID NO: 504756 - DNA, 930 bp, Stenotrophomonas maltophilia
gtgcgcctgtccgttctgcccctgcttgccgctgcattccccgcgctggccgccgccccgcctgtacacgtgctgccgatgtggatgcagggcaaccatccggcagtggccgtctcactgaacggaagcgccgaaccgctgcgcttcgtggtcgacagcgcggctggggtcaccctcgtcgacggtcgggtagcccgccgccacgggctggaggatccccggtccgccaccacgcatgcgcagggggccagcgcccagagcgcgccgctgcagcgcatgcacacgacctcctggcggattggcggatggcagctgcgcgtcagcggtgtgcaggccgacctttccaatctgcagaaggacgatgaccccgccgtcgacggcctgatcggcaacgacctgaccggccgttgggatacccgctgggacttcagccgtggtgagctggcgctgtggaagcccgggcagcttggcgtcgatggtcgccagtgccaggccaatgcactgcctgatcggcgcgacggcttggaacacttcgccttcattaccgtgaaactgggtgaggcggaagtggaagccatcgcggtggtcgacaccggtgccgcgcagaccgtgctcaatgccgaagccgcccgcgcactgggcctgcgcatcgacggcagcgatgagcgcctgcgggtccgcgagaaaggcacgcagggactggggggccagccgcaggcgacgtggttgtacaccctgtccggcatgtccggcaccggttggcagcacccggcgatggaggtcaggatcagcgaactgtcggtgttcaggtccatcgggctggaggctcgccccgcactgatcctcggcgccgacgccatggtcgccagtcaggtggacatcagcgccggcgccgcccggatctgcctgcgccagccggcggtgacgtga

SEQ ID NO: 504757 - DNA, 1299 bp, Stenotrophomonas maltophilia
atggtggccctggccagcctgctgctggccacgctggtcagcgtcgcggtggtgggctggatgccacgacccgcaccgccccccatgcggctggaccaggccatgcaggtcgttcgtggcgaacggcccgccatgccgctggggctgcatctcgaaacccgtgcgtcgccgccgcagggcagcagcaatggctggctcacccacctaattgcgtcgcagatgggcctgccgctggaacacgtgcggttggtctggagtggccgcggcaaggcgcctgatgtgaaggtcatcgaaggcggcatggaactcgatggaaatgcacggacggacgcgttgcaggcgcaggtgtcagtgctgaccaagatgcagtggtcaccctttgaactggcggtgcgccaagctgatggccgatggcacgtggtcggcagcgaccacagcgatctggcggcgtggcgtcggcaggtcgtgctggcgctggtagcggggaccgtgctgttggcaccccttgccgcctgggcatcggtccgcctgggacggccgctgcggcggctggccgaggccagtgcacaggtcgaactgcaggacggcacaccactgccggacgacggcccacgcgaagtacagatgctggccgcagcgatcagcaccgggcgcgagcgcctgcgcgaacaggcccaggacatgacgcgcatgctggccgcagtagcgcacgacctgcgcacgccgttgaccggcctgcgtctgcgtgcggagttcgcaccgccggcacaggccgcgcggatggtggctgacatcgaacgcatggatacgatgatcgagcaggtgctcgattacgcacgcggcgaactgcaaccactgcagttgcggccgctggatctggccgcgttgctggaggaatgcgtgcacagtgccctgctgcgcggcatcgaaatctccatcgagggaccggatgccctgccgtggcagggtgacgcgctcctgctgcggcgggcgatcgacaacctcatcgacaacgcagaccgctacgccggtgcggtagacctgcacgccgccatggcaggcaatcggatgcagctggatgtgatggaccgcggcccgggcatcgccgaggacgaccgcgcacgcctgctgcaacccttccagcgcagcgagagctcgcgcagccgcgccacgggtgggaccggcctgggcctggcggtggcggccaacgtcgcacgacggcatgggggcgagcttctgctgctgcagcgtgatggcggcggactgatcgcacgcctgctgctggggccggtttcctga

SEQ ID NO: 504758 - DNA, 495 bp, Stenotrophomonas maltophilia
atgctggaagccaagcacagtgccctgctggatgaagcgcaacggcgcggccatactggcgtcgcgcagctgcgcctgtgtttccagttgctgtcgctgtcatcggccatcgatcgcgactgcgccacacgcctggcgccgcacgggctcagtgaagggcgattcaccgtgcttttcctgctgcacggtgccggtggcacgctgccaccgcatgaactggccgagcgcgcaggtgtcacccgcgccacgatcagtggcctgatcgatggcctgcagcgcgaagggctgctgcagcggcgcagtgacgccgaagatggcaggcgcctgcagatcgtgctgaccacacaggggaaacgccttgccgaggcgctgttcaaccagcacacgcaatggataggcggcttgttcagcggattggacgcggaagaacagcagcagttgtcgcagctgctgcacaaggtctggcggcacaccgatacaggtcgtggggcatga

SEQ ID NO: 504759 - DNA, 741 bp, Stenotrophomonas maltophilia
atgagcgggaccctgacagctgagcgattgaatgcgctcaacactggcagcgtcgccgccagccatctggctgaatgcctggcggtggatttcgctgcgctgttacaggcggtggcacccgcacttgaacatgacgcgctgcaccgcatgcgcgatgctgaaggcaagggcatcacccagcgcatggccctggctgcccggttgctgcgcgaaagcgggcagggcgctcctgcgaaatggcaggagcatgcgtccgattccgtgcgtggctgggcctgctacctgattggcagcgatgccagcgcaacgttaccggccaagctgcgtgcgatgcgtccgctcgccgatgatccgcacttcggcgtgcgtgagtgggcgtggctcgcgctgcgtgcagatatcgttgctgcaccgttgcaggcgctggagtgcctgcagccatggacgcagcaagcttcaccctacctgcgtcgcttcgcctgcgaagcactgcgcccgcgtggcgtgtgggccacgcacatcgcgttgttcaagcagcacccggaccatgcattgccgctgcttgaagcgctggccgacgatccggatcgctacgtacaggactcggttggcaactggctcaacgatgccggcaagacccagccgcgctggctgcgcgatctgtgcgcgcgctggcagcgtgaacacgacggcagcgccaacgcctacatccgcaggcgcgcactacgctcgctgcggtag

SEQ ID NO: 504760 - DNA, 339 bp, Stenotrophomonas maltophilia
atgtcccacatcttcatcgagctctacacagccacccctgcctggactgcgctcccgcctgaccagcgcaccgccttcttcgcccgcatcggcgccggcatgcaacagttcgatccggcccgcatcacgccggtggcgatgggccgcgtggccgcggatgcagcgcacggcggcagcgagcagttccatgctgtctggagatgtgcgagccgggaagacgccgatgccctggtggaaggcattgccgccaccggttggcatcagtacttcgccaccaccaatgtcgtcggcgcggacgatgggatggggcagcacctggccgatctggctgccttgtag

SEQ ID NO: 504761 - DNA, 780 bp, Stenotrophomonas maltophilia
atgagcgaaccggaaaagcgcatcgccctgttgatcgacgccgacaacgcgccggcctcgaagatcgacgaagtgctggccgaagtggcccgctacggcgtggccaacgtgcgccgcgcctacggcaactggaagagcccgcgattgaagggctgggaagccgtgctgcacgaatacgcgatccgcccgatccagcagttcgcctacagcaagggcaagaacgcctcggacatggcgatggtgatcgatgccatggacctgctgtacgcgcgcaatctggacggcttcgccatcgtgtccagcgatgccgacttcaccccgatggtgatgcgcctgctgaccgatggcgtgaaggtgtatggcttcggcgagaagaagacgccggagcccttcgtcaatgcgtgctcgaaattcacctatctggaagcgctgggccagacccatgccagcgtgccggataccgaacaggcgtccagcgaacaggcatcgaatgagccggtggccaacgacgatgcccggccgcgcaagagtggtgcggaaatgcgcagcgacacgcggctggtgaagatgctgcgtcgcgcggtgtcctcggccgagggtgaggatggctggtcgcacctgggaccggtcggcagccagatcggcaaccaggcctcgttcgacccgcggaactacggctacggcaagctcagcgatctgctggcggcgatcggcctgttcgagctgaagaaggacggcaagtcgtcctacgtgcgcgcgctgccaaaaaagaaccggtag

SEQ ID NO: 504762 - DNA, 192 bp, Stenotrophomonas maltophilia
gtgactgcatgggatgctttgaactacgttctgctggcagcagggctggggatgctggtgctgggctaccgccgctccaatcgcaatctgctgctgtgtgcgggcctgttgctgctggccttcaacggcgttgaggatttcgccgccgggttcgccgacggctatgcgaattcggaagcacgggtgatctga

SEQ ID NO: 504763 - DNA, 279 bp, Stenotrophomonas maltophilia
atgactgcgcgttttgcgccgctactggattgggaagatgtgatgcgcgacgagcgcgaggattcactgggattcgcccgaagagcaacattggcgttgctgacgcagtcgggtgctgggttgcttgcgagcttcggaggcgacaagcagaaggggctggaagaggccgggaggacggtggcgctgttccacgcacacctgcggcggcaggtgtggtttgcggacgtggcggagaagcggttgggacgtgctgctgaggctcttgctgctgccgggtag

SEQ ID NO: 504764 - DNA, 756 bp, Stenotrophomonas maltophilia
atgtccgagtccgcccatgcaccgttgccgcgcacccctgctcccgcagcgctcgaagctctgcgccgtccatccgctgcgcaccggccaatgcggccacaggcattggcgtgggacggcgattggcgggaaccaggtccgcctgcaggcgcaaccgcagcgcatggatgtccggcggccaccggtcgtccagcggcaggaccgatcgtccacctcctggcaggtggaggcactgctgcccggccagcaatagggcaaggtctgctccatcacgtagatgtcctcccccaccgcgtcggtcaactgcggctgctcctgcgggcgccattgatcgacgcgcgtggacggcgtctgcggtgcggtgggcaccgcgctcagcgaggttggcagaactggcgttggctgcggcaatgcgggtggaaggggaaatggcggcctctgccggatcgccagcgccatcgcctccgcctgcatctgcgctgttcccaggttgaccggtggcggaccgctctcctgctgccacctcgggcgcaggctgcagattccggccatgagagccaaagccgacagcgccgccgccagcgatgcaatgcgtcgccaggcgatccgttgttggcagtcgcggtctggcttgaacgaggtaactgtcatcacgactccgccaacgcgggccacaggccgtgtccaaagctcatatggcggacaggctccactcgaatgcgctcccatccgcccttcctgcggtgcagaaggtag

SEQ ID NO: 504765 - DNA, 780 bp, Stenotrophomonas maltophilia
atgaagaactcgcgccatttttccatcagtgcattgaagctgcccaggagccgtggcggtgaagtcgtgcgtgcgcggcggcacctgcagcaacgtggctggccccgtctgcagatggccttgatcgttgcgttgactggagccgccgggttccttgcctcgcatctgctgcgactggctggcgtcgacgcaatgctgttgcgctacccgatggcggtactgcaggcctacggcgtgttcctgctgctgatgtggatctggatccgttggcgctgggacgacgtgctggatggcctgtcgtcggaggtgggtggaggcagcccatcggcacacggcggcgtcgccgaatcaccgtggagcagcgtcggtggccgttccggcggtggcggtgcgtctgcctcgtggaatgagtcggcaccgccgagcgaggtcgaggtgagcgaagtgccgctggccgggctggctgaagacgaagcgggcctgccgttgctggccctcctcggcatcgtcgcgctggtggccgccgtcctgctggccagcgtgtgggtggtgtggtcggcgccggtactgatggccgaactgctggtggacgcggccattgccggtggcttgtaccggcgcatgcagggcatgcaggtgcagggatggtggcgggtatgcgtgacgcacacgatctggctgctgctcggcctgctgctgttctttgctgtgctgggttggcttgcgcaggaacttgtgccgggtgcgagccatctgctgcaggtcattcaagcgctgtag

SEQ ID NO: 504766 - DNA, 501 bp, Stenotrophomonas maltophilia
atgtctcttccgctgccggagcttaccgttggcttcctgctgctggcggcgttgtccggcggcagcgagatcgtggagcaaacccctgcgcaggcgctggccgagtgggagctgcagggacgtgctgacggcctggcgcgaccggacacccgctgccaggatttcctgcaggcgatggggcggaagcctgcaggcctggaatacgtaggctgcagccaggacgacacgtcctacatcaaaccgatgcaagcccactaccgtgttgcaggtgcccgtgccgagcaggtcgaagcgtatctgcacacgacattcggcatgccgatgctgcgttacacctgctgtggctggagcaatggcgggccctacagctggcgcgaaggtgcagacacggtgaggtaccagatcgggatgggcattgaatcgctgccgcatcagcggagcgagtggaagcgcatcgaagcattcgacgtaacggttgaggtgctgcggcagagtccctag

SEQ ID NO: 504767 - DNA, 507 bp, Stenotrophomonas maltophilia
atgcgagcgagcattctcaagctcatgcccagcccccaactgcttgccggccggcgatccatcgtcggtaacgtctacgccatcaccatggtgtgccggaaccgccatcgcgtcttcgattgccctgccaatgccgatcttgccatgcagctcctcggatcgatggaccgggaaggcctgactgcgtcgcttgcctgggtcatcatgccggatcatatccactggctggctcaactacgtggccattcgctgggctactgcgtgcagcgcttcaaggcgcgcagcagttttctgatcaaccggcggcgagggaaccagggtgcaatctggcaggcgggttatcacgatcatgcgatccgcagtgacgcgtcgctgcacagacacgcttgctacattctgtcaaatcccgttcgagccggtcttgccgcgcagatcggtgaccatccgtacgggtggtgtcgctggccgctgagcgagctggagtcggtccacgaggatgaattctga

SEQ ID NO: 504768 - DNA, 201 bp, Stenotrophomonas maltophilia
atggagagaataaccgagcgccgggagttggagcccgtggggcggatgaccggcatatccgccgggacacgccgtaaacccatccctgggggctcgatcgcgccatccatggcgctcacggtcccagcggatatgcgggtcatccacctggcaggttcacggcgggcgtcgggtcagctggtcgcaaaggtcaagggctga

SEQ ID NO: 504769 - DNA, 858 bp, Stenotrophomonas maltophilia
gtgcgcaaccacctcgacatcttcgatcacgacctcgcccgcattgcagcagcggtgcgcttgcctactgccgccacagcatgctgcggtctgagcgcaggaacctcaggcggggtcctgcagcgcaacttcgaatgcggcggcagagcaatgctctgcgtcggatcggatccgtcgaagcctggacagggtgagattgaacgagacttgccactccgctcgcctcacagtgaacccatcctccgtttgtccaacgtcgggccaattgctgtaggaagaaaacgagctcctttgaatgtagaggtcgcccagcaaccgtccaagcctcagccctatggcggggctacaaacgtggaaactcggaagcatccgcccagcattctcgacactgaggctatgcgcctgatcggacattgtcttacgtgcagatttgctcgcaatgaactcttcgaaagcgaaagctctcccgtcttccatcaagctaatacaagccgtcgaccatcggacgacggcttcgagctcagcagaaagaaaggaaagaatgacccgctcctgacgagctctctcttccatttcacgttgctcagcagtcgccgccttttccctagcctctcgttgactagtctgagagagctcgttggcctgataagcgagatacgcaaccgcgatagcgccgaggagagcaatttccgcagcacccattgccacaccaacagcccaagcgtcccaccacacctcacaagtactgctaagcggccagcactgaattacgccgtccagcatgctcattccctgatccccctttggactcggccgcattctgccatggcccggtgcccggaggcgtgctgtgcatag

SEQ ID NO: 504770 - DNA, 210 bp, Stenotrophomonas maltophilia
gtgcatagccagctcgacatcctcgatcacgacccagcccgcatggcaacggccaaccgagcagccgccgagcgcgcactgcaccacgtgcagttcaccgccaccgtccgacaggaacgccatgagtactacctgggcgaagccgaacgctgggaacacctccccgcgcacagcgagcgctccaccaacagcaaggacatgcatgcatga

SEQ ID NO: 504771 - DNA, 804 bp, Stenotrophomonas maltophilia
atgagcaaccacaagacgacccaagcggacgtgtggctcggtgggacggccaggctggagcatgtgctgccaccgctaccgtggacgacctacaaggcctacagcgacgcaagcgacctttcttccgtatggcttcaacggctctcaccagcgccgccatggagcccaccgcggcctcttcttaggccccgcgaatatacgtgcgttgatctcttcgagggctttctccagctccgtgtccgcaatctccagatgcgtgtccagaatgttcaaaatcagaatccgatcttcagcgccaggtcgcagcgcacttctaacttggtacttcattttcctggccgcgacagcgcaggccaccgcgaccgcaagtccttgggccgctttgtgcagctcgtggatgcgatggaggttttctcgtacggaagccggagcttgaagaacgtcaccgccctctgcctcaaagctttcattaatcgcttgggcgtgatcgtgttggatgtggtgccgcaacttccgaatgcgttcgtgccactcctgaacatcgggctccaagagcgtggacaggccaagggctcgttccagcgcttcttcccgtctgcgtctctgttctcgaagcgatatttgcagcgccagaaacgcggcaaagaacgtcccaattgccgaccatgcatcccagtcaaccagacatttactgccgagccaccagcactgactgacgccatccagcatactcattcgctgatccccctgtggattcgccggcattctgccacgccatggcgcgtggagagctgccatgggtga

SEQ ID NO: 504772 - DNA, 912 bp, Stenotrophomonas maltophilia
atgggtgaccggctgctcaccgctgtacaggccaagcacacagcgcgcgtcttcctcagcgaggcgcgagcgcggcggcatggcctcggggctactggttctcgttcaacgccgctcagcgcgcgcgtttgcgcgccaccgccccgccccactgccggagccgccgcgcgcaccggcactgccggcccaactggatctgttcgcatgagcgctctagcgtttccgctcagcctcaagctcccccagcacagccgccaagccgcgattgctggcaatcgctcgatcatgccgggtctccccaggctttcccgagttgagccattccatcgcccacgtccgaagcaccaggtttgccgcttccagaactacctagtggcgagcattcctctacccattcgcgagccgagggccgaacaccatgagcagagttgcgcccggctccagaagctgttgcgccgcatccccctccagatgctcaccgtggtgaacctgcctagccagtgcatccaacaaatcggcgagcgaccggtcagcgccaggagccacggtgctcggatctgctgcctttccccacagtttcctttgccgccttgtcgtctagcaacctggcctcgtaccagtccagataccactccaagtagtcgcggacctttggcaggcgcgccgagatccgcccccccccttgggtcagttctgcttctttcgcggcacgtattctctccgcctcacgggcgtcaggttgcccaatggaccaacgaaagcgctcgccgccttccgcccagtcgaggtgggccttgctgccgcgccagtagagtcgaacctttgccattcctctgcaccttcgatcgcggcatagagcgccgccttttcgtacaactgctttcccatgaagcggcgggagtgagcccatag

SEQ ID NO: 504773 - DNA, 393 bp, Stenotrophomonas maltophilia
atggcggtaggggagctccgtgaccagctgacccagaaggacgaacagctccgcgaagctgtggaaagcaaagagcggctcgagagtaagggtgagactgacacgcaggcactcaaacatgcagaaaaccgcattcgtgagcttgagcgcgacaaggccgggctagcaaatcagatgcattcgctcaagcaagccgccacccaggggtcgcagtccaccagcgtcatgaatatgctgacattgggcgattacttgaatcgagtggagaattcgcgcaaggtcagaaaccagcgttctgagattacagatctttcgcaagccatcctcccgatgaacgagactggcgagaaggccggcttgcatgaggagctgggtcgccccatcccgaagtga

SEQ ID NO: 504774 - DNA, 243 bp, Stenotrophomonas maltophilia
atggccagcaccccggcaccgaacgccgcgccgcgcgaggtcgccaagatcaagctgggcgacatcaacgcgcgcatcgccccgctcttgatcagcgccgacggtctggccctgctggggttcaagccgatcaatcccaccggtgccactaagctctacgaccaggcgcagttcccggacatgtgccgggccatgatccacggtctgcaggatgcggccgaccagtacccgctggccgcgtga

SEQ ID NO: 504775 - DNA, 291 bp, Stenotrophomonas maltophilia
atggagctctggcgcaccagcgaactgcaggccctgcgccagatggagggccgcgacgcgatgaccgtcgcggatgccctcggacgctcgccccgtgcggttcaagacatggcccgctgccaagggatgccggtaccgcgccagcgtcatgcccggtactggccggccaccactaaacgccgcgcccggcagctccgggccagcggcaacaccgtcaaccagatcagcgccgcgctgggtgtcccgttcgggacggtgcgccgctgggtctacgaaggagcagcagcatga

SEQ ID NO: 504776 - DNA, 222 bp, Stenotrophomonas maltophilia
atgaccagcatccacgtgaagcccgtcttcagtggcgcgaccgaccgcgaaaaggaccaggcccggcagaagctggcgagtgacatcgcacgcttcaaggccgccggcggcaaggtcgaaatctcgggcacaagcggcatcgacaagagcacgatcagccgcaggcaggtggttgaggctcgacacggtcgccgcggtggtaagaaggcagcaaaggcatga

SEQ ID NO: 504777 - DNA, 258 bp, Stenotrophomonas maltophilia
atgagccgccacatcgaacgccgcgcgcccaaggagacgctgggcttcgcttggggccggttcccaaccgtcgacggcagcgcaatcacctggcgcctgtaccgccgcgaccaccgccgtgcgctgcacatgcacgcagagaccttctttgcccaagaagaccgcgcagtgatcgccaggcacctgcgccgcgcgcgccgccaccttcgcgaccaggtggatgagatcgacctagttgcgatggggctggcagagtaa

SEQ ID NO: 504778 - DNA, 690 bp, Stenotrophomonas maltophilia
atggctctgggatttggtgaatgcctttcgatgaaggcggagtgcgcgacgttctgggcggggtggggagccatcgccaccgcagccgtgggtctggtgactgttctggttgctttccttgcgtggcgcacatcccggcaagccgcaactatcgctgcgaggcaacacctggactctcaggttctgtggaaggcacaagcccgaatcgttggacgccttttgcttcacgaagtgaccgctgtgccgaagaagatccagacctacgcggctgaacttgacgcattgcccacactcgacccgagcagggtcaaagattggcgcgccgtgaaaaacgcagttgagcgcctcgccgaacctttgttgcccagcgcggaagccatcgccgagcggatccactacctgtccgtagatctcggcgcggacctggcgacgatgatcagccacagcagggatatcaacgcggctgcctgccacatcgccgcgcacatccacgagcaccagccgataccgacgatcatggctacacgtatcagcgtctcgtacaccggcaggcggatggctttggaggtgctgcggcagcaacttcaattcgtggctagcatcgctcctgatctggtcgatcgcttccgcgaggaggttctcagcgaaagcgagcgcaccgagggacaggaaagaatcccggtcgcttaa

SEQ ID NO: 504779 - DNA, 594 bp, Stenotrophomonas maltophilia
atgatcgttgctgaagtcatggttccttgcttcaatttcgcgcccacctgtcgacttgactggacggccgtgtctgctatcggtggttgggctgctgccattgccacatttctcgcggtgtacgttcccgctcgcaactacaaggtggataacgagaggcgtgccacgcgagagcgtcagatctcgtttatcgaaatcaatcgtcttcttccgaaaatcctcgacgtgcgggatcaaactaagacgattaagaacaagatcctgcctgaaataccgaaggccttggccgctggggccgacgccaagactgtctcaggtcttctgagggttaaggggcaagttccatttgtcatcctctctgatggcctggaaatgatctctattggtgtctccaatttgcagtccagccttgatgtgctgaatgcctttctggacgccggcgaggagattgatatgtatggtaatcatccttttcatagactctctgattacacgacggctcttgacaacgtggagctcgccgcccagaacgtcttgctcgcgataaagaagctcaccggtattgaccttggaggccacgaacaagggagttga

SEQ ID NO: 504780 - DNA, 141 bp, Stenotrophomonas maltophilia
atgactgaccagctgctcaccgccgcaatggtccacgtgttcgccctggccgggtttgcggccggcatcgccaccctgtgggcgatcagccgcgcatgccttgccgcgcgcgccgggctgcgctggtgctggcggaggtga

SEQ ID NO: 504781 - DNA, 183 bp, Stenotrophomonas maltophilia
atgaacgcccagctcttcccccgcgaaccgcgccgcatgaagcagccggccaaggacgtgctgcgcgagcagctggtggtcgcggccgatgaagtgatctgccttcgcgcagaggttctgcgcatgcgcgatgcagcaacccaggccaccaagcagctgcgcgctccgctggccacgaactaa

SEQ ID NO: 504782 - DNA, 366 bp, Stenotrophomonas maltophilia
atgagcagcgaaagaagcggaactgacccatggtgtgcgcatcctccccggctgcccactgtcagggatttcctggaggcgtacctggactggtacaaggtggaagacccgactacgcacggcaaggcaaagagcgaggtccgactgttcattgctcgcttcggccatcgatcgatcgacaccctgcgcccgatggaaatggagtcatacaagacagatagcctgaccaaggacaaggtggcaccagagaccgtgggcaaggaggtgcgtaggctgcaggccgcgttccggcgtggcgtgaagtggaagaaactgtacttcaacccgctggaggaaacccaggcacgcgcggcgtccgcagcgtag

SEQ ID NO: 504783 - DNA, 444 bp, Stenotrophomonas maltophilia
atgctccacgcatttgcttactccagccacatatcggctgggctttccgatgaaaccctccgccagatcgtctcgggctctgccgcgttcaatcgccgggtggacgtcaccggagcactgctcgtcgacgggcagcggtttttccagtacgtcgaaggcccgcccgacggcctggaggcggtcaagcgccgcatccatgacagtcgctcgcatgctgccgtcgtaccggtactggacatggccatcagcgcgcgtgctgttccctattgggccatgacccgcatcgacaccgggcagatcatggtgtccggcctggtcaatgcgcgatgggacgaatttggccatgccgttccgggcatggatcagctcgtcggcctgctgcgtccgcactttccgcgcatcggcccgctcagtgcgcaccatgcgtccgtcggatccagatga

SEQ ID NO: 504784 - DNA, 468 bp, Stenotrophomonas maltophilia
atgcctgtacccgctcaaccttcaacggaaacacgtgcctcgcccgccgagttgttcgaggtcgtcgtcctgcgtgcaggcacggccctgttcgcgatcgacgtacaggtggccgtggaaatacgcggccccgagaccttcggccctgcagacccacatggcaggcggaacctggaggtacgagggcagccgttgccggtggccgacctgcgcaggctcagcgggcaaccggcattcgattgcggcagcccagccatgctgctgatcaccgccggcactgcaaccctggcgctggcggtagatgaagtgctcgagatcgaaacaccggacgcatctccagacgcagcctcgccggcccagagtcgaccgttcaacttctgcagccggcacgttcgggtggatgccacacgttcggcttcgctgatcgaaccgcagtcgctgctggctgcgctcgcggtgcgggactga

SEQ ID NO: 504785 - DNA, 1956 bp, Stenotrophomonas maltophilia
atgatcgccggctcgatgtcactgtctagtgctgaagctcgcactatggttgtgatgagcgatctctcaggtgccggcgttcggcctgggccatcgggctatcttacgggctacccgctggacggaagcggtcgttacgtgctggccaggacttgggctgccccagagatgccgcgacctggctgcgtctggacgcattcgctcatagtcgagaataccgatctcgcgacgctcacctcgagtgacgacctactcgcggcgtttcggcgcccatcgaagttggattctaaggaaggctacgcggcaccaattgaattgcctgcagggccgctccggccgccgaaagtacgcggtcatcgcgctcgaactatcttgaacgccgtctacgctgcttctacacagcaagtaatagctattgcagaagacaccgccgaggatgaagatctcctcttcgcgatatggatgcagcaatggccaagactgcgtcgaacttttggcttttgcacgttggccggtatggatcgctccagcaagggagttcgacttgacgtccagcttgtcccagatctcgatcgcagcgcgagatctcgttttccgggagcggttctgccgcaggatatcgaatgcgaaaacgcgctggctgtgctcgttcgtgatcttgaaggattggatgagacgaagttgcgcgagttcctgagaagggcgggcggcgatgttgatggtggccgccaggcaatgctccctctctgtcgcttgcacagcgcccttttctcaggggaccgccccgacctcatagcggcgatcgatgctcttgatggactcggcaagagtcaagcccggtccgttcgctcgatggtggtcaagtacgcaattgaagagattgaccagcttgatgagaaggtcttcgactttgtagttgaggcgatgaaggaaggtgcggtatcgagggacgcgcatgtgtctgttaatgccttcacctctctctggcgcaggtcaccaagcagattcttcaccattattgatgcgaaggtcgatctcactgagcaattgatggatttactactttcgatgactgcggaggaccttatcctgggcttagagtccaatccggagctcagttcgcgagtagcttccgtgcggccggatttaatggagagcgcagatttctggcgtggtaaacaggcagatttggatcttcttgagcgaattggggacgatcaggttcctctggtagtccctgcgctgatcgaggccggcatcgaggctgccccttcgatcatgatctcacgcatgaacagcgggacgctggcttccattatcggacggataagcgggccattgcttgaggtgtggttgagagagctcgcgagcgatccagacagagtggcgacagtgctgtcttcgggtggaatatcgcggcgtgaggtgctggtagcgcttgcgaagtttcttaatcccgattctgtgccgaacgagctcggtgaagatccttgggttatggcaacgcggggcgctcgcggtcgccttgaccaaatcgaggaagacttcttctcagcttttctcatgtcgagagctctcggccccagctctcgctcccgctccgagcttgttcatcaatcctatgaagctgtctatcgtgcattggagcgagggcggctgccttgggaggcagagaggctggtgaccgatcggttaaactgggggggcttgtttggctggagcaattgctcgcgtttgagggacaccgttgtcgatctgttcgtcagcaatcacctagatcctggtgtatttgggcgactggcagacgagggacgcctcgcgttgtcgctgattgatgaggctgcccgaagtccgcgcggtcgacgatatctggacgaagtccgtagtgcgctaaaggatgcgcaggaaaaggcgttcagggctcgggcggattacatttcaaagaaactaaactag

SEQ ID NO: 504786 - DNA, 864 bp, Stenotrophomonas maltophilia
atgaacgaggcggcttctgacgtcgcgattattggtctgcctggatcgggaaagaccactctactggccgccgtatggcacatggtgcgggagaaaggcgcctcaactagtctgaccttcgcgggcctgaaccaaggaaactacgaacatttgaattcgctcgccaaacgatggcggtcgggaaagcgtcagcagcggacccagcttgccggcacaaggtccgttagcatgcgattaagtgacggcgccggacgtatcgtcgaagtttcatttcctgactccccgggcgaagagtttagtcgcatgtgggagcggcgggagttagatgaaatgatgcgtgcgactttgctcgcaccagccatcgtgctcgtcgtaaatggggacatgatccgcttccccgtgtggatcgccgagcagaacgcgattcaggctaggattggccttgcgcctgaagcagccgaggcagtcgactggagggcggaacttgccccgacgcaagtccaagtcgtggagctccttcaatttcttatgtcgggtaccttagatgtcggagctcgcaagctagccgttctaattaccgcgtgggatgtagtggaaggagagggcatggaacccgaggaggtgctgagtgttcacttgccgcttctcgaccaatatctgagaaacgctcgtgatccgtggacctggcgggtgtggggattgagcgcgcaagggggagtatatgaggacgccgactctaatgaggtattgcctgaaaccgaggctctgcgtgagctcggcaggccttctgacaggataaaggtgactgatgggaaggtagccagcaccgatatcacggctccattggactggctgatccgataa

SEQ ID NO: 504787 - DNA, 1017 bp, Stenotrophomonas maltophilia
atgtcggggcaaactgcacgctgcgccaatgccgagtgcaaatttgacgaggatgggcgctgcgttgaaggctttgcgctggatgagtgtcctcacgtgtcgatgctggatgttgaggctattaaggaagtctatgagccggactctcgacgcgaagaagcgaaggtccttccactcccccttggtgagacgcttgcccgcactgatgcttctagtctgcagcggcggagatcatcatgcgctgtcggcatcgtcgcgccaaatgacgccggcaagacgagcttaattgcgagcgtctacgatcttctccagagtggcccgatcgacggctttggttttgcgggatcttcgacattggtcggcttcgagaaggtatgccacaacgctcgaacctcttcgcgaagagacatgccgcatatggagcgtaccagtgcgggcgcagatgcaacgttctttcatctcgatctccggcccaaggagggcgagcttgtatcgctcttcatcgctgaccgctcgggcgaagactatctggcggtagccgatgatcttgggcgttcttcgggtctctttgaacttcggcgcgccgacgtgctgacagtacttgtgaacggtgagcatctcgcctcttccgcgcatcgtcacgagacaatggcaatcacctcgcagatggttggtgcacttgttgaggctggtgcggttcgacgcgggtgtcggttggctgttgtccttactaagcaggatatcgtgttggcatcagcccattcggcgcgggttagtggcgacttcaccaatctcttcgatggaatcatggaagactacaacgcctacttcggtgagattgagtcatttgtcatcgcggcgtctccgcggaacattgtggatgtccagagagggttgggcgtagacaggctccttcgtttttggctgcgccctgccgtgagcccgccaccggcagacccgagtcggaaccagagcactcgcttgatggaccttctcgacatcgtggaggcaaagtaa

SEQ ID NO: 504788 - DNA, 1095 bp, Stenotrophomonas maltophilia
atggccaagctgcaggggatgagcagtaattttgccagatggtattccgacgcattcatggatgatggtgatcggcgcgatatgcggtggaacggcctagtggagctggctggaaaggccaatcacgtcactatcgaggtattggcgcgacttgcattccagacggccgtcccggcatttgggaggaagggcgagagcctggatgacgaatataaaactgtcatttcaaccatttctggagatgatccgcaatttgacggcgcgcgggacgtgcgagagctgcaggtgcttgcagcggcgacgttggagcgcctgttgggcactatgcctgatgccgcattggtgatcacgactacggcagtcggagggttgcggcggccagatttgccgatggatctagtaggcttggcagagaatgcaattgtcgctctgtcggccagcaagcatatccggcagaacgacgatgaggtcatcctgtcagctccaaaggttgagttcgaggtcgacgctgacgagcttgcgacaatgcagcccgagaaaatcaaggttcattttgaggagctgtgcactgaaacgtcaaccgcgatcgagagggtcgtggcggggcaaaatagtgtggtgaaagagctttatcgccgcatcaggcttggtgaagaggagctgcagatgctctggtggctgaccggtggctacagcagaacggtggaaaagccttttagcaaagtgccagatctggccaggcctttgatctttgctcaagagcttggcgaactgaccagtatcgcacctggaccaggatcaatccgggcgatgctcgggagggctggggtgggaacaggtaaggtcagactcatcgacgctgtcaataccgtggacgctgcatgggcgaagtcggtatctacttcgcagctcgtatcacctgcaacgacgccgatccatttcgcactggagcagcgctctgagatgggttccacagatgcatggcaggccggttggtcgagtcttactgggctctcactggaggctcagcttccgtcttccaagctggcagagcttttctatcgtgagcacatcttcctgaacgtggagtcctga

SEQ ID NO: 504789 - DNA, 1314 bp, Stenotrophomonas maltophilia
atgttgatgctacatatctccgacatccactttaagtcgccgcagtgtctggtgcccgagcaggatccagattccgcgatccgtacccgtatgatgcgcgatctcgccgagcaggttcgagcgctcggaccgattggcgcaatcctcattggtggcgacgtggccttcaagggggctccggacgagtatgcgacagcttgggtgtggatacagcagcttgctgagatatcgaagtgtcctcttgaacggatttttgttgttccaggtaatcacgacgttgatagatcggtcgtcgcgaagaacgtgccgacccagaatgcgcagcacgtcgtcgcgactgccgcagctgccgatagggaatggcgtctttcgcagcagctgagtcatgaagcgagcgggcagtctctcctgttgccacatgccgcctataatgagtttgcagctccacttatgtgccagatttggccagcaaaaccattctggcatcaggacattgagttagaggggggcgtgaaactgcgcattcatgggctcacgtccacgctgctgtcaggcagagacggtagggatgatgtgcagggtacattgtacttgggccccaagcaaactgtgttggatcccatcccgaatacagcgaatatggtgctggttcaccatccgatcgactggcttgtggatggagatgcggtagacgacgcgctcaccggccgggcttcgttccacctatttggtcacaagcacaagcagcgggccgtgatggcggacaactacgttcgaatcggcgctggtgccattaacccgtcacgagccgagcagccttatcttcctggctataatttgatcaatttggaggtggagggggctggtgcagatcgtcgcatcgaagtgtctcttcatcagcggcgcttgcaggacaatcccgagatctttgtcccaatcttgacgcagcagaaggcaacagttttccgcgcgagcatcctagtcccagaggaggagccactgccggtcatcggtgcgtgcgagatcgccgcgccggcggtgtgtcgcaaggtttctcagagtaatggcccggaaacggttgacgcccaagatgcggaggcggccatgggtgaatctgacaacagggacctgctttatcgattctggcgcctgacgagcgggcagcgtcgcaagattgcgctggatctttgcctgcttgaaagggacgaactgaagctgccagagcctgagcgatatggtcgggcgctgattcgagctggtgagcgaaatcttatcaacgaagtagcgaccgcagtcgctaggctggagaaatga

SEQ ID NO: 504790 - DNA, 921 bp, Stenotrophomonas maltophilia
atgaaccagacctatctcgataccgcgcgcctgctgacgcaggtggcaccgctggtgtttgttgacgatacctttgccctgaagggcggtacggcgatcaacctgtttgtgcgtgacatgccgcgcctgtcggtagatttcgatctggtctttcccgatcacacgttgccgcgtgatgaggcgctggcgcgcatcagcgaggccgtccggcaagctgccgaacggttgaagaagcgagggttccagacacacgcgccggcggcagcagcaggggagacgaagttgctggtgcgtcgtggctcgattcaggtcaaggtcgaagtcaacttcgtcatgcgtggcacggtgcagccggtgcaccgcgcctcgctgacgccgatggcctgcgatgtgctgatggccgatctggagattccggtggtgtcgctggaagacgtgtacggcggcaagctggtggcggcgctggatcggcagcatccgcgtgatctgttcgacgtgatgcagctctttgcgcacgagggcatcacgcccggcatccggcgcgccttcgtggtctacctggccagcagcaatcggccgatccacgaagtgctgttcacgacgctgcgggacatccggcacgactacgagcacaacttccaaggcatgacgaccgagccggtgccgcttgatgcgctgctcgacgcgcgagaacgcatggtgcgcgaaatccagcagggtttggacgacgacgagcggcgcttcctgctgtcgctggccgctggcacgccggagtggtcattgctggacatcgcacacctcgaacaactgccgggcatccgctggaagctgcacaacctggcgcagttgcagaagaccgatgcgaagaagtttgccgagcaggccgacttgctcgccacgcgacttgctgcggtatcctaa

SEQ ID NO: 504791 - DNA, 708 bp, Stenotrophomonas maltophilia
gtgctctacacccggttggcaccgggaacgccgctgacctcgctggacttggcggcgttgggcatctctgctgacctggctgttcactacgtccgggcagggtggctcacgcgcctggcgcggggggtgttttgccgccccaacgatcccccggcgcttcatcccagcctgctgctgttgcagcgccagttcgaggggctgcacgtcggcggcaagtcggcgctggactggtacggtgtgcggcagtacgtagcgcagcagccggtgctgcatctgtatggctggaaggccgcacgcttgccggaatggttcacggaacgattcccagctgaataccaccgcaaacggctgttcgacgagcagccggccgccttgttgcacgttggcccgttcgagaagcgcagcggggcgccgcaggtgtccgcgccggagcgcgccttgctggaactgttgagtgaggttggcgtgcgccagcccttacaggaagcccgcgaactggtggagagcgcctatagcctgcgcgccaatgtgctgcgcgagctgttgcagcgttgcacgaacgtcaagaccgtgcggctgtgcttgcaactcggccgtgaggcgtcgctgccttgggtggccaagctcgacccgtccacgctgccgacaggcagcgaccggccctgggtgtcccgctcggccgatggcctgctggtgctcaagccatga

SEQ ID NO: 504792 - DNA, 309 bp, Stenotrophomonas maltophilia
atgcgatgtgtcctcgccccgtctgttgtgatgcttgtcgtgctgctggctgcgtgcggcgagcagccgaccgacaaccttgcggatgccttgtccgtcgatcccgtgcggctcaaggcattgcgcgcgcaatgcgcggcccatccacaacaggttatgccgaccacgggcgaggacgcttgccgcgccgcagctgaggtattccggcggcgcttcttcgccggccagtccgggccggacgaataccggacgctggcggacctgccgccgatcccgcccagcttcgatgaaccagagggcacgccatga

SEQ ID NO: 504793 - DNA, 465 bp, Stenotrophomonas maltophilia
atgagccaataccgcctgaatctctttatccagtcggagcacgccaagcgcctggacgagctggccgccaagaaaggcgtgtccaagtcgtccatcgtcgcggcggcgctcgcatcgtggctgtcgcccgatgccgccgaccagcgcgaggcggccattgccaagcggctggatcgcctctcgcgccaggccgagcgcatggagcgcgaccagaacatcgccatcgaaacgctggcgctgttcattcgctactacctgaccgtcagcacgccagttcccgaagcgcaccaagaggccgcgcgcgcccaaggcaaggcgcgcttcgagcaattcgtggagcagttgggccgccacctgctgcgtgggcgcagcctggtgcgcgacgtggtggaggaactgcatccagacccaatgcggatggaggacgcggcggcggctgcgcaagcacaggagcgtgcgtcatga

SEQ ID NO: 504794 - DNA, 279 bp, Stenotrophomonas maltophilia
atgaaaaggatcatcccattcttgcttgcagccgcgctgactgcctgcggccagtccgaaacgcctcagaaggccaacacatcggaagcgaatatcccgacggtggaagaactggcggccaaccccgaccggctcaaggaactgcgccagcaatgcaagacagatcgccccaagctgggcgacgtgctgtgcaatcgggtagccgaggccacgcgcaagcggttctatggcgacggcgaaaccccatacacaccaccgaaggaatcccccaagttctga

SEQ ID NO: 504795 - DNA, 255 bp, Stenotrophomonas maltophilia
atgcccaccgacaacaacgaaggcgaaatcctcaccatcaggcaggtagccgactacctgaaggtcacggaacggacgatctacaggttggccggggccaagaaaatcccagccttcaaagttggagggacgtggcggttttcgcgcgcagacattgacaactggatcaagcagcagtccttggaaggactcgacgctgcgcgcgagggtgtccacacggccaatggccaaaccaacgatggagtgcgtaagtaa

SEQ ID NO: 504796 - DNA, 2769 bp, Stenotrophomonas maltophilia
atgcttggattgactcttcgggatgagtttcggggcaagcgcctcaaagggacggccattgagctttccaacgactcgaacacgggtgccacccagatcgccgcacaggcattcttggagatcacctatcccacccacgatctgctgaagggcatcgaagccgtaggccccaaccaagggcggccagtggtcgtgatcggcgagcgcggcctgggtaagtcgcacttgatggcagcgctctaccacgcggtcaacgatgccgcatcgacgggcgcatggctcaactcctggtcaagcacgttgggtgatcccggcatcggcaagatagcactgcgcgatggcatgttggtcattggcgagagcctgcaccggcaacgctacaagttcctgtgggacttgctgttcgaacgccaccctcgcggcgaattcatcaagggcaagtgggaaggcatgggagcggccaagaccgacatcccctcagacaagctcatcatcgagctgcttgagcatcggcccgcgatgctcctcctcgacgaattccagacttggtacgacggcctgaccaataccaagcagtacccctggaagcaatgggcgttcaacttcatccagatcctgtcggagatcgccaaagagcgccccgacctactcgtgttggtgatctccgtgcgcaatggcggaagcgatgcttaccagcaggtgcaccgcgtcaacccggtggccatcgacttcaaggcgggaggcaatgccgagcgtatccagcaggatcgacggcggatgctgttgcatcgcctgttcgacaaccgtctgcagattgcagacggcaccatcgaatcgctggttgcgcaacacgtctccgaatacttccgcctgctggatgtgccgcccgccgagcaggatcgcaagcgccgtgaattcactgagtcctggccttacgcaccgcacttgctgcgcctgcttgaggaacaggtgctgatagccacggatgcgcaagaaacgcgcgacatgattcgcatcctggccaacctctacaagagccggggcgaagcggtgcctgtgctcactgccgctgatttccggctggatgacgatgcctcgggcattggagcgctgctggattcagtgtccaacgaacaccaccgcaccctgcgcgaaaaagcgcagcacaacatcatttcggtgaccgaggcggtgtacgaccacgccaaccttgccccacacctgcaagaaatcctgagcgcgctgtggctccgctccatcgccgtcggcaatcttgccggggccgatcctgccacgttgcaggtggacatcacccgcagcaagccggtagatggcaatgcctttcaggtcgaactggcgaccattgtcgaaaacagcttcaacattcaccaggatggtccacggttggtcttccgcgaggaagaaaacccccgcgccaagctgatggcctgcgcgcgcaacgacaagctgttcaccgatggttccgatcaggtgcagcttgccaagcaggtgcgctacgtcatcggaggcagcgatgaggtcgctaaaaccttccgcgtgattgccctgccaaaatcgtggcagaacgatccgtggacatcgctcgacgaagccgagcagccggagcgctgggatgaccggctgcccattctggtgctgccagatgagccggaaaaaatggaccaaacactgggccgctggctcaaggaccacctgcaaaagcgccgcaacaccattcgcttcttgttgccccgtgccggctccaccaacgcctttcaggaccgtgacctcctcatccttgcccgcgccgaaatgaaggctcaggaatggagtgggcagaaccccgaatacaagaaacttcataaggaatttgaaggcacgctgcgcgagaacctgaagaagcgcttcgatcggtttgccatcctgcaccgctatgaccaccagaacccgcagcaatccctgttcagtgtcgagcacctgaaaaagcaaggtgctcaaatccccgagggcatcgaagaaaccctgaccaacgacctctttgtccccgaagatttcgaagacctcgttcttgaagccgcctcggagaacgcccccctcggcaagctgctgcgtgaactgcaagagcctcgccctgctggtcaggattgcatcccctggctgggggaaaccgcgatgaaggaacgcatcctgcgcttgtgcgcgcgcggcaagatcgccatcaacctgcgcaatctggagcaccttcaaacccacgcgggcgaggacgaggaaactgcatggcggcgcttgcgccccaagctctcctacaccgggcgtcagcttgatgaagtgttcctgatggaaccctcggcggtgcccgcgaccggaggcaccacgccacccgcgccgcagccgcctgcaggcggcaacggtggatcgggcggcgatacttttggtggcggcactaccactccgcccgtctccccttccggtggcgacaacacccccggcggtggtgcatcaccgaatggcggcgacatctttggtagtggcacaagtaccactaccaaatcacgcaccccgctctctaacccgccaacctcgccgctcaacctgatcggcaagctcgaaggctggggcattggcccagccacgcctgtggcagaagtctcgatcaaggtgtctgctggtcagaacacgcagattacgggcgcgcaactcaaggaactgctcaagaagctgcctgatggcatgacctttgagctgagtcttgagaaggaggacaactga

SEQ ID NO: 504797 - DNA, 1020 bp, Stenotrophomonas maltophilia
atggcgttggatgctcaaatcttgcagcgcctgacccaggacagcccgagagaagcgtggcgcatcattaccgatcgggtgctggagattgcctcgaaaccgctggccgaaggcaatgcccccagcgaggtggtcaagcgagaccgcgaaattgccgagctcgatttgtttctggcctccagcggctgggatctgtggcgggtctttggccaacccgaaatctgtggtgttgaacgtacctcaaaccggcttacgcgttggtggagcgaacccggctatggccacagcgtcgcgcgcgccgtgctgattctggatgccctctcgctgcgcgaactgccctggctgctgcaaggggccaaagagcgtggattcaccctgcacacagtgggcgccacagcatctgaactgcccagtgaaaccaacccgttcgcccgcgcattggggctgaccagccgtagccagctacaagccaacggcggcggtttggcccacaagctgcaaccggcgcagaccgaaaccatcgacttgccgtggaaggactgcgagggtttggtggacaacgcctcgggtgcgaagaattgggtgttctggcatcactggccagacgtcaagctgcacgactacggcgcgggccaaggtctggagctgctgaccagagatgccgcgcagcaactttccagtgacgacttttggagctttattgagcgcctcgccactgggcggcgcttggtcatcacatccgatcacggctacgccgccacgggctacttccccgatgccgatggtgaggttgcctcgcacctcaagcagactttttcaagcggtcgcagcaaggcaggcaatggcgacgcaggccccttcgttcctcccgtcgccttgcaaatcgacagcccgcatggcgcacacctgctggcgctggggcgcagaaagtggcgcagccaaggcggctacccgactttgacgcatggtggtctctcgctgctggaagtgctgtcaccttggcttgagataagtagatga

SEQ ID NO: 504798 - DNA, 1029 bp, Stenotrophomonas maltophilia
atggcacaagctgatttattggttgatttggtcaaaaccgcgaccagtggggatcagcttgccttccgcaaggccgcagaaggattgatccaagaagaaaaacagaagggacaccgtttgctcgcggagcgactgaccaaggcattgcaacccaatgtcactcaagctgcccgctccccggtcaccaagatgagcggcagcgccccacaaaaagatctgttttatgaaaccacaccagagcgcaatctggatagcttaatgctgcctgaaaagatcagggtgcagataagagagcttgtggaagagcaacatcgtgcagagctacttcatgcacacaaccttcgtgccagaaacagcattctgctcgcaggcccccccggaaatggcaaaacaacgctggccgaagcgctggcgttcgagctgatgtatcccctcatcgtcgtccgatacgaaactttggtgggaagctatcttggtgaaacttccagccgattgaaaagcgtgctggactacgctaggacacagcgctgcgtcctattctttgacgaattcgagacactgggcaaagagcgcggcgacacccatgaaacgggagagatcaagcgcgtcgtcagtaccttgctgatgcagttggatgaaatgccagactatgtagtggtggtcgctgccagcaatcaccctgaacttttggacaaagccgtctggcggcgctttcaattgcgcattgagttgctaacacctacccgagcacaactgacgcaatacatcgcctcgattggccagcggtgtgacgtgaattttggatatgagccggcaaccttggcgaagcacctgttggggttgaatttcgcagaaaccgaagagttttgccttagcgtagttcgccgcgccgttctcgacatgaagacggaaaatgcccagcaagtgaccaagctgaagctggagcaatggaaaggccgtttgaaaccaaccaccggcaaaggcgcggcgactgtcaaggaagcagccaaagagggaggagatagctga

SEQ ID NO: 504799 - DNA, 2514 bp, Stenotrophomonas maltophilia
gtggctcgactaggcacgcaactgaccacactccaacaggaatttgatcgctataaagccagcgttagcggctccgtggctggattcgagcctgaaaccgttctggtgattgaaatagcaggcagcgtcaatgagttccgacaggccgtcgaagccattggactggagtggctgggggaatgggatgttgatgacattccccccgacgaggatttttttgaagtcaacaccaaaggggagcgtgcgaacaaggcggtcaaggggcggatgttcctgtctctcagcaatgaggcagggatgcggcaactcctgtcgctatgggagcaatggaagaacaatcaggcgttgccgatggggaaaaccaagtggcgcgatgtgttcaatcaaactgttcaaatccgccgctggggcattgaagaaaccctgcgcgagacaggcatgctggggcgctggagagatgccctcgaccccaacaactcggaggaatcgatccactgtcagatcgagctgttctatcgcaagtcagaagacaggcgcagacaaagcgagcgcaatattgccgcattgctggaagcggctggtggccgagcattgagcagcttcatcgacatgccagagatcgcctttcatgcggtcaaggcagaattgcccgtagaacgtatccggcagcttttatacgatctggattccgaggcgcacgataccgacattcagctcttcaagtttcatggtgtcatgtatttccgtcccaccgggcaaagtctcgccgtaacggaagatggcgaaggcgttgacactgaaattgccgagggaatagttgagctgccacctgttgcagccattctcgatggcgtgcccaacatccagcaccaagcgctgaaggggcgcctattgctggacgatccggataatctttcttcgcagtatcaaccaggagaaagaaaacacggtacgtcaatggcttctttagttgtgcatggtgagctggtggatggcgaacctgacccattgccacgtctggtgtatgtgcttcccatcatgcagccagatcctcattccatgaaccgaagcgagcatgtgcccgatgaggtttttttcgaggatcgcattgcgcgcgctgtcaggcgaatgtttgagggcgaaggcgcagtgccagcgcaagcacccggtgtttgcgtcatcaatctctccattggagacccggcacgcccctttatccacacgcccagcccttgggctaggctgctggattggttgtcatggaagtaccgtgtgcttttctgcgtcagtgcagggaactatcaggacgccatcgacattgctttatcggggccggactatctggcattgaccgactcccaaagggtcgatcatgtgctgaagtgcattcaggcccaactgtccgtgcggcgaattctatccccggcagaatccatcaatgccatcacggtgggagcgacacacgccgacggcgttgacaattactatccggggcaacgtacagatcttctgcccaacacggtgctgtttagccctgctgctcggctggggcatgggtttcgtcgttccatcaaaccggaagtattatttccaggtggccgacaactgtatcgcactccaatgctggacagccagacggtctatcacgtggatagcagcattgccgcgccagggcagaaagtagcatcggacagcaaccaagccggtgctttttctcagaccattcatacgcgcggcaccagcaatgctacagcgcttgccacccgcagtgccgcacgtatttatgaagtgctggatgcactgcgcgcggaaaacgaagagaacattccgccagggctgatttccgttctcatcaagacgctattggtgcatggagccaaacaagatggcgatgccagcaaggcaatcactgcggcactgaaaacatccgataactcacgccagttcaaagagctgttggcacgttaccttggctatggcgaggttcaaatcgaacgagtactggcatgtaccgagcagcgcggtacggtgctgggctgtggcgagattcgtgagaatgaaattcacgaatatcggttccccctgcccccagacctttccggcagtcaggcgtggcgccggttggtagtgacgttggcatggttcagtccaatcaacccagaccaccgaaacttccgtgaagccaagctggaactatcccccgttggcggctggagtggtgtacccctcaagctggcgcgccaagatgcagatcacaaccaagtgttgcgtggaaccgtgcagcacgaggtggtggaaggctctaaacagatcgctgcataccaagatggtgacagcattctgctgcacgttgcctgcaagaaagatgcgacggcccatcttgacgatgccattccttacggcctcgctgtgaccctggaggttggcgagggcattcaaattccaatttatcagcaacttcgcacccgactgcagccgcaagtcgctgtcggcgcagttggaggacagccttga

SEQ ID NO: 504800 - DNA, 3216 bp, Stenotrophomonas maltophilia
atggccaccaaaaaagaactactcgcacagcaagtcgccaaagccgtaggtgcgggaaaacctgtcgcgctggaaaccgtcgatttcaacgatcccaaccgtcccaagacctgcctggaggttgatttccccatcctgcccgtcaatcaggtagcgatcatcgaaggcaacgcgggcaagccgatttaccagatgtccaaatggtgggcgcggcgacgctccagcgtgttccgctcgatgctgatcgcggcagccaccaaggccccggaagacaaatcgcacgcggccaagctggtgtgggataactactacgccaaccaccagaagaaaggcgcgttcaagcacctgaaggtggcggacatcttcatgggcggcggcaccacgctggtcgaaggctcgcgcctgggtatgcagatggtcggcaacgacctgaacccggtggcgtggtttgtggtcaagcaagagctggccaatgtcgatctggagcaggtaaaaaagctgctcgccgacatcgaggccgaggtcaagccgcagatcatgccgtactactactgcgacggcccggaaggtgagaaaggcacgtggacgcatttgccgacgaacaaggccatgcccgccgatttcgacccgctcaccatcccgcagggcgagcgcaaggactaccgttacgaaggcccggaggcgatctataccttctgggccaagcacggcccttgccaggtgacgggttgcggccaccgcacgccgatcatgaccagcccggtgatggcggtgaagaccatcagcgtgaagcactgggaacacacatgcagtaaatgcagcggcgaattccacgttgaagaggaagccgcaaggatggcgccggatgcgccgctggttgtcgcgccggatgaacacccgttctccgtgctcgacaaaaggcgcggcgtgatctgcccgcactgcggccacaccgcgctggtgaatctgggcaagggcaagaacaagaaggtggaactgagcctgctggtgcatccgcaatggctggcgggtgaagccaagcaggatgcgaataaccagccctacggcggctcggcgcaggacgatgtggccgctacaacgcgctgggacagtgcgcgcgcctccaagattcgcctattggaggtgcgtggcacgctgccggaggtagtgacctgcccagaaacgaaaatcacctttaagcctgatgtcggcacggttcctaaacggtctaactatgcctgtgcttcctgcggcacagtgcaggatgtaatgaactccatcaaggcgaccaagaagagcgggcaaatggctgcttacgcggtgcagggctatgcacccaagcgcgatgcagcgggcaaaccctacagtggccgcttcttcgcggcctacggcgaagcgcacgcgcggcagtacgacgccgcatttgctgaatgggatgcacgcaaggacaccgacctgaaagactactggcctcgctctgaagtgccatatgggttcatgaccgcagttgccaacagcgacatccgcgagaactatggctttactcactggtggacgatgttcaacccgcgccaattgctggtgcaggcgcaactgctcaaggccgtagtagaggttggcacctatgactggcaggtgcgggagtatgttcttggtgcgtatcagcaatatttgcgcaaccagaacatgttctgcttctgggacatcagtagagactgccttgctccccatctgagcaacaacaattatcacccgaagaacaatgtcgtcgagaactgtgtgttccctttgctgggccgcggtaactgggcttcttgtgtcgagggaatcatcgaaggccgcgaatgggcaactcagccgtgggactcgttgagtaacgaagcgctgaagcgtcgcgaccccgtgttggctgaccagttgagcggcaaaagcgaaaaggtcttccccagtgacccagtgctggatgtggccgtgcatcagggctcgtccaccgatctggcgcagcttgaaaactgcagcctcgatctggtcatcaccgatccacccttcggtggcctgctgcactactcggagctggccgacttcttctacgtctggctgcgcctggcgctcaagggcaagtacccagagatatttggcgcggagtacacgcccaagtcgctggaggcggttgccaaccgcgcccgcgagccggaagatccggatggtttctaccaacgtctgctcacccagtgctggcgcgaggcgcatcgcctcttgaagcccagtggcatcctggccttcaccttccaccacagcgaggacgagccgtgggtggcggtgctggagtcgttgttcgatgccgggtactacctcgaagcgacctaccccatccgctccgacgaaaccaagggcgaaggcgagttcggctccaagaccatcgaatacgacatcatccacgtctgccgcaagcgcaccgaagaacccaagccggtgagctggggccggatgcgccgcgaggtgatggccgacgtgcgccaattgcaggccatgctggagaaccacgccaaggaaggtctgccagcggcggacatccaggtgatccggcgcggcaaggcgctggaatacttttcgcgccactacggcaaggtgtatgtggatgaaggccgcaccatctccgtgcgcgatgcactggtgggtatcaaccagctcatcgacgaagacgccgacaagggcaaggagccgccgcccgtgaatgccgagccgatgacgcgccaatttctgcgcaccttcggcacggccacggagatgaagcgtgaccagctgcagaagtttctgcgcggcaccatcaccacaccggatgactttgagcaacgcggctggtgcagcgaagagaagaaggtgtttacgcgcaccgcgccgctcgatttcgcccgagattggcaaggcaagcacaagcgcaagctcacctccgatctggatcaggctttggtgctgatcggtgcctgtgtcgatggcagcggcatcaatgcctcggacacgctgacgaacgacaacttcaagccgcacatcgcgctcaaaccgctgctggaatggctgcagaagaacggctcggatcaaaccacccgcaacgcagcctcgcgcgcggtgtcgatcttttcggcctggcaagccagccaggcacccaagccactgcaggtttcgttgttcgatgacgatggggagtatgcgcaatga

SEQ ID NO: 504801 - DNA, 513 bp, Stenotrophomonas maltophilia
atgaggcaggtgctcgatacggtatggcaacggcgcggcaccagttggctgtgggacgaggaagcgcgcaacaccgtgtgcgcggcggacgaggtttggagcctgcggcagtttttgcaggcggcagcccccggtgcgcagggctggccggatgacctgcccagcaacggtgggcaaacgctggtggtggccgggctggagggcagccttgatttgctggctcccgatcaggccgacatctggctgggcgacacaatcaaacgcgccatcctgtcatttcaggatgaatacgcaggcgaagcagccttgatcttctggctgccgcagggccagggccgtttgcgcgtgcaggcctccaccgacgcagtgacctggctgtgcgaagcgccgcatcggggtcaactactcgactttggccgccttctgtggggtgaggccaacgagtatccgcaggaaatcctgctgcgcgagggtgcgaaagcggccggcctgtttcacctgcggattacttga

SEQ ID NO: 504802 - DNA, 2790 bp, Stenotrophomonas maltophilia
gtgcaagcagacgattttcaggattcgtttcagcccggcgagcgcatcacccacaccgaactcggcccaggcgtggtgctcgaacccgcgcacgatggctatctgcgcgcgttcttcggcgtggtgggcgagcgccgcgtaccggccagttcggtacgccgcgagcgcacccgtaccgagcgcattctgcaatcggtggcaggcggctccgaccgagcacgcaaggcatggctgtcttacgaagcgcacgcactgccggtgatggaaagcgcctcggcgctgacctcggcgcgcattgatctgctgccgcaccaggtggtgctgacgcaccgcattgccactgcctcaccacggcgttacctgatcgccgacgaggtgggcttgggcaaaaccatcgaagccgcgctgattctgcgtgaactggccagccggggcgagctgacccgggcgctgatggtggtgcccgcaggcttggtgaacaactggcaccgcgaattgaacgaggtgttcaatctcgacttcgaggtgtttggctccgaaggcgacatcaccgaccgcaagaccaatgcatttgccaaacacgaccggctgattgccagcatcgacaccttgaagcgccctgcccgtatcaagcgcctgctagatgcgccacgctgggatctggtggtattcgacgaagcgcatcacctgaccgcccaccgcacgggcggcaaggtgcgcaagacggaaaactacaagctggccgaagcgctgaaggatcacgcgcgggatctcttgcttctgtctgctacgccgcaccaaggcaatcacttccagttctggatgctggcgcagctcttgaaccccacgctgtttggcagtcccgaggacatgctggaaaaccgccatcgcctgaatacggtgatgttccgccgcaccaaggctgatgcatgccaacccgatggctcaccgctgtttgcccggcgctgggtgcataccgagtccttcctgatgaaccaggaggagcggctgttttacgagaaactgcgcgaatatctggaagacgggttcgatctggcccgccgccagggcaatcaggggcgcgcactgggcttcttgatggcgatcttccagaagatcgcggcatcgagctttgccgccgtgcgccgcacgctcaagcgccgcttgttgatgctgacactgcacgaggcgtttctgcgcgacaaagagctggacatcgaaggccgcgaacgcctgaccgaggaagcgcgcgagctgattcacgaggaatttggcttgccgcgcgacagcgttgggcgcagcgaggtggatcgcgtgttggctgatctcaagtaccggctggtgaaaaagctggatgaagaggcgctggaaatggcctccgacccctatggcagcgagtattcggctacgcacgccgaagaggcagcgtctgctgtggtggatttgcatctgcccgaggagcgcctgcgcattggtgacttgctgcgcatcttcccgcagcagcgcgagaccaaggcacaaaagctgctcgatggtttggggcatctgtggcggcagaacgccaatgaaaagatcgtgatcttcgccacctacctcggcacggtcgatctgattgcccgcgagattgaacaggcttatcccggccagggcgtggtggtgctgcgtggcggcgaccacggcgccaagctggcagcagagcggaagttccgcctgaaagacgggccgcgtgtgctggtgtgtacagcggctggccgcgagggcttgaatctgcaatttgcgcgcattctgttcaatttcgacctgccgtggaacccgatggacatggagcaacgcatcgggcgcattcaccgctatggacagaaccacacggcgcaggtctacaacctggtgctgtcggacaccatcgaggggcgcatcttcctgctgctggacgagaagttgactgaaattgcacgcacggtcggcaaggtcgatgaccagggcaatgtcgccgaagaccttcgggcgcagattctgggacagctttccgaacggttgaactacgaccgcctgtaccaggaggcgctgtctgaccctgaactgaaacgcacacaggtggagctggaagcggcactgtccaattcccgcgaggcacggcaggtggtgttcgacctgtttcaagaccttgacggtttcagcctcgatgactaccagcccttctcggatgtgtcctccagcctggatcggctggtgcgttttctgtcggcggccgtggcagaccgccagcagaagctgctgaaggtggacgaagaaacctacgaccttgtgacagtggatggcacgcgccgtgcacggttcacactgaaccgcgataccgccaccagcagggacgatctggaactgatgggcttggatcaccccttggtacaggaagagcttggccgctggcgcagcgtgacgcccgaagacatcggcattgcggtggctggggatgttgacgagccggtgctgctgtccttgtggatggtggaggcgtctgccggcaacggtgagcgccgtgtggtggtgcagcccatcgcagtcaagcaggacgggacacgggtgccgactattgagcggcaatgcgaacggtatctgcaagcatcggcgatctcgccgagctttacaccggagcagcggctggcactgtttgcccacaccgtggaaccaactttgcaacgtgagttgaaacacaagggcgcggcaaatggagatggcagctattcggccgagctgattggatacgttgagatactgaagacgcccgcctaa

SEQ ID NO: 504803 - DNA, 774 bp, Stenotrophomonas maltophilia
atggtcaatccccatcacctcgcgcactggtatcccactgcggcgtacctgtttgtcctgtggctcgatgcgctcgcgctggcttgggaatacctgcgcaggaatcccgactaccggcttgactggctgcgccatcatcgccggttgcaagctgcgcagcaggcggcgcaacgctggggcttgcgcctgctggaagacccagccctggatgcgcgcgacgcgcatccggcctggctgcccggctctgatgccgtggtgcagctctacccggatgccgatccaccactggacgccgccgcgttcgcgttctggcacatccccggccataaacacctgctgcatgatggcaagggtctggcgttgatcgcgcgcagtcctggtcgctgcctgcgcttcgcgctggcacccggcctgcaagacggcatggccgtggtccatgcctatcgcggcggcactaccgcgcctgcgcgcggctatgcgccgggcgcagccatttccgatgccaagcccaggccaacaccggccgcgctgctggaactgcataccctgcaagcgctcgacgccaccctggcgggcgcgtccttgcgcgaggtcggtgaaggcttgttcggcgtggatgccttggccgattggtacagcgacggtggcctgcgctcgaaggtgcgccgcctggtgcggcgaggcgatgcactgatgcgcggcggctatcgccagctagcacaactttcgccgcttgagaagggtcgttctgatggtgacgcaaaacgaccctga

SEQ ID NO: 504804 - DNA, 348 bp, Stenotrophomonas maltophilia
atgaatccgctcatcaccgaggacgaccgtgtgtgtctgctggcccacggccaggcccgcgccgctggccgggccatcgacccggtgcccgtggtccggttgttcacgccggacgcgcatgtgacttggctgctggccgcgctcgatcccgccgatggcgacaccgcctggggacttatcgacctggggatcgggatgccggcgcaaggcaccgtcaagctatccgagctggccgtcatcgtcgggccgcgccagcagcccgtgatgcgtgacctctatttctgcccgacgcacacgctgtcggaatacacccggctggcccagcgcgacggtgctatcccggactga

SEQ ID NO: 504805 - DNA, 294 bp, Stenotrophomonas maltophilia
atgcagaagcgatccgtccagcccggccgaccggctggctccaccacccatgacgccgagttggctcacgccttcggcgctgcggtgcgtgcgctgcggatagagcgcggtatcgcgcaagaatcgctggcgcacctggctggcgtcgaacgttcgcacatgggcaagatcgagcgcggcgagcacatgccaacgctggcgatcatcttcaagattgccggcgcgctcgaatgcagcactgcggtgctgatgagcgaggctgaaagccagctcgcatcggcagccctgccgtag

SEQ ID NO: 504806 - DNA, 987 bp, Stenotrophomonas maltophilia
atgcaccaacaccgacatgcgtttcgcatggcatcgggtatagcaatcaccgcatgcgccacattcccgaccactgcgtcggctggcgatctggttgaacactggatggagacctcccaggaagagatcctcgcctactggacgaacgaaagactggctgctgtgcccgacaagggagacgctcccatcaagccgccggggcaggatcctctgcagaccgacggtgacccgtggcggggcacaggaccacaccctgtgggtgtcgggcggcttttcctgacacgcccggatggcaaggacgcttcgtgcaccgccaccgtggtcgacagccttggtggcgacatcctggtgacagcgtggcattgccttgcgcagctggacgagcaaggtgcggtccactggagccaccaccttctcttcgcaccatatttcgagaatggcactgccccgctgggaaggtacccaatacggcggatcgtcgcaccgcaggcctcgatttccggcgcactcgacaccagtttcctgcagacccacaccggtgcatccggcgaaggaccggcgcgccacgctggcagccaggccatccgcttcgatgagcgacccgcagccggtccccgcgttacgttcggctaccccgtttcagccaatggcatcggcctcatccccccgacgccctggtacgaattcggaaatcccgaatacaccggccagcaactggcctattgcgccactgcacgtgttgaactttcggcgtgtcgacccttcggttcggagaaaattcttcagtggggccttgcctgcgtgcagggcccgggctccagcggaggaccggtactggaagacttcgatttcgacagcggccatggagtcgtcgtgggggtaaacagcatgggcgtggtcaacgacggccgcgcccacctgtgttcggccgagaccgaggcactggctgagcgtgcctaccggtacatccagcagcagaccccctga

SEQ ID NO: 504807 - DNA, 672 bp, Stenotrophomonas maltophilia
atgatcgaactgctggacctgcaacagaccctgcatgccttcgcagcctgcaacgatgatgatgaggtgtacggctccttcggttgggtgcacgccaccgatgacgacctgctgcaggcgcgcttctggttgccacccgatgaggatgccgcattcgatgaggacagcgaggttccggctgaagcgcgcgcgctgggcctgggcacgttcctggaacctgcgacgtttgcggacgtgctcgacgtgcagaagcggcagcgcccgttgtcttcgctgcgggactacgcgcaggcgctggcgtactacgccgagtacgacgcgttccggcaggtcgaaggcatcgatgaggccctgggcgaagcggaagctgcggaacaggcggctgcacgcgaggcgggtgtgggcacaggcatcttcgcgtccttcgatatggcattgaacgcgtgcccggaagcgcagatcaaagcggcggcgcagcgcgtggcgcgcctgctggagattccggtgggcgatgcattggcgcgttgccgcgcgttgccgctactgctgggtgaagcgctggatcggcgtcgtgcgcaggcgatcaaggatgacttcgccgacatcggcgcgacgctgcaggtgcgtggctacaagccgttcccgtggatggacgcgcccgcattgcgttga

SEQ ID NO: 504808 - DNA, 393 bp, Stenotrophomonas maltophilia
atgaatgcagtggatccggaattgaagaggttgctggcaaggttcgatgagagccacaccttcgaaggctgcgagttgaccagtccggaaagccatgggatcgacgacgatacgccgctgcatatagcggcgttcaataacgaagtggatctactcaaagagttgatgccgttcgtcaccaatatcgacgtactcggggatattggattgaccccgatggcgaacgcggtgattagtgaaagcctcgaggccgttgtctaccttctctcctgtggtgcggaccccatgatcctggatgaagtgggcgattcggtgctggagatcatgaagaggagacccgtcttcaatcagttggttgagcagatcgagagcgagctgccgggggcggtttga

SEQ ID NO: 504809 - DNA, 1323 bp, Stenotrophomonas maltophilia
atgagtggattgaccgaacgcgatctgagcgtccttggaaactatgccagagacggcaaccgcgagctttactggaactacctgtcgcaactgccgggagccgatgggtacgggacactggcactgggtgttgtacgcaatgacagcctgccgggacgcgtcgcgaacacctatgcacagaactatgcgaagacccagcaggaagagggatcccggttttcaaatgcacagttgaccgagcggcaatgggagtcctttgggcagaccctgctcgaaagagatcttgagttgcggcagcagtggatgaacgagcgccgcccagacctggcactgaatctccccggcaaggatgtgatgctggcccacgaccgtgcatttgaacggcatgaactcgatcccaactgctggacgccgcgcgtgttgctgcaggcggctgaacagaagagcggccacgagaagctggaacagatctggaccaacatgctcaacaacgactacgccggcggcccgcgcgtgggcaacaccagcgtcgatgccatcagccagatgggatgggcgaagggcggccagtacctgacccggttgagcgtgctggaagccacccagatactggaagggcgctcggcggtcgatccgaacgtcatcggtggcaacagctactacgcgatgtacttcgaggcggacaggaaatgggccagcgtcagttccggcggcggccacgtgtcgatgcgcgagatcaccgaccccacccgcatcgccgaactcaacgacgctcgcgacgtccgcctggagcgacaggagaaacgtacccggttccacccggatgacccctatcggaccataacccgcagcccgcttaccgcagcagtggacgacatgcctgatccctcgttggcaccgactcgcctggccgacatccgtccaggccaccgtgagtacgcactgatgcagcaggtacgcgaaggcgtggccgcgatcgatgccagcgccgggcgtacccatgatgaggacagcgagcgtcttgtggcgagcgtgatggcgttggcccgccgcaaccagcttgaacgtgccgaccatgtgctgctgagcgcccagaccgccgacagccccgcagggcggaacgtcttcgtggtgcagggcgggatgaacgatcccgcgcacctgcgcgtctcgatgcccactgacgtggcggtgcagactccggttgcgcagtcgctgcagcagatcgaggccgccagcctggaccaccaaccggcggctgtgcagcgccagcaggacattgacgtgcaggctcgcgagagccctgggatgcggatggggtga

SEQ ID NO: 504810 - DNA, 1524 bp, Stenotrophomonas maltophilia
atgctgtacgacgtcgtcattgccggtgctggcccggttggcttgttcctgtcctgcgaactggccaatgccgggtgttcggtgcttgtgctggaacaggccgggtccgccgactcgccgttgaagcgcctgccattcgggctgcgcggcctgaacacccccacgctggaggcactggatcggcgcggcctgttggacgcagtcgccgcggcgcaggtgctcaagcccgacaagggcgcgccgccgcccggcaccgcccattggttggcacagccgcgcgcgctgggtggtcactttgcgggtattccgttcgcgctggacagcgtggacaccgggcgctggaactggcgcctgccgacgccggtcggcacccagatggcgattgagctgcaggcgctggaacgggtcctcgccgaacgtgcgagcgcgctgggcgtctgcatcgaacgcgggcgcgcggtagaggccgtgcaggctggcgaggcggaggtggtcattgagactgctgacggagtcgtacgcggtcgttggctggtcggctgcgacggtggccgcagcaccgtgcggaagcagtgcggcttcagcttcgtcggcaccgatccggaattcaccggccattcgctgctggttgagctggaagatccttcggtgctgacgccgggccggcagaacaccgcgcagggcatgtgcaatttcaatccgccgggcgtgctggcgctggccgatttcgacggaggggctggccatcgcgcgcccctcgatctggacgctgcgcaggctttgctgcggcgcgtgtccggttgcgatgcaacgatcacggccctgcatctgcacagcacctggaccgatggcgcgcgccaggccagcgcctatcgcaaggggcgtgtcctgttggcgggcgacgctgcgcatgtgcattcgccactgggcggacagggcctgaacctgggcatcggcgatgcgatgaacctcggctggaagctggccgccgtggcgcggggcaaggccgatgaggcgctgctggacagctatcaggctgagcgccatccagcgggcgccaaagtactggactggtcacgcgcacaggttgcgctgatgcgtcccggggccggttcgcgcgcgctggcagcgatcatggccgacctggctggcacccgcgatggggccacgtatctggccgagcggatctggggtgtttcgcagcggctggatcttgctggagagcacccgcttgtcggcaggagcgcgcctgacttccggttggccgatggccgccgcttgggcgaattgctgagaacggggcagggggcgctgcttgtcttcgaccgggcatcttcgttatcgcagtttgcccaacgctggctgcctcccatcgcctgcgccgcaaatactggagatgcggcatcgggcctgggagcagtgctggtgcgcccggatggcatcgtcgcctgggcctgcggcgcaggggcggatatgtccggcatcgattcagtgcttgcttcctggcccggttcgacgcggtga

SEQ ID NO: 504811 - DNA, 297 bp, Stenotrophomonas maltophilia
atgaatggcgatgcgggtgcatcgactggccatcaggccaaggcctcggccgagcgacaggcgatcgagcgctgcggtcactggggagcaactgattgcaaggttctgtacacctattacaaccagtgctatgcgtccatcagaaccggccggccggacaatggaacgatgttcaacgcgggtgctaccaaggaacaggcgctggaaagggcgacgcaggattgtcggaattcgggaagccaggagtgcacgttcgtccactcggactgcaccaagcccttctttcaggagggctga

SEQ ID NO: 504812 - DNA, 768 bp, Stenotrophomonas maltophilia
atgcgcgccctgatcctgcttgcccaccccgagccccgctcgttcaatgcacatctggccgcgcaggccgccgagcagctgcggcatgagaacctgcaggtggacgtgatcgacctgtatgcggatcgcttcgatccgctggaagcggctgaccaccatccgcatcgcctgcatcccgaccacttcgacgcccaacgcgaacagcggcacagcgctgagcagggacagctgcccgccgaggtgcagcgccatctgcagctgctgcgggccaccgacctgctgatcctgcagtttccgctgtggtggttcgcggctccggccatgctgaagggctggctggaccgcgtgctcgtctacgggccgatgtacaacagccggcagcgccacgagcacggcgtgatgcagggcaagcgcgcgttgctgagcgtcaccaccggctcgtcggcgcgggcatgcgcggcggatggccgcgagggcgacacccggttgctgctgtggccgttgatgtacagcctgcgctacgtcggcttcgaggtgatggaaccgttcgtggtgcatggcgtgcgttccgggctgccagcggatcgggtgcaggcgcacgatgcggcactggcggcggccaccagcgactaccgcgaacggctggcaggctggcgacaatggccgagcgtacccttcaacgacagcggggattttgacgggggtgtggcgctgcgcgcggaagcgaccgcccacagccctttcatccgccatcgcaacgtggaatga

SEQ ID NO: 504813 - DNA, 624 bp, Stenotrophomonas maltophilia
atgcctgcgtcccgactgccccccttcagctgtttcgacggccatcgcctggtcgtttccggtgcgccggaagtggccgcgctggccctcaaacagctgcgcgccgacaacgccgcaggtccgttgctggtgttcgacaatgccaccggccgcacccgcgatttcgatacgcgcggcagcgacgcggaactgctgacgcgggtcgccgaagcgtttccggcgccgctgcagacggatgttgaaacccacgccgaagaaaccgaagatgcaccacccccacgtggccgcggtcgcccgaaactgggcgtggttgcgcgcgaagtgacgttgctgccgcgccattgggcatggctggccgaacagccgggcggggcctccgtggtgctgcgcaggctggtggaagcggccagccgtgcgggtgcagacaaggaccggcagcgccgcgataccgagcgcgcctatcacttcctgcaggccattgccggtgatctgcccggcttcgaggaagccatccgcctcctgtttgcgcatgaccgcgcgggcctggaagcggcgttgcaccgctggcccggggacgtgcgcgatcacgccctgcggctggccttcgatatcccacctgtttaa

SEQ ID NO: 504814 - DNA, 645 bp, Stenotrophomonas maltophilia
atgctggatgcttccaccctggccgcgcagctgcggcagccccatggcgacgccgcgctggcggtggccgactcgatgaaccgcagcaacagcgccctgaacctggccgcgatcgggctgctggcggtggcggccggcgagcgcatcctggaggtcggccccggcaatgcggccttcgcgccccagctgttgcaggcgccgggcagccagtacctgggcgttgaactgtccgccgccatggtcgaggccggcaaccggcggctggccagtgccggcttgggcgaccgggcggcgatgcggttgggcgatgcccatgcgctgccggtggacgaggcatccgtggatgccgcactggcggtcaacaccctgtacttctggcccaacctggccccggtgctggacgagcttgcgcgcgtactgcgccggggaggccggctgtgcctggcgttcggcgatgcggccttcatgcgcagcctgccgtttgccgccgatttccagctgcatgagctggacgcagttgagctggcgatgcgcgtatcgggattcaacatctcggcctggcgcagccatcgcgaaaccgccgccagcaatgacgggcagacgcgggagaagcatttccacctgctgctggcgcatcggcgctga

SEQ ID NO: 504815 - DNA, 2088 bp, Stenotrophomonas maltophilia
atggactccgaagcgccggccaagcaatacgcggtgccccgccctcccgagggctgggacataacccgctggcttggcccccatgatgagatcgagatcgcgggcatcgtcatccggggtggtctgttctacacaggcccgcggctggccacacctggcacgcgcgagcaagagcccagcttggtcaacggcgttcttggtgtcggtcgatacggggactaccggtccacgacgcgctactggggtggttacgcagactttgaaccggcggaacggcacgcctacttgaagtggcttgcttcggaccgcaccgatcccggctgcgcgatccaatacgtccgattgttcatgtttgggctggagcgtcgcgtcttgctggactcggtgagcgatccggcttccaaacaagactggcccgctattgaggcaatgcttcgccgcttgtcctctgcctatgctgccgtgcatccgcacatccacggacatgtcaacagcctgctcgactggatggctttgtcggaggcaggcgaccagatctacaacgccccgctccccacgttcgagcgaagttacgaactgcccttctacatccgcttggccttgggtcagtgctcattggatcgcgctcccgtgccggccaccctggccacggcttgggtgcgcctcaatcccgagattccgatgcgaaccgccgcgaagcgttgcgcagaagaatttgatcggcttttcgcgctgcggtatcaggagacgttcggcccaggccttgtactgccaaagaaccgcaccaagcttaagttcacgcaccgccccttcaacccggtgctcgatcgaaccgaggccggtacccgaacgtttggtgacatccccgatgtcaccgcgttgcggcgaccgttgaaggcgcttcaagagcttgtcgtgcagtgcaccgaagaccttgcgtcgtttagccgtctggttggcaagacgccggaggccagggaatctctggaaggcctcttgcttcttccaccggagatctggccaatctccatgcaacaggtgcttgcccaaatcgcttcagatgcccaagcaggaaacctgtcgcttcggcagtccgacctcttgggcaagtttggcctcgtcggcggtccattggccaaagacagaattcgggatctcgcccgggcattggagcaatccggggttgggatcgaacccaacgtgctggagggagcgcgcgtgcctggtgaaaacgatccgatcgttctgttcgccatgctcccagaccaaagccacaagaccgacgcccaggcctatcagaccgcccagttgaccctgcagctgggctcaacggttgcccaatctgatggcgcgttcagcacccacgagctcgagcacctttcgcgcgaaatcgagaactggacgcacctcagcgagggtgaccggcggcgactgcgcgcgcacctcgaccttttggcaatggcaccgcttgcccttcccgcactgcgcaagaagctcgacccgctcagtgaggacatcaaggacgccatcgccgggtccatggccacgctcgcccaagtcgacggaatggtctctccagaggaagtccggttcctggagcgcgtttacaaagccttgggcgtggatcccgctcgggtgttcagcgacgtccatgcaccgcgcccatccaaagccgcaagcgcatcgcccaaggctgccccaggcgccttccaactcgatcccgaccggatcgccgcgctggagcgggacaccgcccaagtctcggcgctgctcgccaacatttttaccgacgaagaagcggctccccctgatcttgcgctggcggaagcggcgttctccgagacggagagcgccggtcagttgctcgggcttgatcaagcgcacagcgcattgctgcggctgatgctgtcgcgcccggtttggacccgcgctgagctggaagatggcgcagcggacatggagctgatgctcgacggcgcgcttgagcagatcaacgatgcatcgttcgacgcttacgacatccccttctccgacggcgacgacccgttggagatcaaccccgaattcattgagaagatcgagcaatga

SEQ ID NO: 504816 - DNA, 1299 bp, Stenotrophomonas maltophilia
atgagcagcccaatccgttccaaggaccgcgacgcggtgatccaatcactgcgcgccggcgtcgtccctcgcgccggtcagcatttgatccaggtcgggcgcgcccgcgaagtgcaaaccttggtcactgacatcgataggctcgccgatggcggctcttccttccgcctggtggtcggcgagtacggcgcaggcaagaccttcttcttgaacctcgtgcgcgccattgcgatggaacggaagctcgtcgtggccagcgcggacttgaaccctgaccggcggttgcacgcgtccggcggccaagcccgctctctctacgcagaactgatgcggaacctggccacccgcaccaagcccgacggaggcgccctgcccggcgtggtcgagaaattcatttcgactgcggttgccgagtcgaagtcccaaggcgtatcccctgagcaggtcatccgcgcaaagctcgaacagctgagcgagctggtcaacggctatgactttgcagacgtgattgctgcctattggcggggctttgagcaaggcaacgagcagctcaagtccgatgccatccgctggctgcgtggcgaattctccacgcgcaccgacgctcgcgcggcgctgggggttcgcaccatcgtggacgacgcgtcggtctacgatcaactcaagctcatgggccgcttcgttcggctggcgggctacagcggcctgctggtgtgcttggacgaactggtcaacctctacaagttggccaacgcccaggcgcgcaatgcgaattacgagcagctgctgcgcatgctcaacgactccctgcagggcactgcagtaggccttggctttgttctgggcggcaccccggatttcctgatggacacccgccgcggcgtctacagctacgaggcccttcagagccgtctggcccagaacactttcgccatcaatggcttggtcgacttcagtgggcctgtggtgcgcctatcgagcctgacggccgaagatttctacgtcctgttgaccaagattcggcatgtttacgccgcaggagatgtggcgaagtacctcttgcccgacgaggccatccatcagttcatgacccactgcgccggccggataggcgacagtttcttccgcactccccgcacaacgatcaccgcattcatcaacctgttggccgtcctggaacagaacccaggcgtggactggcagtccctgatcggctcggtcgaggtggcgcaggaccatggtggcgatggagatctggccgtacaggaggacgacgaactggcgtcgttcaagctctaa

SEQ ID NO: 504817 - DNA, 2175 bp, Stenotrophomonas maltophilia
atgtccgactctggtgccttccatctgctccatcctcgcatccagcgctacctgtgggccgagcaatgggaggcgctgcgcgaggtccaggagttggccatcccgctcgtgcttcgagcggatcaggacgtgatcatcgccgccagcaccgcctcgggaaaaaccgaggccgcttttcttcctgcgctcacgcaccttctgaacaccgacgaggagggcctgattgtctacatcagccctctaaaggcgctcatcaacgaccagtttgaacggctgcagcggctttgcgaggaccttgaagtccccgtgtggccttggcacggagacatatcgggctcgactaagcagcgattctttaagcacccccgtggcgtgctcctgatcaccccggagtccctggaggcgatgctctgcaaccgcggaacctccgtagcagccgcgttttccaagctcatttacatcgtcgtggacgaacttcacgcgttcattggaagcgagcgtggaaagcagcttcaatcgttgatgcatcggatcgacgtgctgttgcggcggcggactccccgcctgggcctgtcggcgaccttgggtgacttttcaagcgcaggccgattccttcgagcaggccccagtcctgcccttgtcaacgcggcctccaacgacaacgccctccagctcgtcatcaagggatacgaggagccgggagcacccaacgggccggaggacgagcctaccgccccaaacgcagtctcccagcacctgtacagaacgctttgcgggaccaacaacctcatcttccccaacagtcgccgggaggtggagagatatacccaccttctcaatcgtctcagcgaacaggacggacgcccaagggagttctggccgcaccatggcagtctttccaaagaaatccgaaccgacaccgaggccgccctcaagcaaaaggagcgtccagcaaccgccgtgtgcaccaacacgttggagcttggcatcgacatcggcgcggtgaaaagcatcgctcaaatcggcccgcccccttctgttgccagcctgcgccaacgactgggacgatcgggccgacgcaagggcgagccagccgtgctgcgtggctacgtgattgaaaatgccatcgatgccgactctccgctggagacccgtttgcgccttgcaactgtgcagaccatagccagcgtcttcctgctcacccaaaagtggtatgagccaccgtccgtcaacggccttcacctctccaccctggtccagcagctgctctcctccattgcccagtacggcggcctcaaggcagcccaagcgtatcagttgctctgcacagatccaggaccgttccacgggctgtcccaggatgcatttgcagagcttctacgtcacctgggccaagagcagattctgattcaagacagctccggcctcctccttcatggcccggtgggcgacaagctggtcaaccactacacgttctacgccgccttcagtgtggatgaagagttccgaatcgtggcatctggcaagaccttgggcacgctccctgtgtcccagctgctgagccccgaccaacgcatcttgttcgggggacggacttggctggtcgagcaggtcgaagatgctcagaagacgatctacgtcgccgcagcaaagggcggcaacccaccgctcttcaatggctcgggtgggcaagttcacacgcaagttcggcaaacgatgcggaggctataccagcaggaactggagcctgtttttctggatcctactgcctcgcgcttcttgcaggaagcgcagagcgcttactttcacttgggaatgttcggcaaacttttactcgatcaaagcagcaatctattgctactgacatggttgggagactctgcgaacgaagccatcgcgtgccttttgaatgctcagggctttgtctcccaagcagacagactgggcgtagagatttccaaaggagggagaagtctcgatgacgtgatcaaggtgctcggacggatagcgcggaccccagcaccatcgccagagacgttgctccactcagcaaagaacttgacgacacaaaagtgggatggcctccttcctacgcgactgctccagcggtcctacgcttcgctgcgcctggacttggaggaggccacctcctggctggctcacaccttcaattag

SEQ ID NO: 504818 - DNA, 2247 bp, Stenotrophomonas maltophilia
atggtcgtggccgcggctggctcgggtaaaacgtccacgatggtggccaagaccggctacgcgttgcaccgcggtttggccaagcctgagcaaatcctgcttttagccttcaacaaagcgacggcggaggaagtgggcgttcggattgctgagcagttgaaagaagtgccccaggtggagagggtccgctcaagcaccttccacgcctttggcattgacgtcatcgctaaagccacgggcaagaagccgtcccttgccccatgggtcgatcccggcaatcccggcgctgacgtcagagaggtcggcgacatcatccagatgctctgtgatcaagacaaggctttcaagcgtgactgggacctgttccgaacggtttacgcacgcgatgtggggaagtgggggcaaccggacgagcctgaagcgtatggcaacggcgttcgtgggttccgcacggcccgtggcgaggtggtcaaaagcaaggaagagcgcacgatctcggattggttgttctacaacggcgtgaaatacgagtatgagcgcccatacgagcacgacaccgcagatcaccagtttcggcagtacttcccggacttctactatccagacatccagctctaccacgagcactttgccctcaacggaagaggagaagcacccaagcaattcaaggattacctggcaggcgtcaagtggaaacgtgagcttcacgccaagctcgggaccgcgttgttcgagaccacctcgcatggcctgctcaccggcgaggcgatccctgccttggcaacggcgctgcaggcgagaggtgtacacctggtgtttgaacctgatagagaagggaccgggctatcaccggttcaggcccaagacttggcccgctcgttcagggtgtttcaacagcatgtcaagaacaatgggcttgaccgtctggacctgcatgccgccctggccgcgcaatcccaagacgggtttggcgcgcgtttgcgcatgtacctcaaaatctacgagcagattgcccaggagtgggagcggcgcttgcagcgcggcaacttcattgacttcgaggacatgttgatcttggcgtctgagcacgtggagtctggagcctacaggagtccattcgtccttatcctcgccgacgaattccaggatagctcacgcgcccgcatacgccttctgaaagcgctatcgaatcagtccgaaccacccgcgcacctgtgcgtggtcggcgacgactggcagggtatcaatcgctttgctgggtcagacatcacagtgatgacggagtttgagaagaccttcaaccatgcaacacggctgtcgttaagcaccacgttccgttgtccccaggatttgtgcgacatctccagcaagttcattcaggccaatcccgctcagatcaagaagaaggtaaagaccaccaatccgctcaccaagacccccattcttgcatacgggtttggcgatcaggcgagcatcgtggggcatgttgagaagcagctggcgcacatgcatcagctggctgtcagcgggaagctgctgccgctcaaagggccttgcatcaccgtaatgcttctggggcgctaccgagacgacaggccgggcgcaatcgaggtgtggcagcgccgctttggtgacaagctaagcatcgagtatcgaacggttcacggttccaagggattggaggccgagtacgtgttcgtcttgaacgtggtggagggcactcggggcttcccaagtcagattcaagacgaccccgcacttcagctggccatgcctgcgcccgatcccttccctgtggcggaggagcggcgcctgttctatgtcgccatgacccgtgcccgcaaacaggttcggttgtacacgacccttgcccagccttcgcgcttcctggttgaactggtcaagcaagagcacctcaagatcgaacccgtcgacggcgatgcgttggagccctgcccgggctgtggacggggcgtgctgcagttgcgatcagggccctatggagactttcacggctgcagccgattccctgcttgtacgttcaaacgtaaggtcagtcaggaatcactgcccccagtcccgttcaaaccgaacgctcagcggctatctacgagcaccaacgttggtgacccttgtcccgtatgcaagcaagggatgcttcagtcgaggagtggccgcaatggcccattcctcggctgttcccggttccaacatggatgcaaggcgacgcgaagccttgagggctga

SEQ ID NO: 504819 - DNA, 621 bp, Stenotrophomonas maltophilia
atgcagcggtggttcatcgcggaatttgcgtttctcagtaagaacgtgacgctcgtcggggagatgattgaggcgcagtgcgatcggtacgatcaggcgttcaaagaaacgatcgccgacctgaactcttacgatgcagaccgctacgccgacgtgatggttgaagaaacagcgttcattgagatgcttccgcagctgcaatggcgcagccagtacctgatgatctatgcgacgtttgagcatgcgttgcttcagattcgcatgatcacgcggcatcgcttcgggctgccaaagcaagagccgatgagcaagcaatcggctttggagcggaccaagcggtgtatgaaggagtgtggcgttcagattgactggacgatgcccgacatcgagcgaatcaagattcattcggtactgcgcaacaaggtcacccatgcgaatggggtctttcccgctgagggctttaagggcacgcgggtgggatcgttgcccggggtgaaggtaaggagcgaggacgactctgtcagcgtcgacctgggatcggagacgttgttggatgcagtggcgtccatgcatcgcttcctattgttgttggccaattatgagcatccagatttggcttag

SEQ ID NO: 504820 - DNA, 480 bp, Stenotrophomonas maltophilia
atgcgcgctccagtcacgatcctgatctgcgtcctcacggcagctgcctttacggcttgcgacagcaaccgcggccttcgcaatgaagtggaaaggctgcgcgagcaggtggcccaagatcgcctgcaatgcgaccacgcccaagggctcgaagcgcgggactccagcgaggtccggcagcgcctggtgcgtatcggtgagttgagagccgacatggaatgggatgagctggtcagcgccggcgaagccggcaccgccgagctgctcgtccaggccaaacgacgcatgtccaacccggactaccgggtccaacgcgatcgcgagttggaaagcctggaacgcgaagtcgcgctatacaagcaagacgagccacgccgacgggaagaccggcgaatcgcgtgcgacgcgctgctggcgagcaatgaagcataccgagcggcaaaggcaaagctatccgcggcgaccaaacccgaggggtga

SEQ ID NO: 504821 - DNA, 1434 bp, Stenotrophomonas maltophilia
atgcgataccgcaaaggaacggtcggtgaagcatacgcatccatgaatcgacgcccgctcggactgctgcagcgaacgctgtcaagcgccccagaggtatcacgccaacagtcaccgatgctagtcttgagctctaacagactcagaggcggtcatcaggtgagcaaaggatggatcgacagcaccatctcatcgaaggtaaagaaattcgttgatcgcaagattggaaaattcgatcaggtattcgatccatctccgttggccggggcactgcaagttgccactgtggagattctttcccttctttcggaaacatccctcgacgaagaggaagtgacctatgcactactgggctctttcacatccaacatcaggacatttgccttggagtttcctgataccttttgcccacagttctactggcagcgatactcaaagaacagtagatcacagggtagtgagtctgcatccggtgcagacttcgccttcctcattcgattgaacgatgatcgtgcccgggtagcagtttttcaagcgaagaagatggacgctcaagggagggtagacataactcaaatttctcccctcagagaaacggccgaccagggagaactgcttcccgagccccaaattctgcgactcttgagaaatgcccagtacatttcaggcaatgccaacctcgacgcaatgaagtgggtgtactacgcaggctatagcgatcacggatgctcctgctccccgctttccgaccacatatcaacacttgaaaacagcaggaccttcaacgagggggtgatagccaagctcagggagaaacggtcaaatctcgaaaaatcacataataaagacacaaccatagtgcccagcgatggagaaccctcaacacttctcaatgccaagcacagcactgacagaaaggataactgcacccagaagaacgccgagccaataaaacctcagcaattggcacgaattctaaaggacatcgcgacaaaggaatgggcggagcacccccaaaagtccatccaatgctcggaaagcaaagtccagcttacgcatttactcagcgcgggagcatctctaggaccaaacgaacaagcacctggctggctagagctcgatggaagagacacgatctcagaatttatcaagaacgcaaaaaattccattcggctcgttcaagcctgcatcaacgggggctacgatcttgaaaacagcagcaagacttccccaccccccttatcgagcaagaataatccggtactggacaaatgcaatgagttttcaagaaattacaggcacgtccaagatgctctttcagctaaagaaaggacaaagagcgcctcacagttgaaccaaaattctatagaccaccccgatgatcaaggcaaccaaaagatcgccggcccgacaaaaaaaggacgggtggtctag

SEQ ID NO: 504822 - DNA, 147 bp, Stenotrophomonas maltophilia
atgtcgaccatcgccacctacgatctcatcgcggctatcaccttggtcgttgttgtggcgatggtctacggcttcaggcgagacgaagaatccgaacggactaaaacggcgaaggtattaagcctcacgcaggctctgcgcgcttga

SEQ ID NO: 504823 - DNA, 1131 bp, Stenotrophomonas maltophilia
atgagcgggctggccgtgggggcagtgagctgcgtggcgcttgggatgtggctgcattttcagctgaaggatgagcgcatcctcagcacgctaccgccccaagtacagcaagaggtgcggcggcttgtggcagatccgcatttggacgaagcgcggctatgggcgctgtttcaggccaattacgccatcgagaacttcttgccgggcctgcgaaatcccgattggttcacccttctcgcgttgctggtgacgtctgttcctttcatcttcgtctttggcttcatgatgtctcgcccgctatcgaggcaattcagctcggtggcaaaagcggcgaggcaggtggccgagggggacttctcggctcgggcagcagtgagtccgcatgccccccaggagctggccggcttggccgacgacttcaacgagatgtcgtctcgcctggagcaatatgagcgcgagatcagggactccagtgcaatgctggcccacgagctcaggaccccgttgaacgctgcgatggggcggattcaggggatggtggatgatgtttttccgcactccaatgatcaactcttgctggttcaccggcagctagagcagatcaatcgcatcgtcggcgacctccatctgctgtcgatggcgcgggctggggccctgagcttggaagaagagcggtttgcgctcgcagatctggtgctcgagcgcattcagtgggtggaactggagctccaagctgctggggttgcatgccagttggatctggactccggcatcgaggtccaggccgaccggctgcggatgggccaagttgtgaccatcgtggtggacaacctgctgaggtatgcatccagcggcggtgtcatggacgtatcgctccggcaggaggggacgcgggtgacgctcattgttggcgaccgtggcccaggggtcgacgaggccgacctcccgcgtgttcaggaccgcttttggagagcggaccggtctagggcccggcactcgggtggctcgggacttggcctctccattgcgggtgccatatgcgctgcccacggtggcgtgctgacagtccgaaatcgcacgggcggaggcttggaggtagtggtctcgatcagccgagacaggggccactga

SEQ ID NO: 504824 - DNA, 789 bp, Stenotrophomonas maltophilia
gtggtaagaatggcgcgccgtttcgacggtttccgcccaaatatcaagatttcatcaatgactttttcggattctatgaattcggctcccatcccctcgaacgacaagcgcgtcctggtcgtcgaggacgacgcggacggcgccagcatcctggaggcctacctgcgcagggatgggtttttcgtcgcagtggctcatgatggcctgcaggccatggagctcttcgcgcagtggcgtccgcatctggtgctactggacatcatgctgccgaagatgagcggcattgacgtgctgtcggccattcgcaaagcgggcgacacgcccgtgatcatggtgaccgccgtcggggacgagccggacaagctaggtgcgctgcgatacggagcagacgactacgtggtcaagccctacagccctcgcgaggttgtggctcgggttcatgccgtgctgcgccgggtggtgcctggtcgaggaaaggaaaaggtcctccagcacgggcggctcaccgtagacggagaggccgtaagggtgctggttgaagcggaggcctccgggtctccatccgtcgtcgagctgactcccaccgaattcaacatcctttatgcgctcctgcgcacccccttcaaggccttcacgcgcgcggagctgctggaaggggttgccgccactagcgattcgctgaatcgcgtggtcgacacgcatgttcacaacattcgcaagaagctcgagcaccacgggattaccggtgttctggtgacggtgcgcggcgtgggatacaggttccaatga

SEQ ID NO: 504825 - DNA, 1284 bp, Stenotrophomonas maltophilia
atgcgcggggaagacattggttttgtccgggcgacagtcaagggcggccagctggacgccatgatcaaagcggcgctgtgtcgcagccccgactaccggcttgcggagctcaacgtgcgactcgcgcgagcgcaggccggtcagagcaacagtgcacgattgccacggctggatgggcaaatcgtcaagagcaaacagcgattcggcgattccgcgctggacgagcgctaccagcaggatctgtccatggcgaccgtcggactgtcagagttcgatcccgacttcttcgggcgcctcaggtcgctcgccgctgccgaagggctccggtgggaagcatctcaacacggccgcgacgcggcccggggagcgctcattggcgaaacgctccgcgcctacgtcctctactctgcggccaaagaagcggaagcccaggccggggtagtggccagcagcactcgggaacagctccgcctcgctgagcgccggcaagcgcttggcatgatcgcctccgacgatcttcgcgacgcggagagcttggctgcacaagcggatgcaaacgcggccaaggctgccgaggcatcaaaggcccaagagcgggccctgcgatttctggttgggtttgactcagcgctgccaagcccaaacctgtcgcttttcgtcgacggctcgggcgacgcggcccgctacggtggtttggattcttccgtgctctaccagcgccccgaggtgcttgaggcagaagcccagttgcaagcggctcacgctgacatcggcgccgcacgcgcggccttcttcccgtccatccaactcaccacctcccttggctcggccagcgagagtttaggtggcctcttctctgcctcgaaagcttggacgttcacccccagcctgcggcttcccatttttgacttcggtcggaacaagcaggcgctgaatctcgcatggatccgtcaacagcaaggggtcgtgcaatacgagaaggccgtccaacgcgcgtttgtcgatgtcgccgatgcccttggcagccgaagccaggccgagcaggcctacaccgctgttcgcaggaaggagctcgctgccgtcggaaagacgggccgactgatccagcgaattgatgcaggcctacaagacgccatggaccgaccgcacgccgagattgacgcggccaatgccacggccgaccgcgtcgctgctcagcaggactttgccctttcccggatcgctctgtcgcacgcgttctatgccacggctcctgcccgcccttccccttccgactcccactga

SEQ ID NO: 504826 - DNA, 792 bp, Stenotrophomonas maltophilia
atgatcaccaagaccaaatcaaccgtcctgcttggattggccgtgcttctggcggcaccggccgctcacgccggcggcctgtggggcgacaagatggaggccacttttggggccggcgtgctctacggcccgctctacgcgggctcggatgagagccaagcgatccttgtccccgtgctgtccgttcagcggggcatcctcttcgccgactccacccgcggggcgggcctgcagtatcagtttggcaatggcctctatctctcccagtcgatctactacgacttgggccgcttggagagggacagctcatggcgccctggctcagattccttgaagggcatgggccgcgttccaggctcggtcaccacgaagaccatgctggttcaacccttgggcgatcgcttcaatgtctcagcggaagcggaatacgccctgcggtcttcggcgcaccgtcttcgctaccgcttgggggcggaagcaaagctcttcaacggcgatgccaacgacgtgtttctcacagcagatgtgcacggcggcgatcgggatttcaaccaagcctactacggggtcagcatcgctcaggcggacgctaccggacgccgggcgttctctgccgactcgggcatcaatgcctacgccgccggcgttcgctgggagcacaagttcggcgatcgttggatgggcatcgcgcagatcaatgcgatgcgctacgcgcacgacgtgagcggcagctccatcattgagcggcgcaacagcgtcttcgggaacgtggccctcacctacacctactga

SEQ ID NO: 504827 - DNA, 1107 bp, Stenotrophomonas maltophilia
atggccttcctcccaccgctatcgatgcgcgcccttctcgccctctccctcgccgggctgtccgcctgcagccaagagcccacgccgcccgcgccggtccgaagcgtgaaggttgaaacggcagaacgagggtcacgcacctcggctgagttcatcggcacggttcgccggtcttccagagcgcagctcagttttgagcaggcgggacggatcaaagcaatccatgtggatatcggcgacgcgattgccaaaggccaagttctcgcagtcttggacccccttcccgtccagcaacagttcgcccgagccagcgcgcagctgaacgcggcccgcgcagcgctggccgaacgccagcttcagttcaaccaacaagaagcgatgttcaaggacggtgcagtggcgcaggtcagcttgactcaggctcgcgccgccctggaagcgtccaaggcggaactcaatagtgctcaggccgatgtgaccctggctcagcgcgcgatcgatcacagcgtcatccgagcgccatttgacgggcaagtcatcgctcgccacagcgaaccgaccgttgacgtcaccgcaggccaagcgattctggacgtgcaggggagcgggcagacggaagttgcagccgacgtaccggcccacctcgccaaggccctccaggcgggggccacagcatctgcacggcaggacggcaacgtgttggtcccactgactctgcgctcggttgcacagcacgaatcgaccgcaggaactgtgccggttctcctggaagctgcggacggtggcgcgcccctgcttcccggctcactgattcacgtattggttcaggtcgacaacgcgaacaagaccctgacggtgccgctctcaagccttgtccccagcagcaccgccggcgcggcggatgtctttgttttctccgcggctcatcagaccgtgaagaaagttcgcgttcgcgtcggcagctaccagggaagccaagtcgaaatcctcggagggttggccgaagacgctgtgatcgtcacggcgggggccagctacctcacggatggtcagaaggttcggccttacaaaagccagtcccagctcggacaaggggaaacccgatga

SEQ ID NO: 504828 - DNA, 3063 bp, Stenotrophomonas maltophilia
atgaaccttacccagtcggcgataaaatccagccgtctgacggtgttcgcctgcctgctgcttctgttcggcggcatcttcaccttctttggctttccttctcaagaagaaccgtccgtcaccatccgtgaagcgctcgtgtccgctgccctgccgggcctgcccagcgaggaagtggaagagcgcattgccaagccgctggaggagcggttgcgagaggtggctggcatcaagcgagtcgtatcgaccatccgtcctggcagtgccctgatccaattgacggcgcaggacagcgtcgatgatttgcccaccctttggcagcgtgtgcgcgccaaggcaggtgaggccagcgccgaactgccgccgggcactcaaggcccgctggtggacgacgacttcggacgcgtcgccgtggcctccattgcggtgaccgcccccggattcagcacaagcgaaatgatgggaccgctgcgcgccatgcgggaagaactctatcgtctgccgggcgtcgagcgggtgaccatgtatggactgcaggaagaccgggtttacgtggacttcgacaggtccaagctggcctcgaccggcgccacccccaacgggatcatcgatcaactcagggacaagaatgttctttcgccgggcggggaagccattgccgccggtctctcgctgaccctttctgccgacagccaggtccgcagcgcccacgatttggccgacgtgctggtcagcgtgcccaatgccaaggagagccaagtcatccggctaggggatctggccgccgttcggattctgccaccggacccgccggagggaggcgcgctctacaaagggaagccagccatcgtcgtggccgtctctatggccaagggctacagcatcgagacctttggcaaaggcttgcgtgcagcgttggatcgcacccagtcggccctgccggtcggcttcgagcagcacgtggtgacgttccagccggacgtggtggaacgcgaaatgggcaagatgcaccacgtcatgggggagaccgtggtcatcgtcatggcggtcgtcatgctcttcctaggctggaggaccgggctcatcgttggagctattgtcccgctgaccatccttggctcgttggtggcgatgcgcgcactcggcgtggaactccaaacggtgtcgatcgccgccatcatccttgcactgggacttctggtcgacaacggcattgtcattgccgaggacattgagcgccgccttgcacatggccaggagcggataagcgcctgcgtggacgctggaaggacgctggccattccgcttctcacgtcctcgctggtgatcatcctggcgttctccccgttcttctttggtcagacctccacaaacgaatacctgcgatccttggcgatcgtcttggccgtcacgctgctgggctcctggatcttgagcatcaccgtgacgcccctgctgtgcatccgattcgccaaggtccacgtccacgctgaggatgacggtcagtatcagagccggctttacaaaggctacagtcgcatcatcgccaaggtgttggaccacaaagtggtcttcatggggacgatggcagcgctgctgaccggtgcactggtcatcctgacgtcgctgccctacgacttcctgccgaagtcggatcgcctacagttccagatgccagtcacgctggagccaggcgcggcatcgactgaaaccagaaaagtggttacagaactcagcgcttggtttgctgacagaaagcagaacccggaagtcactgagagcatcggctacgtcgccgacggcggaccgcggatcgtgctgggcctgacaccgccgcttcctgcgtccaacgtgggctacttcaccgtgagcgttgcccaggggacggatatcgatgctgtgatccgccgtgcccgggagcacgttctggctgcctatccaacggtgcgtgccgatcccaaacggttttccctcggcacaacggaagccggcgtggccgtctatcggatctatgggccagacgaggatgaactgcgccgcatcggtgaggaagtgagcgcaaaactcgcgacgctcggcggcacgcaggatgtctacgacgattggggaaagcgcactcctagctacaccatcaaggtagacgcggccaattcgaaagcggcgggcgtgagcaacaacgatatcgctgagtcgctacgctatcgctacagcggcgccgaggccacccgcctgcacagcgatggcacggccacgcccgtaatcctgcgctccactgccagcgagcgatcaccgaccgctcgtcccgaggacactttggtctattccagcgcatccggaaaggcagtgccgttgggcgcgattgccacggtcgaagcgtccagtgagccgtccacgatcgtgcgccgcaacttgatgcggtcgctgacagtcacgggcaagaaccccgggatgaccaccagcgaaattgtcgccgccctcaagtccgagatcgcggccatcaagctaccgcctggctaccgcattgagctgggaggcgagatggaggatgcggcggaggccaacgacgccttgctgggcttcatgccccacgcgctcggcgccatccttctcttgttcgtttggcagttcaactcgttccgaaaggccttcatcgtcgtcgccagcattccatttgtcctcatcggcgcctcgctggcactgttggtcaccggctacccgttcggcttcatggccacgtttgggttgcttgcgttggccggcatcatcgtcaacaacgcagtcctgctgctggagcgcattgaggctgagcttgaagaggggctgccgcggcgcgaggcagtcgtatcggcggcagtgaagcggctccgtccgatcctcatgaccaagctcacctgcatcgtcggcctggtgcccttgatgctgttcgccggcccgctttggactggcatggcgatcacgatgatcggtggtttggcgctgggaaccctcgtgacgttgggcctcattccagccctatacgactggctgttcagccttcgtattcgaccggaggatgcgcgctga

SEQ ID NO: 504829 - DNA, 1920 bp, Stenotrophomonas maltophilia
atggcgcagaacatcaatcgcgtcgccgctgtgctgtgcgccgcacttttgagcggttgcgccatggtcaaaatcaagaacgtgtccccagagcgctactttgagcagcgccgtggcgacatccttagcaccggcgaactgagcccagccacccgacaggagatgggcctgctgtctttagacacgaaagcctgcttgtcggcgcccgagtcctgctctggaactctcatcgagtcggacgaaatcaagaccgaagactccctggctgcctcggcggagctgtgggttgcctatgctgcagaggtttctcggacatcgcccgacagtgatcggacgatggacgcttggctgaaggccgcccgctattcctatgcttactttctggtgttccagcaaagcgcttcaagtttggcaccccgcgaacgggatactcagatccgggattactacaactattcagtggagaacgtcactgcaagcctgttccgacgctatcggcagggagacagcgccaacccgattacgagtgggagcctgccaactccggccggatggaatttgaggctggacatgtcgggccttcgagagaacggatacgtcagcttccccaaagaactcctggccgcctccagcattgggtttggtgggatccgcaatgccttccgtcgcgatggctttggggcagaaatggtggccgtcctccccgcggggaccttcggctcccaaacttcgcccccgtccgaccttccgctggcggggggctacagcgcgatgccggctccaaacgttacgtgcttgttggacttccacggcgatgacttgcagcaggtgcttgcgtcacgttcggcgacccttagggcgttcgacccactgttggagagcgcggccgccatcaagggagagaacgtgcccctggccgccaacttcactgccggctacggcgtatggttggcacgctccaatttcgccaccgaggccatccgcacgctcttggacatggacaagagcttggacaagccgcacctctacatgctgcaaccgttcgacccaaaccggcgagtggttctgatgttgcatggcttggccagcagccctgaggcgtgggtcaacaccgccaatgatgtgcttggggacgacgaactcagggcacgctaccaagtctggctgatgtattacccaaccaacctgccccttccgcacaaccatcaggcgatccggcagaccgtcctgagaacgctgaaggacatggatccttccggtgccgcaaaggcctctcatggaatggtcgtggttgggcacagcatgggcgggctgttgacacggctaatggtttcttcgagcaatggcagtcatctgctcgaccagaccctgcaggaactcaggggcaagggtgacgacaccaataaggtgcgcgaggagctggccccactcctggagttcgatcccatgcctgaagtgcgacgggcagtcttcatcgccaccccgcacatgggaacgccatctgcggaaggcgtgcttgcagcgattgtctcccggctgtcctcgatccctcaagggctctccacgcgttacagtgctagcgcggctgtcatggcggccgtatcgggtcgcctcccactgagcatcgacaacctcaaagaaagcgacccctttgtaaaagacatcgccgagcttcccatctccccggacgtggtctaccactccatcattgccgtgaagaacccaacgaacttggcctccgcaacggatggcttcgttccctaccgaagcgcacacctggccggcgcagcttcggaaaaggtcatcgtaagtggccacagcgtgcagcagacgccagaggccgttctggaactgcgacgtatcctgcgcatggacgcggggttggaagcgccacaacccgagtcagctcgctcagagtaa

SEQ ID NO: 504830 - DNA, 228 bp, Stenotrophomonas maltophilia
gtgcagcagttcggcgtattcaaagttcagaacttggccatctgtgaccatccggatgcggccacgcctcccatccaggccgagaagatgcagtgcttgaaatgcttcagtttcttggatgccaccaagagtgcaaagctcgtcatctgtggagcgctggaactgaaatgctcggcatgcggcgtgcgtcaaatcgtcagcagagcagcgttctccaagacgaactga

SEQ ID NO: 504831 - DNA, 702 bp, Stenotrophomonas maltophilia
atgaccctaaaagaagccaccaagctggaaagctgcccctgccgacgttgcaggcatatcaccaatcatgaggtgatccatgaacacaccgagcagggcgaagtccccgacgacattgcactgaactggacgcacgagtaccagacggtacgttgccttggctgcggcactgttgccttccgcatggccactggcacgaatgaaaacgtagcggaggtgcgccaaggtgagtgggaatacgtgccagacgttgagatctttcccactcccaacttgggcagggcagcgctggagtcctcccatctgttgccaaccaaggtcgagcgcatctactcggagactctggcctgtctcaatgcgtccaacccggtgctcagcggcattggtatccgcgcaatcgtggagacggtctgcaaagaccaaggtgcggttggcagagagctctatcacaagatcaacgatctcaaggaacgtcggggattgaccgatgcgggcgctaccatccttcacaacctgcgcgtcctgggcaacaacgctgcacatgaagtcgcaccgcacagcgttgaggagttgacattggcctttgaggtcatcgatcacttgctgctcggcgtctatgtcctgcccaagctggccaagcggacctacggcagcgaagaggacgacgacgagtccgagcctcagccaccagagcctgtgtag

SEQ ID NO: 504832 - DNA, 672 bp, Stenotrophomonas maltophilia
atgctcggctatgggctgtcctccattgattacgtcgagctcgacaagaagcttgaagcgctgaggcgggatttcgatgacaaggcagccgagggcatgcccttgtgtgatcgcgttgatcgctgggcgaccatcgtcctttccgccgtctcgacgttggagagctgctgcgagtatgacccgggcccgattcctaatcagacgggcattcagcggttcaagttcctactggccttcccatggctgtccgagctccagaggctgagcgacgctcgccaggatcgcgaggcatacgacgtccgatcaaaacgctgcgaagcaatcgcgaggattcttcgggacaacctcgccgagggaagagctcgagcgcactcgatggtgctacgccggttccggaacgatgtggtcgttgataggcagctgaacaactatcagattgtcgaggggaaaacgggggcatacgtggaagctctcggggaactagacgcgatcagcgccgacgaagtcgatcatgcgatcgatcgcctttctatgtggagttcttacaccgcagggtggtggaaccgattcaatcagaccctcgaccacgcctacgcaacccatgcgaggtgcttggtcgccgacccccagttttggcgtgagcagatgcagccgttgctcgagaccgagtaa

SEQ ID NO: 504833 - DNA, 849 bp, Stenotrophomonas maltophilia
atggcagtccagcgcccgcctgatgaaatcagaggcgcgctggtctcagaggcttgcgcgcaaaggaacggaaagagatacgaagtgaccatccctgataaagcattgtcctctaatggccattccaagccgctctaccacctgcttgcacagtcgctcgcaagtgacattgagagcggggccttcgccgtcggcagcacgctgccgtcagaaaagagcctcacctcaatccatggagtcagtcgtcagaccgtccgccaggcccttgcactgctgagatcgcaggggctgatcgcgtccaggcctggcgtggggtccatcgtgctgcccgcaccccagggagcggaggccttcgctccgatcacgtccgcggaagaccttcgcgactttcttggaaagaccgaactgcaccaggtctccctgggccctatcaccgtcaacgagcgcctttccgaggttctggaatgccgaaggggcatccagctctcggaggcatgcttcttgcggcggcgccctcaggcccctttgccaatgagcgtcttgcggatctatctgccgccccagtatgcggcagcccagatcacgcccgacgtcgctcgtgggccgatctatcagaacctggagcgtatgttcgggattgctgtgacagaggtccgccaagatgtgacggcgacggtcctcgaccaggacaccgcgcggctgctgcaggcagcgccaggcgatccggcgctccaagtggttcgcttctactactcggcgacgggcaagccggtggaggtcaccgttggtcattaccccagttcccgttatcggcaaagcgtgcgctatgcgctcccaccctcggggtga

SEQ ID NO: 504834 - DNA, 1593 bp, Stenotrophomonas maltophilia
atgcgcaagccttccgccaggtggcgatcttcacgtcgggctcttcacctatcagccccataccttctgggcactgcggtcgtcctcgttacccttggggcggctcagctggcagtaacccaacgggccaaagttgacctggcggactacacggccgggctgctggtgcatgcggaggatgtggcacgtgcaagcgtcgatggtctcaacagggtgctgcgaatcagcgaagagccctgtggccccagagacctggccgagttgcggctgatcgcttttcactcccgttacataaaagacgttgggcgggttatcagcggccggctgctttgcaccgcaatgtggggccgcctgccgacgcccgttgagctcgctccacctcaccgcgtcgtgcgtggctattcgctctggcggagcgtgcccgctcccggggacgaccgaatcaaggtcgacctggcgtcttacggtaacgccatcgtcacgacggcgcccaccgcgtttgaccgggtgtccatgcctgttggcagcatcggcgcgctggtgatcagccgtgacgggaagcaccacttccaaagctttggagatgcgtttgacctgacgttgagcaaggacggcttggccgcgcccttggccggtcacatatccacacgggcgtgtagcaacgagtttgatatctgcgttgtgtctcaggcacaggctggcagccttttgggtcagccttcatggatcgtcgcttccatactcgccctcgctttggtggggggagggggcttgggcgcgttgctaaaggtctctcagggacggagacgagcgcttcaccgcatgcttgcaagggcgatcaggcatggcgatatcgatttggtctatcagccactgcggcgcttgtcagataggcgaatggtgggcgtggaggctttggcgcgatggcgtaccttggccggcgttgacgtgccgccggataccttcgttcccatggcggaggaacaggggctcggaacggcgctggcgaagctggtgatcgtcaagagcctggaagagatggggcctcgtctacgacgcggggacggcttctacgccagcatcaatctgtccgctcaggacattttggacagcgagctgagacatttcctgagcgagcaaaccgaagctttcggtgtttcgccagccgacgtagtgttggagtttacggagcggtcaacggcatcacagcaggatcttgccgatgcgctggggcaactggaccaagcaggttttcgcgtgtatctggatgactttgggacggggtattccaactttgcctacctggcagacttgcccttggcaggactaaagatggaccgtcgttttaccagggctatgggcaccctttcaccggccagctacgccgtcgaagccatttgtgcgatggccaaggcgttgaggctgcctcttgttgccgaaggggttgagaccgagctgcaggccttggcgatgcaccggctcgttcccgaggcggttggccaaggctggttgctaggaaagccatgcaaggccgactcgctacccgacgacatgcttgggcttaccagcaatggcagtccagcgcccgcctga

SEQ ID NO: 504835 - DNA, 2124 bp, Stenotrophomonas maltophilia
gtgaagaatttcttgatgcggtacagggtcggcacccgattgggtgcggccttcgtggtgttgatcgcggtggcgatgtcgatcgtggcatctggcctttgggcgctgtctcgcgccgagaccagcatggacaccatcgtgaaagagagcatggagcgcatccgtctttccaagacgatggctagtgcaaacatgcagatcagcatttcattgcgcgagctgatcatgctgcaggacaagaagatccaagcatccctgctgaaagagatcggtgagcaaagggccatttatgacaaggcccgcgacgctctgtatgcaacgcctgccgatgaagaaggaaaaaagattcgtgcagtgatcaccgagaagcggcttgcggctcgccgggtcaacgatgcggtcgtcgaagctgcgacgcacggcgacgtggcgacggcaacgaagctgcttagtgaaggagacgccctgctcgacgaatggcaggcggccatcttcgccaacgcagagcttcaggagcgcttggctgacgcgagctaccaagacgctcaggccgttgcagcaagcgcccggaagatgttggtcgccgctggggtcttggcggtcctgctcagcatcgcattggcaatcaccatcacgagaagcctgaccataccactgggcgaggcgactaagaccgcaaccgccattgcgtcgggcaacgttgaaaacgttatcaaggtggaaggccgagacgagacttctgccttgcttgaaagcatgcgatcgatgcaggagcgcatcaagggcctgattgcggatcaaaaggcaatggcgtcggcccaggccgaagggcggacgtcgcaccgcatcgatgagtcccgccatccaggtgcctttggtgaactggtcggcgacacgaacggcatggtggagcgctccaacgcagtaacctcgcagatcgtaggcattgcccagcactatgccgtcggggacatgagcgctcgcatgccgctgctcccaggcgatcaggccgccattaccgaggccatggagactacgcggacgaacatgctggccatcaacgaggagattcgtcggctggtccaagccgctgcggcgggagacttctctcagcgcggcgccgcagatggcttcagtcacagcttccgcgagatgatcgacaacctcaaccagatgttcgatgtcagtgataagagcctgtcggacatcgcacgactgttggaggccgttgctcaaggcgatctgactttccgcgtttctggcgagtttggcggcgtgttcgcgacgatgcgcgatgcggcgaactcctcctctgagcagctaggccggatcgttcggggcatccaagacggtgctggcgtcatccgcgtgtccgcctcagaagtgagcaagggtagtgcggacctctcccgtcgcaccgagcagcaggccgccaatctggaagagacggccgcatcgatggaagagctgacgtcgaccgtgcgccagaatgccgatcatgccattcaagcctcgaggcttgcgtctgacgccggcgacttggcccttcagggcgggcgagccgttgatcgcgtgatggagaagatggtgaaggttgaggcctcgtcccagcgcatcgccgatatcaccaccgtcatcgatggcatcgctttccagacaaacattttggcactcaatgccgcagtggaggcggccagggccggcgaccaaggccgaggctttgcggtggtagcaagcgaagtgcgaacgctggcacagcgcagcgcagaggcagccaaggaaatcaagcagttgattgatcgttcggttcaggacgtggtggacagctccaatgaagtccgtgagacggggtcgacgatccaccaggtggtggggagcgtccagcgtgtccgcgacatgatcacggagatatcggcggcctctcaagagcaaaccgcgggcatcgaacaggtcaatcaggccgtgatgcagatggatgaggtgacgcagcagaacgctgctctggttgaagaggcttccgccgcggctggagcggtagaagagcaggccgttgggctggcccaagccgttgccttctttaaggtcaacgcagaattccgcccccgcttggttcacgccagctga

SEQ ID NO: 504836 - DNA, 687 bp, Stenotrophomonas maltophilia
atggccttcagtgctgaaaacttgaatctgctggaaaaggttcgcgattttcgcgtatgccttgcgttgttggcgtttgcggcgctcttggacgtgttcttggtggcggtctcgggatccaacctgtggacctttaaatggaacgatgtcacctcgcgcccgggtgtgtggctgctgttggtgcttgcttacagcgtgatcatgaccctgggtgccgccgctatcgcaacgttggtaatggtcgtgctgggaccgattgtgcgcaagattcagagctggcttgacgtctcagttgtgcaggagaaccccgacccccagcgctatgtccatcaatgggaagccgagaaggccttggctcatatggacgagtcggttcgcccaaagacagtggagaagcagctcgcggagcgcgcggctgaggtagggcgctggcacgccttggtgggagcgagttgggttggcgtggcattggtggcgctggactggaacatcgccggctcgggcatcgcagcccttgcccaatggcatccatgggcgccttggcttgtattggcggtccccgcatgggcgtgcgcttaccacatgtgcgttggtgtcccgggccacgacttcatcgattggcctgagcatgcgaaaggcctagctcgcaaccagtccggtgctttcgttcctatgccgtccgcgtga

SEQ ID NO: 504837 - DNA, 447 bp, Stenotrophomonas maltophilia
atgtgggagtggcgtcagcgaggcgtgtggggcaccgagagaatgaggacggagctgcgaacgcggttcttgcgctacgcacgaacctacaggagccagagtggtctcatgcactttgaaagcgccaatgaggcgtcccctaacctctacgtatacttcgcggggcggcacgccggctacgtccacgaatggcagcagagaggtagcaccgtcatggtcgggcactttgctgtggcgaaggatctggaggggaagggatttggcgagccgctgctaaggggcttcgctgagtcagttcagcgcgaactcggggttacccggatcgtttttcgtgttcgcaagttctcgtcagcatatggacagctgttcctacgggtgggggcagctgctaccggacgcacggtcgatggcatcccggagtgggaatggtgcttgcctacgcactag

SEQ ID NO: 504838 - DNA, 1146 bp, Stenotrophomonas maltophilia
atggaaaacgcacatcgtttggcaaagattgcactcgttctgaccatgtcggccattggggccaccgcaactcaagcgtacgctcaggctgaccgcagcagggaaatcgcaacgaccggctgggcaacccaaaacggcggaacgcgcggtggctcgaatgctgccgctaccgctgttttcaacgtcaactctgctgccaccctcaagaacgcgttgaaggcttcggtcggcaacggtggtcgcatcatccgggtgaccggcgtgatcgatatgagtgagggcaaagcctacaccacgacagctgacatgaaggtccggggcagggttgagattccggaaaaaaccacgctaatcggcgtggggagcacagcgcagatccgagagggatacctggttgtgaagcagaatgatgtgatcattcgcaacgtcacgatcgagaatccatgggacccacagccaatctgggaccgcaacgatggcaaagatggcaactggaattcggagctggacggactgaccgttgatggcgccagcaatgtgtggatcgatcatgtgactttcactgacggtcgccgcacggatgatcagaacggctctgccaacggtaggccaaagcaacaccatgacggcgccatggatgttaagaacggtgccaactttgtcactgtttcttactccgtattccgctcacatgagaagaacaatctcattggctccagcgacggtgctggtagcaaagacagcggcaagttgaaagttaccatccacaacacgctctttgagaacatcagcgccagagccccacgcgtgcgtttcggccaagtccatctttacaacaactaccacaccgggagcaccactcacccggtgtatccattctcccacgcacacggggttggcaaagactcaaagatcttctcagaggcaaatgtcttccagatcagcggcgttagcagctgcgataagatcgccgcagattacggcggcagcgtttaccgagatgacggttcagtgctgaacggtgcctctctggtctgcagctggaatcgcaacatcggctggaagccgccgtattcctacatcccgctcaatgcgagtcaagtccaggctgatgttcttgctaaggcgggagccggaaaactctga

SEQ ID NO: 504839 - DNA, 306 bp, Stenotrophomonas maltophilia
atggaacgctcgcaattcattatcgatcgcgcactgtattcagacgacgtcgtggctcgggccgtgcatcgccataccggcgagcttggtgtggaggtgcgcagccaaggcgccagcctcaccgttggcttttggtctctggacggctccgacctgccagagaacctctggacccggttttcccgagacttgctggacgaacgcctgcgggcggctgtccgagcagagacgagcgggctgcagcaggagctgcttcgcgcagcgctgaaccaggcacagccggtgatgccccatgtcgaggtttag

SEQ ID NO: 504840 - DNA, 816 bp, Stenotrophomonas maltophilia
atgttgttttcagcggcgatcagcgatcgctttcaacggttcaaacagtggtggctcatccaaccgctgaccgttagggcttacttcagtggggcggccctcatgggcatcgcccttcttctgttccgctttgctccgaaggctttggccaccgacgtcatcacttacgcagccagcttcttctttgcagttgggttcctacgcgaagcatttctctggctctatccgaagctccagctgccactggtcaagttggctgtcacagcgatgagcgttatggcgcttgctgccgcaacagggatcagccgcctggcagtcaacgatggcaccggacaggatccctctcattttccaaccgcagtagcgctgcttgtgcctttcgccttcgtgccgatcaacgccttcgcaattacggtttcaagcggtctttcagccataggcattatcatttgggctgcaggaacgtctccttgggggaaaacgaagaggagcgactttgactacttgatgctctgctcacgcatttttgccgcagcagtggtgtccatcgtagctgcgttcgcgataggagactcaccagtagcgccgtcctggatgagatccgtagctcgccacaccgcatttgcgctcgacctttatagcgatgcttcgtgcgccgtacatccgagtgatcggtttcaccgcatcaacgatgacatcgtgatcttggggaggatcacgcccgacggtccgcgctatgttcgccgcagttgccccttgcaggccgaagcggaggcgcctgagctacctctccttggccctcaccccagcccctag

SEQ ID NO: 504841 - DNA, 465 bp, Stenotrophomonas maltophilia
atgagcaaagagacggacaatgatgtgagcgctgaaggccatcgtagcgccagggatccgcgttggagtctgccaattcagtgtgaagaggaaacccgggctgtcatggaggagatggacaatctcatcagcaggctgcccttgggaatccaagtgcgcgctcgagccttgccgtttccgcagttccaccacgcgtgctcccatggcgatatcgagatggttgcagcgatgctggaagtcggggcagagccggacggctacccctacacgtacgacgagatggaccagcctcctctggtgtggcttgcatgggcaagcgatctaaatagcaaaactaagcaggaagtggccctgatgcttctcaaggccggtgcgtgcattgaggagggcgagcctcggttcgaagcactggcctgtcaagacgaggaattcgccgattttctggaatcgtattcctctgtctag

SEQ ID NO: 504842 - DNA, 1266 bp, Stenotrophomonas maltophilia
atggggaccatgaagataccaaagaccgctttgcaggccgcacagcgtcagcgcaggtatgtacattttgatctcccgctgtcgagatcagcggtcagggcactcgtgctcgatgcggctcgcgtggcagcacatccgttctatccgttcattcggcacgacattgtccgtccgaagattaaacgtaccggcaaaggccaatttttgaggcggctcaagactcgtgaaatccgatacgcagcgcacgctgatgctgcgatatacgcctactacagccatctactctcgcaaaggtacgaaactcggttggccatggcaggcctaggcgcatcggtcatcgcgttccgctcgttgtcgaagtcgaacacggattttgcaacagaagcattcacttggatcgcatccaattccccgtgcgtggcgatgggctttgacgtcaaagacttcttcggaagcatcgaccatgctgaactcaagcgtgcttgggcgtcactactcgacacagaaacgcttcctgcggatcacttctcagtctacaggtctatcacacgacattcttctgtggagttgatcgccgctcgtcgagcactccacattactaggtccgcgctaaaaaagagggaccgaatgtgctccccgtcagatttccgcaagattgtccgaggtggaggactgattgatgtcaatggcgtcggaagaggaattccgcaaggttcgccgatcagtgcacttctatcaaacctgtatatgtttgaatttgacgttcggatcgcaactgaagtcgagaatagggggggctactatcggcggtactgtgacgacatcctaatagtcgcagatgccaaatggtcgacggaccttgaggcgttggttgcggcagagcttcaacgcatcggacttgtgatgcagattagtaagacccagatgcgagagttttcgccggcggctgataagccccttcagtacctaggtctcacttatgatggtgatcgcatcctactgcgcccttcgggaattgcgcggcactactcaaaaatgcgccgtggcatcttgtcccacaagctttcacctcgcctaatcaagggacgctccttgctccaggtcaggaggaggcggctgctacgtgcttacacggagcacgcacctgcaacagtgcgatcattcatgagctatgttcgaagtgcctccaagaagtcaggctcggcggtcgtgctacgccaactcaaggggcatcgccgacgtttcaggaagcttctcaaaagctag

SEQ ID NO: 504843 - DNA, 612 bp, Stenotrophomonas maltophilia
atgaccgctggaactgaactggaaagggaggtgatgggcctgcgcccaggacggcgtccagcccagcccaagccaatcgaactgacccatgcagaagagctggagttggcgaaagcgaaggccgggcgggttgaatgggtcggcccgggggttgccgcgtacatccttgggatttcaaaggaagctctcaagaagcgtcgactccgtggcgagggcgttgtgcccgagcaccgggcggctaggagcaacaagcacggggtgcgttacaggtggtcgtcggtcatacgctgcggtggggcggagcgcttccaaagcgaagtccttgccgagcgtttggaggatgtcgtgaacgtcttgaaaaagcttggccttgccgggttggagcgggaactgccttgggcattcacggaggacggatgcatcagaggattagcgggcttccacaccgatcttctggcgatgcctctttccactaaagaagcgctacggcgaccttggctcagcgtggaagatcgcactccattccatgaactggctgtccagtcattgtccaatggcctggcagcggttcagatgtccgcagaacggcagaatgtaaaggcgggcccgtaa

SEQ ID NO: 504844 - DNA, 993 bp, Stenotrophomonas maltophilia
atgatcctggacaacgtggtgtggggcttcgtcgggtgcggcagcgtcaccgagaaaaagagtggcccggccctggccagcacgccgggctcacgggtagcggcagtgatgcgccgcaatgcggcactggctgaagactacgcgcgacgccacggggttccccgctggtacgcggatgccgatgcgctcatcgccgatccggaagtgaacgcgatctacgttgcaacgcccccctccacgcacatgcactatgcgcttcaggcgattgcagtgagcaagccggtctacatcgaaaagccgatggccatggaccatggcgagtgccagcgcatcatcgcggccagtgcccgcagcggcgtgccggtgttcgtggcctactaccgccgtgccctgccccgcttcgcgaaggtgaaacagctgctggacagcggcgcgatcggcacaccgcgcagcgtgcgcgccagcctgcaccggccacactcgatgcaggcagcgtcaccggacttctggcggaccaatcccgcgatctccggtggcggcctgttcgtcgatctgggctcgcacacgctggatctgctcgaccatctgctggggcctttgatcgatgtccatggcctggccagttcgctgaccggtgcctacgccgccgaggacagtgtctcggtgtgcttccgtaccggcaacggcgcgcacggcatcgcgcaatggagcttctgcgccttccgccgccaggatgaggtggagatcaccggcgaccgcgggcagctgcgctttgccaccttcgaagacgttccggtcgtgctggacaccgatgccggcgtgcaggcgttcgatatcccgaacccgccgtcggtccagcagcctttgatcgcttccatcgtggacgagctgcgtggcaacgggcgctcaccgtcgaccggcatcagcgccgcgcgcaccagcgcagtgatcgatcaggtgctacaggcctaccgcgtcaggcacccgcactga

SEQ ID NO: 504845 - DNA, 504 bp, Stenotrophomonas maltophilia
atgcacatgctcaagaaggccgcgctggctgcagcgctggtcactgcttcgctgtccgcgaatgccgccgaaacccacatcaccgtcctggccgacgtcgacccgaccctggccctgctgcaggccgatggcagcccgctgccggacgccgtcaagctggaccacgccccgggccgtggcctgattccgtggtcgcagcaggtgcgcatctattccaacgacatcgacaaggacatcgaagtgcgcctgatcaacgagccggtgctgatcggtaatgccccgggcacgccgtcggtaccgctgtcggtcagcctcaacagtcgcgagctgggcctggccgccaccgattacctggccgccgacctgttcgacggcgcactgccgggcgcttcggtcgccatgccgctgcagatcgcgcagaagaccccgggtgccatcgacgtggctgacagcttccagggcatggtcagcatcgccatgaagcagaagaccaccagcccgtaa

SEQ ID NO: 504846 - DNA, 2721 bp, Stenotrophomonas maltophilia
atgaaagcttctgcccccgccgtcacccggctggcgctcgcgctcgccctgtcgttgtccgcaccgctggtcgcggcacgcggcgttcccgccggcttcgaggatctggttgaaggccagaccgagcagctggacgtgcgcctgttcgggcgttcgaccgggttgatgcccgtgcgcgtcaccctcgaccacgtgcagctggaagcgcctgcggaggcgctgcaggcgctgcagctgccggccgaggcacaggcggcgctgctgccggcgctgtcgcagccgctgccgcgcaacagccacctggcctgccgctacggcggtgccgccgccggttgcggctatctcgatcccccggaggaccccaccgccgtgcgcgcactgtatgacgagggcgagggcgcggtgcgcctgttcgtcgcccgccaatggattcccggcgagccggccgcgcagcgccaccaccaggtcagcgccaacgccgaaaacgccttcctgcaccagcagacggtcaacctcagtggcggccgtgattaccaggcgttggccgcgcagggtgcgggcgtacttggggtgttcgagcgtggccatgtctcggccaactggaccttcagccaccagcgctaccgcaaccagcgcacgcgacacgacttccagctggacaacgcctactaccggcacgacatcggcccggagcactacctgcaggccgggcgcatggaccgccgcaacctgtccagcccgcagggcggcaccttcagtttcagcatgctgccgctggaccgcttccagggcctgcgcatcggcaccacccaggcctacgtggacagcgaagcggccgtgcaggccacgccactgaccgtgctgctggcgcgcgatgcccgcgtcgatgccttcgatggccagcgcctgctgcagacctattacctgcaggccggcatcaaccagatcgatacgcggcgtttcccgttcggcaactacaccgtcaccctgcgcatctacgaagacggtgtgctggtacgcagcgaagaagcgcccttcgacaagggcggcgaccgggccgacagcagcgtgcagtggttcatgcagggcggccgccgcagcgagcgccgcagcgaccagttcgatggcgagatggctgccatggccggtgtgcgcgtgccgctgggccgcagcgccaccgtcaccgctggcgtggccgacctggcgggcttcagctatggcgaactgcgcgtggacctgcgccgggtgttcgccacgcaggagatccgcgccagcttcagcggcatgcagggcagtgatggcagccgcgggcagcagcaccagctgtcctaccgccgccacgcatcctggaacctgtaccagcagcgcatgcgcggcaaggcctgcgagttccgcgacgatgcccgcgaccagctcggctgcgccgattcgctcagcgcctcggtggcgttgccggtggccggtggccatgcctacctggcctatacccggcgccagacctggcggcagggcgtgggcatccccggcgatatcgacgatccgctgtacggcctggacccgttgctgccgccgtgggcgccgcgtcccagccgcgaaccgcagctcagccgtacctggcaggccagctacaaccgcagtgaacgctggggcgacttcagcgcctccacacgcgtgggcgtgtggcagcagcacaacgacggcagcctgcgcagcagccgcgaccgtggcgtgtttctcacccttaccctcacccgcctgcagcagggcgagcgcggcaccgcgcagcgccgctacgggctggacctgcgccagccgcggcaccagcgcccggatgtgacctacagcgtggcacagagcctgcgccaggatcacgacgaccagttccgcgaactgtccgccgaactgcgcggcaacaacagcgaccgctacagcgccacgctcagcgggcagctgcagaaccgcatcggccacaccggcgccaccgtgtcgcactaccagcagcgcgggcgcgatgagctggcctacagcgccacccacagttccggcgtggcgctcggttcgcgcggcctgtactggggcggcggcctgggcgccgatgcaggcctggccgtgcaggtggatggcaccgacgacctggaactgaccggcgtggccgccgaactgcaggtgggcggcctgcgccgccagcgcctgaagctgggcgaccgccggctgctgccggtgtcggcgtaccagtcgcatcgtgccgaagtgcaggatgccagcgcactggacagcatcgcctccatccgcgtgaccggcgtgggcggcgcgcgcccgctgttcctgccgcccggcaagctgctgcgcatgccggtaccgattgaagtgacctacaccttcatcggcaatgcgcacgacctggccggcacgccgctgcgcggtgcccgcatcctcaacgcaccggtgccgggcaccggcagcaacggcggcttcgtggccgacttcccgcgccgcgaagcggtgctgtacctgctgcaggacgaccgcctgctgcaatgcccgctgcaggtgcgcgagcgccgccaggtagtgctgctggtgggtgccgtgcagtgcgaaccgctgaacgtggcgcagctgccggcggacatccgccagcaggcgcgggtgacgcggttgctgcaggaaaaggcgttgatcgccagcagccagcaggctgccgcgggaggtgcgcgatga

SEQ ID NO: 504847 - DNA, 1134 bp, Stenotrophomonas maltophilia
atgagccggtggctgtggtggtggctgatgctgttcagtgcgctggtgctggtggtgccgcaggcgatggcacagcggccaccggaaacgcatccgaccgatgagcatcgcgacatcgtgatgagttgggatcggtctgcgatgccgggggacatcgtgttgatgccgccgcgcacgctgctggcgtacgaccatgtggatccgggtaagcgctatggcgagctgcatctgacgtgtgtttcggatagtagcgcggagagggggcggtgcccggtggagggcttcctcgatattctgctggggacaagagccataccgcttgagttcgttgaggcgagatcaaacatgcgcgtcgagctcggcttgcaggctggactcgagagggcactcagtgggcggtcctgtcttggtgacttctggcaggaaggtatccgggcgccgtggtcgacgttcgcgccagaatgttcgactgattctgcagtgggtactggcgcgcagatcgctctcttcgcaaccgagcttgagaaactcgtcgccggcatctggaccgcgacgctcgaactccgcgcgaacacccccgacgcccgcaacctcgccacgtacacctaccgcttcacactcaccatcaccgactacgacgcggtctccatctacctgcccgagttccaggaagccgcgcccaccgtaggcctcaatctcagctacgaccccattgcccgaaccgtgggtggccgtgcgcatctggacatgtgcctgtacgacggcctgggttcgcagagcgagtacctgggggtcaccgtgcgcgacagcggcacgcgccctccggggcccaccggctattcggtctggcataccgacggtgccggcggtgacagccaacgcatggactacaccgtcaccctcgaccacaacggcgcgcgcattccattgcgcaacggggtggaagaacaactgcgcaacatcgatacggcgcggctgcgcctggtgatgttgccagggatgtcgcagccggtgttctgcgtacccacgccactcaccctcgataccccacgcgtacccatcgacgagaaacgttctggtgcctaccagggcgatctgaaggtcgaactgcgcctgcctacctcccgcccgtga

SEQ ID NO: 504848 - DNA, 699 bp, Stenotrophomonas maltophilia
atgcatcccgccttgtcctgcctgttcacctgcgcgctgctgcttgcagccgcgcccgcccacgccaacctcaccgtgcatccgatgcgtacctcggtcgaggcccggaagggcgcgcagatccgcgtgtactcgcaatccaccacggcgcaatacgtgcaggccactgttcgccgcatcgacgatccggccagtagcgacgagcaggaaatcgagatcgagccagccgacgcggccattgccatcaccccgggcaagttcgccctggccggtggcggcaatcgcctgatccggatcattccgctgcagccggtggagaaggagaccgcctaccgcgtgtacttcgaaggtgtgcgcggtcctgatgatgccgagccggacgatccggccacccgcgctgccgtgggcatgagcctgatctggggggcgctggtgaacgtggtgccggccaacgggcatgtggacgtgcgcgtgcagggcaacagcctggtcaataccggaaccctgcgcgtgggcctgaccagcgtggccgactgcgatgcggccggcgcctgcaccgcccatgacgtctcacgcagcctctaccccggtgcgtccctgcaattgccctttaccccgaagcccggccatcgcctgcagctgcgctatcggttgacccgcgatggctatcgcgaacacgtgcaggccctcgcgctctga

SEQ ID NO: 504849 - DNA, 4923 bp, Stenotrophomonas maltophilia
atgaacaggatctatcgtcgtatctggtgcactgcgcggcagtgctgggtggtggccagtgagttggccgcggcgcgtggcaagcgtgctgctggcccgcgcgcactggccagcgtgctgctgatgctgcttggcacacccctgctgtctgttgcatcggagcgtggcagcgaaaatgaagatggcgaggcgccactggaaatcgtaggcaatgacctgggggcacccgccacccagcttgccatgcaggaggcgatgcgctcggcggcacatgcggggtatgaatccagggtaggtgtaatgggccagatgccgatggccaatggatccaccctcggtggctatgccatgttcaacgaatcctgtgacggggacctgggcgggacctactaccggtgtacaccttcctacgggtccattgaaaacttcgtagggagcaaagtgaactatagctcaaaagacgttctgcacaccggcgttgccatcgacgtgagcggccactactccacgtccttcggacacggtatcaatgttcgtggtgacttcacttctgtatttggatacggcgccaaggcacttgctggatacagcaccatcatcggcgccacggctattggcaacggtatcggtactacggttgtaggaaatgatgcgcgcgcgtacggcctcaattcgatggcattcggtagtggtgctcgtaccgtggaaagtcaggctggcacctcacgtgtcgcgatcggcggcaatgccttcgcgggcacagccggatactccggcgccgttgccctcggcggcaatgctcgcgcggaatacaatggcgtcgcattggggcaccatgccaaggcactcgcaaccggctcggttgcgctgggtatcaactcagaggcgaccgaatcaaattcggtatcggtgggtagcagcagcaccaagcgcagagtcgtcaacgtggcagacgcgcgtttgtccaccaccagtaccgatgcggtaactggccagcagctctacgcgaccaaccagaacgtcaccaccgcgaccaatacggccaatgccgcaaagaccgctgccgaccaggcactggtcaacacgcgactggtcacccagacctcggccagcagtgccgtacgcgtgggcggtgacaacaccggcacccaactggacatccgcaacaagtccaacgccaaccgcaagctgaccggggtggccgacgccaccctcagcaccaccagcaccgaagcagtcaccggcaagcagctgcatgccaccaacactgcggtgaccacggcgcagaccacggcaacggcagcgaagggcgcggcggacactgtcgcggcgcgcgtggatgcgcaggcgctggcgctcggccgttcggccttggccggtggcactggcgattcggctgcagttgccctgggaaccaacgccgctgcctacagccgtgacagtatcgctctggggccgaaggcacgggcgggcgtaggtgccgatggcgagaacaacaatggtgtgggggcaacttcgatcggctcaggcagttggagtgcgaatgcagccacggccatcggctatcgcgcgagggcgttgagtaatcgctccattgccatgggcatggacgccatggcctccgcatcgaatgcggttgcgctgggtgacgacgcggtgtccagctttgccggcagcgttgcgctcggcagcaactcgcgaaccaccggtgtgaatcagatttcggtcggcaacgacacggtcaagcgccgcattgtgaatgtcaacgatggcaccctcagcgcaaccagcagcgatgccgttaccggcaagcagctgcacgcgacaaacaccacactgaccagcgtgagtagcaccgctaccgcggccaaggcggccgccgacaatgcccttggtcaggtgaccaccgtggccggtctggtcgggcaggtatcggccagcggcaatgtgcgcctgggtgcgcagaacaccggcaccgtgctggatgtagccaacaagaatggtgctgcccgccgcatcagcaacgtggccaatgccacgctcagtgcatccagcaccgatgccgtgactggccagcagctgcatgccaccaacacggcggtgaccaccgcacagtccacggcaactgccgcgaagacggcggccgacagcgccatcagccaggtgggtacggtggccggtctgatcgggcaggtgtcggccagtggccaggtccgcctgggcgccgagaacaccggcaccgtactggacgtgtccaacaagaatggtgcgcgccgccgcatccagagtgtcgccaacggcatcctgggcgcatcgagcaccgatgcggtgaccggtcagcagctgtttgccaccaacgagcgcgtaggctcggcagaggcgcggaacgaggcccaggatctgcagttggtggatcatgctgatcgtctggctggccatcgcgtggatctggaccgcctgcgcgccgagttcgatggcttcgaaccggatctggaaggcgtggtgaagttcaatgctgaccggaccctggttgaccttgaaggtgctgtggtgaaaggcgttggtccgggggatatcagctcggctgccagtacggatgcggtgaatggtgggcagttgtttgccaccaatgcccggatcgagcagatggagcagggtagtcgtttcctgcaggtcggctacgatgagttcagcgaggatgcgtcggctggttggttgggtgtcgccatcggtgattccgcagagtcgtcaccgactggtgagggtggcaccgctgtgggcagcttctcgaaggcgcttggtatcaactcagtggcgctgggacgcggtgcctatgtcgctgtagaggcgggcgaaggctttgcacttggggcgagttcaagagtgggtgctgccggtggtgttgcggtgggtgcactcgcaattgttgatcagaatgcgaggaatagcgtcgccctgggtcactcttcgtatgcggatgaggagaacaccgtatcggtcggtatgaagaaccaggagcgacgtatcgtcaacgtccagaggggacgaaacagcactgacgtagctacggtggagcagctcaaagatggtctcgccacccttggcggcggtgccagcctcgacgccagcggcaacatcatcgcgcccacctacgcgattcaggggagcaaccacaacaccgtcggcgatgcgctgaccgcgctggatggtgcggtggttgtgaccgatgcacgcgttggctcgctggaaggcaagctgcgctcggcattccaggacaccacgatccgcgctgatggtttgaaccaactcacgctgtccggcgcacagggggcggtgctgaccaatctggctgatggtcgaatcgcagcgggcagtcgcgatgcagtgacgggtagccagttgcacgatgccaagcaggagatcgcccgcaatcgcagcgatctggatgcgctgcgcgactctcaggtgacgaacaacgatcttgcacgcttgtctgcggctgagacagggcacgtaattgacttcggcggcgcgacactgactggtgtggcggatggcgagctgtccgcagggagcaaggatgttgtgaatggccggcagctgtacaccaccaaccagcgcatggatggccttgagcagggaagccgcttcgtgaaggttggctacgacgatctgagcattgatgcatcggcgggctggttgggtgtggctatcggtgattccgccgaatcttcgccgacaggcgagggtggcacagcggttggtagcttctcgaaggctctcggacgaaattctgtcgcgctaggtcgcgcagcatttgttacggagtcggcgatagaaggcttttctttgggcgcgagctcgaccgtgaatgaaagtgggggtgtcgcacttggcgctcgctcggttgttgttgatggcgctcgcaacagcgttgcacttgggtatgcctctgttgctcaggaggcggacaccgtttctgttggtaacgaggactatcgccgccgcatcgtaaacgtcgccaacggccgcaacgcccaggacgccaccaccgtcgcccaactcaacgccaccctcgccaacctaggcggcggcgctcacatcgacagcaacggcaacatcatcggcccgcacttcaccgtccagggccagcagcagtccacgctcaacgatgcactgcagtcgcttgatggcgctgtcaccagccagggctcgcgcgtggacaaggtggaaacccagctccgctccgtcttccaggacaccaccacccgcagcgatggcctgaacgagctcaccctggccggtgcacagggcatggtcatctccaacgtggccaacggcctggtagctgccggtagccgcgacgccgtcaacggcggccagctgcacgacgtgcagcagcagctcaacggccgcatggacgggctggaacagcgcatcgacggccagtcgcaggcgcgtgttgccgtcaacgccaccggagcccccgaggcccccacgccgccggccgaaacgtcgaccgtggctgacatcggcaaggcacccaacgccacgccggaaaccccgaaggagccgaccccgcaggtcgataccgcggatctggaaaagatgctggcccgcgccaacgagtacagcgatggcatctcgcgcgaggtggatcgtcgcctggacaagatggacaagcgcttcaaccgcatggcggcgatgagcagcgcgcagagtgcgatggccatgaacaccgccggcctgaacacctacaaccgcctgggtgcgggcgtgggctacagcgatggcgagtcggccatggcggtgggctaccagcgcgtgctcaacgaaaagggctcagccaccttcagcctcaatggcgcgttcaccaacagtggcgaacgtaccgtgggcgtgggtgtgggcatcggctggtaa

SEQ ID NO: 504850 - DNA, 750 bp, Stenotrophomonas maltophilia
atgtacggttgggtacgtcgattcatgagctaccgcagcttctatctgtggcgtgcgcggtactactactacacccggcacctggatggctggatgctggccagcctgctgtgcctgtccggtgtggtcatgctgctctggtactactggcggttcaccaatgtgcctccgccgcgcatacacccgcaggcggccgcgctgcgggtggagggcatcggcaaggaggcgatccatcgcatcgtgctggtgcgtcatggcagcaacacgccggggcaaccgtacgtcaccgcggaggacatccgtgccagcacgcggcgaaccatgcgggtacggcaggcgatggaaagcgaagtggcgtggcggttgaaggccaacctgctggcggatattgccgattacatcgaggccacgggcggctgtgcgccctatcgctgcacgcgtgtggtggaccgcattgcctcgctgcgtgaggcggccgaggaaaacgccggcatcaaccgcgcgctgcagaccattctggatgggccccacgatctggtgccgagcctggaaagcagcgatcgccagcgggtgaagagcggctggtctgattcgttcagcgacatctaccatcaggcctggttgttgaatgacctgcagaccatgcatgcgcggatgatggaggagtatccgaagcgtgccgccgccccctggctggccgagtggatgagtgaccccgagccgtcgcgtggcaccggattgccactgtag

SEQ ID NO: 504851 - DNA, 603 bp, Stenotrophomonas maltophilia
gtgccaaccaaggttggcacctaccagggcacggcggcacgctatgctgtggcgatgaacgatgattcccgtttcctgcatgatctgcagcagcgcgaggcttcaggcgaagacctgcgttacctctgcttctggggccaccagccgccgcgcagcggagtttctgcgtcctgtttcagccagtggtattacgccggcttcgagatcgatggcgtgcactaccgcaccgccgagcactacatgatggccggaaaggcgcgtctgttcggcgccaccaagctgcttgagaagatcgtcgccagcaccacgccggacaaggccaaggctttcggccgccagatcgaaggcttcgatgaagcgcgctggacgcaggcccgctacgacctggtggtggaaggcaacagggccaagttcgcgcagaacccggaacttggggcgttcctgcgtgcgaccgcaggctgggtgctggtcgaagccagcccggtggatttcatctggggcatcggcctggccaaggatcacgccgacgcgcacaacccggcgcagtggcgcggattgaacctgctggggtttgcgctgatggacgtgcgggacgcaatgtaa

SEQ ID NO: 504852 - DNA, 1953 bp, Stenotrophomonas maltophilia
atgaccgaacacctcaccgacctggacgccgctgtcgactggttgtttgcgcgcgtggacgggccgttgcggatcggggcaccgctggcgctgggcaagccgcaccggctgctcaatgccctgtacgcgcgcgtcgagcacgacccgtcgcggccgctgcagctgtataccgcgctgtcgctgaacccgccgaaggcgcgcggcaacggcctggaagcgcgcttcatggcaccgttcacgcagcgccacttcggcgacgatttcccgcgcctggcctatgccgatgcgatcgcacgcgacgcgctaccggcacatgtgcaggtggaagagttctacatgcagtccggcgccctgctcggttcgcgccaggcgcagtccagctataccagcctgaactacacccacgccgccgacgcggtcgcccagcgcgcgccgcaggtgatcgtgcagaaggtggcgatgcggccggatgatcgccggctgtcgctgtcatgcaacaacgacatcacccaggacaccctggatgccatggccgcacgtggcctgccgcggcccctgctgatcgccgagatcgacccgcagctgccctacctgggcggctcggccaccgtggatgtgtcgttcttcgatctggtgatcaccccgccgccgccgtacccggcactgttcggcctgccgcggcagccggtcggcgatgccgactacgccatcggcctgtatgccagcacgctggtacgcgacggcggcaccctgcagatcggcatcggcacgctggccgatgcgctcagccatgcgctggtgctgcgccacaccgacaacgcgcgctaccgccgcgtgctgcacgcgctggacccgcagctggccagccacccgctggtgaaggagattggcgggctggatccgttcgaggtcggcctgtacggctgcagcgaaatgctcaatgagggcttccgccggctggtgcagaccggggtgatcaagcgcaaggtgcatgacgacctggcgctgatgcagcgcatcgagaacggcagcacgctgtccatcgaccacgccactctggccgccgagggagaatacctgcacggcgcgttctacctgggctcgccggagttctacgaatggctgcgcacgctgccggatgacgaatgccgtgcgatcggcatgcgcaggatcagcgagatcaaccagctgtacggcggcaacgagacgctggaacgcctgcagcgccgccatgcgcgcttcttcaattcctgcatgatggccaccgcgctgggcgcagcggtgtcggatgcgctggacgatggacgtgtggtgtccggcgtgggcggccagtacaacttcgtggcgatggcccatgccctgcccgaagcgcgcagcgtgctgatgttccgcgccgcgcgtgacgacaaggggcgccgcgaatccaacgtgcgctggaactacgggcacaccaccattccacgccacctgcgcgacatctacctcaacgaatacggcatcgccgatctgcgcggcttgaccgacgaggattgcgtgcaggcgatgaccgcaatcaccgaggcgccgttccagggcgacctgctgcaacaggcgcaggctgcacgcaagctgttgaagagcacccagccggatcccgagcgcctgcagcgaaacacgccgcaggcattggccgccgcactggcaccgttccgtgccgatggcagcctgccggactatccgctcggcagcgatttcaacgagattgaacaggtgctggtgaaggcgctgggatggctgaaggccaacacgcagacccgtggcgacaagctgcgcacggtctgggcggcgctgcggcaaccggccggcgacggcgacgcggtgtacctgcagcgcatgggcctgcaggcgccgaaggatttcgccgagcgcctggacgcgcgcctgctgcgcctggcgctggcgcgtactgcgtaa

SEQ ID NO: 504853 - DNA, 1242 bp, Stenotrophomonas maltophilia
atgactgagctgctcgacggactgtggcgggccagcctgtggctggcggtgggcgtgctgctgctggcggcgctgcgaccactgctggtgggcctgggcggcgccgggctggcctatcgcagctggtggctgctgccgttgctgctggtgaccttgctgctgccgttgccgcaggtcgcgctgctgcagcatgtaccgacgctgccgttgaaagtggtgccgggggccactgacggtggggcaggttggtcggtgcctggggccctgctgtcgctgctggcatgggcgctgggcacgggcatctgcctgctgcgcgacctgcgtgcgcagcgccgtttcgaacgcagcatgggccagctgcgtgcgcgtgccgatggcagctggcaggccagtggcgatcccgggctgccggcgctggtcggcctgtggcggccgcgcatcgtggtcggtccgcaattcgatcagcagttcaccgcacaggagcagaacctgatcctgcagcacgagcgcagccatcgccgcaatggcgaccactgggccaacggcgcgctgctgctggtgcgcgcagtgttctggttccacccgcttctgccatgggctgcacgccgtttcctgcgcgaccaggagctggcctgtgatgcccgcaccattgccccgcagcctgcgctgcgcggcctctatgccagcacgctgctgaaggcgcagctggtccatccggttgcgcccgcggtctgccattggcgcagccaacccgtgttgaaggagcgtatcgccatgttgaagcagtccaagcggaaggcattgccgtgggtgtcggggcaggtgctggtggtcgggttgtgcgtgggaatggcggcggtggcgtgggccagccagggcggtgcggcggtaggtacccggatcggtgtcgagccgttcgaacatgcggaagaggatgcggcaaaggcggggctggacagtccgatccaggtcgacaagatgccgccaccgtcctatccgaagtccgccttcgagcagcgccaggtgggcgtggtcaacctgcgcatcgaggtggacgcacagggccatccgaccgatgtacaggtgctcagcgcgaccaatccgggggtgttcgatgccgtctccatcgccgccgcgcgcagctggacctaccgaccggcgcggaagaacggcaagccggtggccggtgccgtacgcattccgatcacctacgccatggatgacaccgaggatacgaagtga

SEQ ID NO: 504854 - DNA, 861 bp, Stenotrophomonas maltophilia
atgctggccgggctttcctgtgtactggccggttgcacgccgcatgggcaggacaagcacgacctggatgcgtatcgaaatggtccgccggcctgctcggccggcggctacctggcagcgctggacgaccccgcacgcgtggcgtatctgcggggagcgctgcaggtccgcccgcgatcgccctgcatcgccgaactgctcgccgcccagccgccggccttgctgccggttgcgcggcaggcgatcctcgatgggggagagcgcagtgatctttcgcttctggtcggcgcggtggcaatgaaggtcgatcgcggcgaaatcaccgctgcacaggtggatgcgctgcagctgcaggcggcctgtaccgactccccaggggcgccggcgcaatgcgcggaacagctgcagcgcctgcggcaggccttgcaggaactggaggacccttcctcgcgtgtattgacgcagaagtcgaaggtacgcctgtcagacgcgtctgccaccaggcgagtggaagccacgcttgccatgcgcacggccgatgcaccggccgcaagcggcgttgcgtgcggcgggaccacctcgccatgccgcgaggtcacgcatctggaactgcgcgtggatggccagccggttccggtggcgtactcggtgtaccgcgatctcttcgacctgcatcgcggaaccctgaaggcagatgctggcggcggtgtgctggacctgcagggcggcgacgcatcggagagttacaacgtgcgtatccgcttcgatgcgcagcgcgtgctgtcacggcagatgtatgtgggcacggcgcaggatgacctgctgcaggaaaccgtctatcacaaggtgatctacgaatga

SEQ ID NO: 504855 - DNA, 453 bp, Stenotrophomonas maltophilia
atgatcagagcgctcggtaccatcgtcctggtgtacctggggctgcatatgacgccttgcctggccacggagcgggaccagggcgccgatatggtggtcatcgcaacccggttcatcgccgtccacgacgcgcgtgccgacacagcgcgcaatgcagacgaacccttcatcgaagaccgtgtgatccctgctgtacacgcgatggtggaacgcgatgctggtcgactgacgcgggcgcagctgcaggcactgatcgatttcatgattgtggtcgatggcatggccagtgaagaaatcagcgagatggctgcgacgctttaccgcaggcaggggcctgcagtgtgcaccttgctgaagaacacgcctgcaacccgccgcagcgtcgtcattgcgcgcattcgcagtggcactgcgcccactgcagcacggaacagccctgcagtgtgcgggtga

SEQ ID NO: 504856 - DNA, 1128 bp, Stenotrophomonas maltophilia
atggcgatcacggacaggcgcatcatggccgggcatcccgatgacgacgggttcgccgccgcgttcgatgcccaggtggtctggcgcatgcgctgggcctgcgccgtggcaggcgcgttctcgctgggctttgccgtgctcgatacctactggttgccgccggaggtgcacgcgccggtgctgcgctggcggctgggcgttctgctgccggcactgctgctgggcgtcgcgctgaccttcgtgccgatgctgcggcgccacctccagtggctgggcggcagcgtcgtgctggtcagcgggctggcgctggtgaccatgatctggaccgcgcaccgtgccggcgtgaactacccctacgaaggcatcagcctgttcctgttgctgaactacttcctgtgcgggctgcgtttcggggtggcgacgctgaccggaaccctgatcgcgctggcgttcctgctggccgagctgcaggtgggccggcactgggcgcagatgctgcagagcgtgatgttcgtgctggccagcaacctggccggcattgtcggcagctacatttccgaacggcaggcgcgtgcaacgtggcgggccgagcaacgcctggatgcgttggccaaccacgatgggctgaccggcctgctgaaccggcgcgccttcgatcgccaggccaaccagatcttccagcgctatctgcgcacgtcgcatgcgcgcggcgcactgcgcatcgccatgatcgatatcgactacttcaagcgctacaacgaccaccacggccatcccgccggcgacaccgtcctgcatgcggtggcaaccaccctggccgcgcagctgcgcggtagcgactcggtggtggcgcgctacggcggcgaagagttcgtggcgctgggccactgggcgccgggccaaccggaatcagcgccgttcgagcagcttcggcaacaggtgcaggcactggcgatcgcacatgccgattcggatgcagccccggtggtgagcgtgagcatcggcgtggcgcgctggcatgacgatggtggcgatacgctggagcaggcattggcacgcgccgatgcagcgctgtatcgcgccaaggaaagcggccgcaaccgggtggaagtggcgccggatcaataa

SEQ ID NO: 504857 - DNA, 1302 bp, Stenotrophomonas maltophilia
atgtccgcttacgaccgtttcatcgaagatgcagcaacacgccttgaactgggccatcgcacccgttgggtgatcgaggtgatcaccgcctgggtggcctcgcatccccacggtctggacggcgtgcagcagcgcttcgaacaggccggcctggccgcccgcttccactcctggcggcacccggccagcctgcgcctgcccatcgttgccagcgaaatggagcgcgccctcggggcgcacacgctggccatgatcgcccaccgcagcggcatgtcacccgggccgttccgtgtggtgatctgcaacctgctgcccggcgtcgtcaccctgatgtccgccccgcacagcgccgatgaagtggccgctgccgccgttccagcacgcaggaacgccgcgcccaggcgcatgcgcagtctggtgccctcgcgtgcgatgtacggcatggccctgcgcggcctgctctggaccgtggctgtggttgcggtgctgggcctcaccacatggttgttgctgaaagcgcgcacaccgctgtggacggtgcaggacacgcccgcgcagcatgaagcgcacctgtccctccttcagcgcggcacgcaggtacaggtacacgggcgcctgcccagcgagagcgaccgtcgccgcgtctggaatgcgctttccgccgtgcacggcgcgcgcaacctggagggtggcatcgcactggacccgcacacccaggcgccgcgctggctggatcgcctgatcgtggatcttcccctcctgcggggcgacggcctgcaccttgtgtttgaaggcacccggttgcggatcgatacccgttccatgcaggagcccgagcggctggccatctcgcggcggttgcgccaggacttcccgtcgctggagatgcgcgggctgtggggcccgggcctggccgcgctggcgcagctgtcacctgacgctgcccctgcacagcgggtagctgcgttgaaccagaccacgctgaaattccacgccggctcctccgaattgaccggtgactcgcggcagacgctggaagctgccgccaacgcgctgcgtgacacgccagcaggcacgcgcgtggaaatcggtgcgcacaccgacagccgcggccaggccgaagccaatctgcatctcagccagcaacgtgccgaagcggtgtcgcaggggctgcaggcgctgggggtggagcctgacacgctggtcgccgtgggctacggtcaggaacatcccgtggccgacaaccgcagcgacagcggccgcgcgcagaaccgccgtatcgattaccggctgctcgactga

SEQ ID NO: 504858 - DNA, 438 bp, Stenotrophomonas maltophilia
atgaaggctggctcgaaccgcagtgaggttgccaccgagaccggccgcgcggtgatcgtgttcgatggtgtgtgcgcgctgtgcaaccaatgggtgcgcttcctgctgcgcttcgatcgcgcggggcgttaccgcttcgccgcgatgcagggcacgcagggcagcgcgctgttgcgtgcgcacgggctggatccgcaggacccggcgtcgttcctgttgctggacgcacggggcgcgtggaccgataccgatgcgatcctgcgcgtactggcgggactcggcggtgcctggcgttttagcggcgtgctgcgcctgctgccgcgcagctggcgggacgcggcgtatcgcctgctggcgcgtaaccgctatcgctggttcggacgccacgatgcgtgccatctgccggcgccggaacacctcgcgcggttcctggattga

SEQ ID NO: 504859 - DNA, 1194 bp, Stenotrophomonas maltophilia
atgaagacctcaaccgtttcccgcacccggcccctgctggccaccctcgccgccaccctgctggccctgcccgctgcagtccaggcctcagagccgggcgagctgctcagcgcagcgccctatcgtgccgcctgggtgccctcgaaggcatcccaggcgtacctgctcagctaccgcacgcccgatcatcacaaccggctggcgcagggcaccggtctgctctatctgccggcaggcacggcgccagcgggcggctggccggtcgttgcctgggcgcatggcacccagggcattgccgatcactgcgccccttcccgttccggccccacccacgccgaacgcgatgggcgcttcctggacgccttcctcgcccagggctacgccgtcgtcgcggccgactatcagggcctcggcagccccggcgatcacgcctacctgcatgtacgcaccgccgcgcgcaacagcatcgacatggtcaaggccagccatcggttcctgggcagccgcctgtcaccgcgctgggtctcggtgggctactcgcagggcggtgccgcggcgctcagcgccggccaccaggctgccgcctattccggccccggcctgcagtacaagggcagcttcaccgcaggcacgcccacggccgtggagatgaccgcactggtgatgcgccccgacagccgcagcgccaatcccggcgcactcaatgcctaccatgcctatctgcttgatggcctgctgcaggtggcgccgcagatcgaccgcgtgctgagcccgcaggggcgggcacgcattgccctggcccgacagcactgcctgaccgatctggcggcacagctggagggcgccagcaccggcgagatgttcagcgcgccgttgacctcggtgccgggcatctggacgctgctgcacgactatctgggcgtgccacggcacgggttcgcccagccgctgatgctggcccacggcacgcgcgatcaggacgtgccctatctgaccaccctgctgtatgccgccggcttggccctgcgcggcgaacccgtggccttccgccagtatccggtcgaccaccgcgccacgctggatgcggccaccgctgacggggtggccttcgtaaaagcacgcctggcagatgcccgcttcgacgaagccgccgaagccaccggcctggaaaaactgctggacgccgcacggtag

SEQ ID NO: 504860 - DNA, 1026 bp, Stenotrophomonas maltophilia
atggacaagcctgaattcatcatcgcggtgctcgacgggacgttggctgccagcgtgggcgcgacactcgatgtactggatttcgccaatcgctcggccgagcgcctcggtcagccggcgctgcgctggcgcgtggcaggcagccgtcgccagttgcggttgagcaatggcatgacgctgaaggccgagccgctgtccagcatcggcgatggggctgccggcgtactggtcatacccagcctggggctggacggcatgctcgatgccaacgggcacgagccatgtggactggacgcccgctacaccgacggtattgcattgcgccggttggccatgccggatgcccagcatctggcacgcttggctgcccacttccacgcgagcgggggcagggtctgcgccagctgttcgggggtactggtgctgggggaggctggattgctcgacggccgtcgtgtcaccagtcattgggcattggcgggcctgctgcgtcggcgcttcccgcaggcacggctggatccggcctgcatggtggcagaggaaggtcgactgaccacggcaggagcagcaatggcacagatggatctgatgctgcacctggtgcgccagtactccgggcgtgacgttgccgaggcggtcatgcgtttcctgctggtggacagccgcaccacccaggctcgctacatggcctggcaggatgccgaccacgatgacgacaccgtgcgccgtttcgaatcgttgatcgaaaccagccttccgcatgctctgggcatggaagaagcggcccggcgcctgcacctgacggcgcgtaccctggcccgacgcgtccatcgggttaccggcagttcgccacgggtgctggtgcagacagtacggatgcggatggctcagcggcttctggagcggacagatctttcggtggaggatgtggccgagcgggttggctatgccaatgcaacgtcgctgcggaagctgacgttgaagatgacgcagctgacaccggcactgttgcgccagcggctctga

SEQ ID NO: 504861 - DNA, 1212 bp, Stenotrophomonas maltophilia
atgcagacagagccacgcagcacggtgttgatgggctcgcctgcagtactgccatcactgtggccagccttcgccctgtgcctgtcgatggcggttgccaacggcctggggcgatttgcctacgcactgctgcttcccgccatgcgcgaggatctgcaatggacctatgcgcaggcgggttggctcaacacggcaaatgcgctcggctatgtgcttggagcaggcaccgcctatgcgcttctgcaccgggtcagcgcacgccgcttgttccaggcaggcctggggctgtgcgtgttcactctggccgtgaccggcgccagcggtgccctgccctggctgagcacccaacgcgtgctcaacggcgttggcgctgcctgggtctcggcctgcggcagcacgctcgtgctgctgcactaccggcatgcacccaaccgtcgcggagcggcaacaggtctgttcttcggcggcgccggcatcgggctcattgccgccggcctggccgtggcgccgctgctggccatccatggggccgcaacctggccaacggcgtggctggtgctgggggccgttgggcttctcgcctcgatatggccaatgacactggccggccggatacaggaatcaaccgccgtcactgaagcccacgaccatgcgccgctgccacttcggcacctgggtgcctgcctggcagcctacttctgctgggccggtggctacatcatctatctcactttcatttttgcgtggctgcgcgaccacggactgtcctggcagcagggcatcgccgtgtggacggtgctgggcatcgcaatcctgtgttcgggaatgctctggcggcgcgcgctgggtgcatggcctggcgcgcacgtgctgtcagcgtgctgcgcggtgtcactgctgggcacgctggcaccgttgctgggcggcacgacgggcctgtttgtttccgctgcggtgttcggctcaagcgtcttcatcgctgcagccgccatcgcggtccttgtccggcagaacctgcccgcagcgcgcataggccgcgcgatggctctgttcaacctcgccttcgccgccggccaggccatcggtccggtggccgccggcgcagtggccgatcgtaccggtctggatggagcgctatggctcagtgccgcgctgcatgtcgccgccgtcgccctgccgtgggcggcacgcgccccgcgcggcgccggatga

SEQ ID NO: 504862 - DNA, 429 bp, Stenotrophomonas maltophilia
gtgcgcattgtcatctctccgcgattttccgaagtcgatgtgctcgggcatgtcaccaacaccgcgctgccggtgtggttcgagcatggccgccttccgatcttcctgcatttcagccaaaccggaaacatgcgcgatctcagtctgatcctgcgccgttatgaggtcgacttcctgaaacagatccgcgcagagcacgacgtcgagatcgacacccgcattgatgcgatcggccggtcgtccctgtccatcgtgcagaacgccttccaatgcggccagcaggtcgccagcggacgctgcgtgatggtccatttcgactacgccgccaacgctacgcaggagatcgacggcacgcgacggcgcgccctgtcgatcttcttcaccgaggagtacgcccaatcacttgcgatgaaggaaccatcatgctga

SEQ ID NO: 504863 - DNA, 1479 bp, Stenotrophomonas maltophilia
atgctgaacaagacccaccgcgacaccgagagcttcctgcggcagatccagaacttgctgcccgtgttcgacagcaatgcgctgccgcaggagccgctgcccaaggagcgctgggcgcaactgatggacgagggcatctgcctgcccgctattccggtgtcgcacgaggggcggcacaaccaccgcgaaatgtgcgaagtgattgaaatgatgtcggagtacaacctgccgctgggcatgtacacgatgatcgtaaccgtgcttttcctgcgcaacgtagcgctcagcggatcgtcccggctgcaggcggaggtcttcgaggacttcctcgaaaaccccgtgatcggcggcatcgccttcaccgagccggagcatggctcgagcctgtcgcgcatgaagactacctatgaagaacaggatggcagctactacgtgcggggcagcaagcattggcaggccttcagcgcacaggccgactggtggatcgtgtgcgcccgccagtacgccggaaagcaattcggctacttcgtgcaccggcgctcggacggtggcttcgttaccaccgaggtttacgacagcctgggcctgaagaacctggggtacgggctgaacgaaatcgacatccgggtcgccccccatcggcggctcgacaagcgtcgcacgggactgggcgatacagccgagatcctgtgcgcgtcgaggttcagcaaggcggccatgtccagcggctttctgcgccgtctctaccgggaagcgctgtcgcagacgcagaaccgacagatcggcgaaggctccctgtatgacatcgaatacgtgcgctacaaagtgtcgcgcatccgcaaccactacgtgatctgcaacgcgctttaccaccatcttctgcttgaagaagactacacctgcgatatctccggcagcatgttcgcctccctggccaccaaggtgctgtcgtcggaactgatgctggattccgccatcgactaccaacagctgtgcggcggagaaggctaccgcaccggtgcggacaacatcgctgcacacgccctgctggatgcacgggtgtacacgatcttcgatggaaccaatgatctgctgtgccaacacctggccgacattgccctgcatgagatgcatgttggcgggttcgcgaatctgcgcgacgtcctgcaggccaacccctacagccgcttcgctgcggctcaggcaccccagttctacgacatcgatacgcagaacctcaaccaggcaggccgggttgttctggggcggatgctgtcgcggatcttcggactggactgcctggtgcgccgcgcacagcgcctgcaccagatgcccggagcgggtctggtggcgcgcgaccacgagtcacaggcacgctacgaccgtcgcgacattcgacaggcgtcaaaactgctgatgctcaatctcaatgcgctgcgggaagagctcgattacgtgcagagcgacgcatgcgcatga

SEQ ID NO: 504864 - DNA, 681 bp, Stenotrophomonas maltophilia
atggtcacgctgtatctgtgggtgcggacgctgtttccgttgctggcgttcgtgctggcctggatgctgctgtcgcgcctgatcaaggctcgcgtggcacaccttccccgcgttccattgaacctgcccgaacacagcagcagcccacgcaggaaggatcgacgcatctacaggcgcaagctgcggcgcaaaccggggctgcgcaacgcgactcgcccggctacggcgccgcgatgctggaacctcgcggcagctttcgtttcgctctgcgcactgatcgccgccgtactggtcatgccggatggcgcgcgcttccaggtgatggtcgagagccttgccggctacccggccaccattgctgaagtgcacgttcccgctgcaaggcagacgcttgtactgcaggcgtggcagcccacactggcgcagttgtcgcggcctgtaaccctgggttacccgatcgggcgcaccggcggcgagcatcaggcgcatgcaacgctgccggtgcaggtaaggcatcagcgtgatcggctgcaggtggctacgcccgtgcctgtggacggcgaagtgatgcgtgcggagcttgcgcgcctggctgggttgccagttgaggccatcaccgtccgccagaacaagatcgcgccctggctggaacccggttggacgccgctggccaacctgtag

SEQ ID NO: 504865 - DNA, 411 bp, Stenotrophomonas maltophilia
atgagtggctactggttggtatcagagcgcctcaagaaggccttcaccgaaatagatcccgttgcctttgagttcgtggagtgtgactacgtgcttccggacggcacagagggcccaacgtactacctgtgcgaggttgctcgcgaactggatgccgtcgacgaggaagcgtcgaagttccgggtcatcgttgatgagggctatccgggcggaaggttctacgaccttcgtggcggatcaagcttggcattcaagagggacgtaatcgggggcagtcatgtcttcaggagcccgtactcgggcgatcttgtctactgcgatcgcatgttccgggatgccatacgcgctgcaggaattggaagcgagtgtgaaacgcgtggcctgaggttcaaggacgcagccaatgtctga

SEQ ID NO: 504866 - DNA, 477 bp, Stenotrophomonas maltophilia
atgccgggggatggccgctatgctggcagcgcaccggaatggaagccacgtatgccccgcctgaacaccgccctggcactgaacctcgttctgatgctgctgggcgctacacctgccatggccatggcggcagacccgcaggtttccactgaagtgttcgtagagcgcggtgacaaccccaccttcgagctgcagcaggcacctgccattgagtattcaacggcccccgccacgccgcccgataccgtgctgcaggtccccatggcggtgctgttggttgctcagctggatgagctgggccacgtttccaacgtgatggtggcgcggtccagcggactgcgggagatggatcgtgcggccctttcctcagtgcgccagtggcgctttgatccggtcgtggttgagggcgtcgcgctgcatgcgcgggtgcgggtccgtctgaccttcgtgcccacggccgaggcgccgcccggctga

SEQ ID NO: 504867 - DNA, 1506 bp, Stenotrophomonas maltophilia
atggagaaccatgtgtcccttactctgcctgactcagttgccagcaagaggcttgcgccagatccggaaggaacggcagctttcatgagtcgaatcggctactcactggaagaagccctctcagacataattgacaactcgctagacgctagagcaaaggcggttgtaattagattcgtctgcggcagcgatagaattaatcaaattatcatcatcgacgatggacatgggatgcttcccgatgagctgcatgccgcgatgcagtatggcgtgagacagcatcataaagaaaaggacctcggaaagtacggaattggactgaaagctgctgccttcagtcaatgcaagtcactctcggtactgagccgaaaggcgcagaaaagctctgggcgccgttggaccattgaatcgataaaggacgactggcgcctcgaggaactcgatccggatcaagccggcaggatcttggatctcgactggcagcccgccgagctagcgacctctgggaccgcagtagtcctcgataagcttgactcactccagtctgccatgagcgactttagcaagaatctgcagaaaacgatcgtagaactgaagattgacctcggcatacgatttcaccgcttcttggactccgggcaactgcgaattgttattgacgtaactaacggcttgggaaacctgccagacacccagcttcatgtggagcccctcgatccgttcagatacccaaagtcaggcaggaaaggctatccggcgactttcgagttgcaggtgggaacgaagaacgtcaaagccgtggcgcatatttggccgccaaagtcaaaggatcccaactacaaactaggtacgggcaaggtcgctgaacgccaaggattctatttttataggaataaccggcttatcaaggctggaggctggcacaaccttcagtcggactctgagccgcactcatctttggcacgcgtactaattgagatgcccccggaactagattcgacttttcgcctttcggtacaaaagaacgactttaatgtgccggcggagttcattgatgctgtccgggcatccaaggcggggaacacaacatttcctgagtaccttaaagccgcccaggacgtctatcggaacgtaccggaagaagaggaaattgtcttctatccaaaatcgggaattcccagcgggctagcaaagagagtcgctcgcttgcttgcgggcagctcggagaacgcctcaacgcatcctatcgactttaggtgggaaagaatggatcccgacctcgtcttccgatacgagcccaccgaacagacactaattctaaactcagtcttccgaagcgcaatcacgggcgggaagaactcctcagccgacgctcccttattcaagatcatgctctttttctcattaagggatctgcctgcagccggtcggatgtcgaagaggctgaaggatcgtgttgatatgcttaatagaattcttcttgaggcattgaaatgtcaggcatag

SEQ ID NO: 504868 - DNA, 1011 bp, Stenotrophomonas maltophilia
atgtcaggcatagatgactatcgactgcctccatttgatgaaattgaagcggctttggcaacggaagctccacgtaggtttgggctaaagacatcgagagaggttagcctgatcactgagcccgaacatggcgcactgtggctactctaccctgcagacggaaaggcactttccacggtatccgcgaccagtgtcatagagatgtcgacccgacaaatcggagacgtccattactaccaaattggatcacagttccccccactcttccgagaggtctattacttcctttgtggaattgttcatcgcgccgaggtctcccaagattctttccaagacgtcgtcgcgagcgaacttgccgcttgggaagcgcttcttcgtgtaccagatcacttggacagaaatcaggtaatcggccttctcggcgagctcttcgttctatggcgagtcttgggaaaccttggcgccacggcgatcgactcttggactggcccggcccttgaacaacatgacttccgactgtcgaccgacgatatcgaggtaaagacgactttgtcacactcgcgcgaccacacaattagcagcttggatcagttgaccactaatcagcagcgctcgctttccgtggtctccatccaactgaagccggcgggtgagggaccgggtacgagcctaggggaggcggtcaggaaaattcgcttagacttggctgatcacccagtgtctcttaagaaattcaacgacaagctggcaaccatcggatatcgccatgaagacgatcctcgatacttggcaagatactgcctgcgaacttcgccaactattgtgagggtcgacaagaacttcccatgcatcaccgtggagacactctcttcaagtctcccaagctcgaccctacgacgtattaccaagcttacttacatcgtcaacctcgacgatatgggcttccccctagaccagccagggtcgcccgaggcactccgtcatccggataacaaggatctttatgcctga

SEQ ID NO: 504869 - DNA, 2913 bp, Stenotrophomonas maltophilia
atgcctgatcgccctaccgttgccctcaaagctattcgagagatcaaagacttgactggccgaccagctagcttggtggaagcgctggcaagctggtcgaaaaaggaggacctcgacgacccaatatctgttcaagaatttttgggctggcttcagccggcagcgcatgaaccttatgtgcggcagaattttcacggaatgatttcacaatgggactatcgccaagaattcgactggagcaacggcaccgcgccgagctccgaggccaggaggcacctaatttgctctctccttcatctttcagagcaagaggaggagctagtctcgcagattttcccggtgtatccaaagatcgaccagccaatcagaatctccgcagaggagcccggcactgcgtcttggtacaacgagcagcgacgtgatcaaagctctttctactggaagagctacgagcggtatctgttgcaggaaaagggttggacaccaaagaacgttgctgttctcgattcgacaagtacagacgttgttgcagatctttgcgatccgctaagcgctgaagcacgcacgacacgcgggctcgtagtgggatatgtccagtcaggaaagacggccaactttacgggcgtcatcgctaaagcactggatgcaggctatcgcttggtgatcgttcttggaggtttgcagaatactctacggagccagactcagcgtcgaatcgacaaggagcttgtaggcagagagaccttggaggcgagtacggatgagtacactgcggatggcgattggtcagatttcaacatgcacggctcgatgcccgacaagcttggttctttcaacatagaccgcttgacaacgagctcacaagatttccgtaatccggtgggagacctttccagactacgctttctcaagtcaaatccttcgctgccttttaatgacccaacgaacttgggaagacacccggccaagcttgttgtcatcaaaaaaaacaaaaccccgttaaccaacctcttgcgtgcgctcgaaaaatcacagaaggccggcacatcctgggctgaagtcccgtcgttaattattgacgatgagtcggatcaggcgtcccttaactcaaagaagccggcgagctctcagcagcaggagcgcacagccattaacggactcattgtcgacattctatcaatcctgaggcgaggacagtatgtcggatataccgccacaccatttgcaaatgtatttgtgaatcctgatgatgcagaagacctgttcccatcaaacttcataacatcgctcccacgccccgatggatacatgggagtccaagacttctacgacccacctgagattacaaagagcgcaccagacccgagtagcaattacggctcttacgtccgcccggtcaaaggaaagaacgatctctcagagaatcttccgcgcgcaattgacgccttcgtgctgtcgggcgccatcaaattgttccgcgagaataggaataaattaaagtacaagcatcacacgatgcttgtacatctcacaacaagcgtgaaggatcatgcacttctcaaggaccaaatagattccctgttctccagtgccgcatacgcgactggcggaagtgggtttgtaaggctcaaggaactatgggaggcggactataaaattatctgcaatggcgggcgccatgcagacggaaccatccctacagattttcaagacctaaaaccatttattggagcatgcgtctccaagataatttcagacggtccgcctacactcgttctaaatggggatgatcgcgaaaatgctcccgacttcgacaaatcgagcgtctggaaaattattgttggcggcgcaaagctatctcgtggatatacagttgaaggactaaccattagctattatcggcgagtcgctggagcagcggacacgctgatgcagatggggcgctggtttggctatcgcgatgggtatcgggacttggtgcgcctttatatcggaactcacgaaccgaaaacaaagaaggagaatattgatctctacgaggcgttccgtggcgtatgcgacgatgaagaggagtttagatctcaactaaaggtttactctagactccaaggtgatgagcgactgacaccaaagcagataccaccactggttcccagtcacatgctcatgccaacatcaagaaacaagatgtacaacgcgaaaattttgttcttgaactttggcggtgatcagaagcaaagtacaattgcttcaacggatgccggcatcaggcgggccaatgagaaggccatgaaagtccttcttcagcgagcggacccgaccgaaacgaatatagccattgatagcgacggggactcgttctcattcgacgcatttgttggagctgcgggccctagtgatatggccaagttcttgctctcctacaagtttggcccaaccgccaaagatcaaaaggacctcttacttgtcttggagtacattagtggcattcatggagatccggagatccaaaggtggcttgtcatctctccgcagtctgtcggggagagcaatgggtcgtggctcgttccaggagtgggggatttctcgattcggcgccgcgagagagtcggcgacgggcagaagcggtacaacgtcttcactgagtcacgccatgttgtcgctgcgaagatgctcactggaatcttgaagtctgcgaaaccatccaacctttcaactcaaaaactgcttctgccgggcaccgcggcaatgctcttctatccggtattatctagctcagagattgaacaaggccagattcctaccatgggcttctcactattatttccaaataacagaatgagacgtcgcattaggtatggcgttcaatccaaagaccgcccaggcgacgtgacagttgacgtggtgagctga

SEQ ID NO: 504870 - DNA, 1512 bp, Stenotrophomonas maltophilia
atgcacatcccagtcgtcgacatcttcgcaggcccgggtgggctgggcgaagggttctccgcttacacctcttcccgctcttcgaagtcacgcccgttcaagatctccatttcggccgaaatggaggtcaatgcagccaagacgctgcgacttcgggcgttctatcgccagttcgcaccccacaaggtgcccgatagctactacgactacgtggcaggacgagtagaccgcccttggacggaggtgaccaagactgagtgggacaacgcctgccatgaggcgaggcagttgaagctcggcgatccggaagacgacaaggtgcttcatgcccgtattcgcgaagtcgcgtcgcaggaagacccgtgggttctgattggtggaccgccctgccaggcgtactccttggtcggacgcgccagaaaccgtggcgtagtgggctacaaggcagaggaagatccgcgtcacttcctctaccagcactacctaaagatcatcaagaagtactcacccgctgcgtttgtaatggagaacgtcaagggcattctctcctcgaaggtgggcggtgagcttatgttcccgcgcattctcgcggaccttcgagcacctggtggtcggaacggcccgcgctaccgaattatccctttggtagaggaccagagtggtctgttcgatgacgacgatggacgccgatacattctaagggccgaggaacttggtgttccccaagctcggcaccgcgtggttctttttggtgtccgggatgacgttgacgtttcatcgctacgccagatcaatcgcgcgcccgccaagtacagcgtgggcgaagtgatcggcggaatgcctcatctcagaagcggcatcaccaatgtcgatttcgagaattggcccgatgccgccagggagattctgctccgtgcggcagagttgtctgacgatgcgcaggttgcagctgaactgcgcacccaagcgaaactggtacctgctctggatgctggcgctggcggcagggctaggccgtggacggcaacagtggatgaggttccagaacatctcaggccgtggttgctggacgagcgactcggctacattctgaatcatgaggttcgccctcatatgtggatggatctcgtccgctatggttacgcatcggctttcacgaagattcatggcagatcgccgcgtggtgctggcgaattccctgaaagcatgcatccagaccatgagaactggacaagcgggaagtttgttgaccgcttcaaggtccaacgcagagacgagtcaagctcaacggtaacaagccaccttcagaaggacggccattatttcattcacccggacccgtcgcagctgaggagtctctcagtccgcgaagccgcaagactacaaacctttccggacaactatttcttcgaaggctcacgtggagctcagttccgccaagttggcaatgcagtgccgccatggatggcacggcagatcgcggatgtagtttattccgtgctcgcaccctga

SEQ ID NO: 504871 - DNA, 834 bp, Stenotrophomonas maltophilia
atgatcccgaggggggggggcttggctaaattaacttctgctgcggttctaaccgtggccaatgtctggctcgctatcgcgacaaacagtagcatcctgacgctaggattctttaagtccgggattggtgcccatctgattgcgtactgggtccagtactacttttctgcgatcgctctcgcccttgttctgctgctttactggcagatagatcgccgtaagcgactggatgcgtttgttaaacacgtcctggacttggctgttgagttcgacgtcaaggattcctatgacgacgagctctgtcgtgcaacggtttacaggttccgccggatcagctttcttgcgtttatttcttacaggcaggtctggggagagtttcgtatgccttgggcgggttggcttgtgccagtttctcgctccggtgcacattcgatacctgtgatcggtcaaacagtgttcagagcatcacgcgttcaatgcaccaaaggtgattaccatggtgtcacaggagcgatctggagtaagggcaagcacgtattcagtgcagagcctacaccgaccgacggtcgcaagcagcgtgcccacgctcaaagcacagcgaagaagatgttccttaccgacagggagtaccagcgacgcttggcaagcaagaagacgctgtctccatacatttatgggcgccgaatcgatatttccggcgatagatgctggggcgtggtagtgtttgacctgccagctcctcctaaggtgttggaggcgggggctgggcatcaaacatctgatcaactggtcgttggagtgcttgctagagctattgaagggggaatgtcatga

SEQ ID NO: 504872 - DNA, 708 bp, Stenotrophomonas maltophilia
atggctgagaccttacgcaaaaagccccgttcaggtagggggctctatgcagggctgcgccctgcacccgcagaggccgaagcaacgtcaacgtcaacgtcaaaagcgggtttcctgagggatggcggggtgggtccggtggcgggagacgccgtaaacccgtccatgggggcttggccgcggcatccatgccgcggacactcccgccaccggacccatcccgccttcgacagtttcccgcgatctgcggtagatccacgccgtgcgtggatgctcttcgttcaattatcgaaatattcgatttcaatggagattcatccacgcatggcgtggatctactggccaccggcctactgtcgaaggcggggcactgtgggtttgcggggtgtgagcggcatggatgccgcgaccaagcccccagggacgggtttacggcgtccccgcaaacccacagtgtcccgccatcccacggaatgcccgttgttgctgttgcttcggccgttgccttggcttgaagcaggtgcagggtgcaaccctgccgaaccccccactacggtagtgtggcccgatgccgcgctgcagcttggcgccagcgcatatttgattacacttgaaacttgtttgcccacgactccggacacccaccatgaagcttggttctttgaaggaaggcggccgcgacggcaccctgatcgtcgtctcgcgtga

SEQ ID NO: 504873 - DNA, 1497 bp, Stenotrophomonas maltophilia
atgccctaccgtcagcctgacacgcagcgctggtcgctgcgggtggacccgccgtggtcgctggaggcctggcgcaacggcgcgcgcgatgccctgttgcgcggcatcgcaccggaacagctggactggctggagggcagcgacgcatcactgctggatgcgccggcggtcagctccgcgcccgtgctggccgatgccggcgtgccgaacgtaccgcgcgacttccttgaactggcggccacctgcctgtgccaccgcgatatgcagcgcatggccctgttgtaccggctgctgtggcgcatcacccatggcgagcgctcggtgctgtccaatcccgccgatgccgacgtgctgcgcgcaaccgcgctcgcccaggccgttcgccgcgatacccacaagatgaaggcgttcgtgcgcttccgcgaagtccccggccagcccgaggcgttcatcgcgtggttcgaaccacagcatcacatcgtcgatcgggtggcgccgttcttcgcgcgccgcttcaccggcatgcgctgggctatcctgacaccgtcacgcagcgtggcatgggatgggcaggcactggcgttcggccccggcgcacgacgcgaggacgccccggccgaggatgcgcgcgaggccctgtggcagacctattacgccagcatcttcaatcccgcgcggctcaacacccggatgatgatgcaggagatgccggtcaagtactggcgccacctgcccgaggcgcagctgctgccgcgcctggtgcgcgatgcgggcgatcgcgtgcaggaaatgcatgaccggccagcgcaggcaccgcagcgcaggattcccatgcgtggggatgctgcgtcggcgccccccgataccggcagccttcagacgctgcgacagcaggccagcgcctgccgccagtgcccgctgtgggagaccgccacgcaggcggtgttcggccaagggccggccaatgcgcgggtgatggtgatcggcgagcagccgggtgataccgaggatctgcgcggccagccgttcgccggcccggctggccagctgctggaccgtgccctggctgagctgggaatcgatcgcgccgcgctgtacctgaccaatgcggtaaagcacttccaccatgagcgccgcggcaggatccggctgcacaagcgtccggaaagccgccacatccaggcctgccggccgtggctgatgggcgagatcgcgcgggtgcggccgcagatcatcgtctgcctgggcgcaaccgcggcagcctcggtctttggccgggatttcaatctgtcgcacgaccgtggacgctggcatacgctgcaggacggcacccgcggctatgccaccgttcatccggcgtgggtgctccggcagggcgatgatgcccgccgcgaggccggctatcggctgttccgggaggaccttcggcagatgctgcgaggggatggggaatccgccgggcatggcccggcgcttccacgggccggggaccggtag

SEQ ID NO: 504874 - DNA, 228 bp, Stenotrophomonas maltophilia
atgtcaggtcggcgcggagacgggccacaagcccgcaaaaagagatgcggacggccccggatcgacgaggagaccggtaccgcccgcatcggtgagtggtgcctgcaggccaaggcaccactgcctgtggtgccttggcgcggccgcctcatcggcggtaccgcgatgccggggcaggagcgcccggcgggggccatcgatggccgggtcacgccgttccgggcgtga

SEQ ID NO: 504875 - DNA, 783 bp, Stenotrophomonas maltophilia
atgatgggacgccgcatcgaactgatgttgagcctggccggccgcgacatcaagacgaagtacaagcattcgctgctgggcgcgctatggggcgtgcttgtgccgttgatcatgcttggcatctatacagtgatcttcgccaccatcttcagtgccaagtggaaaggcattgaagtgcacagcaaggtcgactacgccgtgttgctgttcattggcttgatcgtctacaacttctttgcagaatcattgacgcgagcacctacggcggttctcagcaatcccaacctggtcaagaaggtagtcttcccgttggaggtactgccgcccgtggtggtgttgtcatcgctgtacaacgctggtgtggccacggtcgcgctcgcggtgttcctggccttcagcagctttggcctccattggcagatgatcctcctgccggtcctgattctgccgttgctcatgcttacgatgggcgtggcctatctgttcgcgtctctcggggtgttcttccgcgatgttgatcagattgccggattgctggcgcgggtgctccagtacctgacacctgtgctttatccatcgatcatttttcccgatgtgatcggcaagtggatgcggctgagtccgctggctgtctatgtcgagcagacccgcgcgctgatcgtgagtggcacattgccggattggccttcctatggctgggccgtcgcttggtcattggccattttcttcattggtttctggtggttccagcggacccggagggcgtttgccgatgtcgtctga

SEQ ID NO: 504876 - DNA, 1437 bp, Stenotrophomonas maltophilia
atgtcgtctgaagatctcgtgatcgatatcgagaacgtcagcaaggtgttcaacatttttgagaagccttctgatcgactgctgcagatgctgttgccacggctggggcgtgttctgcctgttggtagctcgtggacttcgcgtcaacgtgggcgtgagttctgggcgctgcgtgatgtcagtttgaaagtgaaacggggcgacgcggtcggcatcatcggtcgcaacggttcaggaaaatcgacgctgctgcagatcatcgccggcacacttgcaccgacaaggggcaaggccaaggtcaatggacggatcgctgcgctgcttgagctgggaagcgggttcaatccggatttcaccgggcgcgagaatgtcgtgctcaatggcatgattcttggcctgacggagcgtgaggtgatgcaacgcttcgatgctattgccgccttcgccgacataggcagtttcatcgatcagcccgtgcgcacttactccagcggcatgatgctgcggctggcatttgcagtgcagacccaggtcgagccggacatcctcatcgtggatgaggccctggctgtgggcgacgcgctcttccagaagcgctgtttccagcagatggaggcgctgcgagccaacggttgcaccctgctcctcgtctcccatgaccaggagtcgatcaggacgttgaccgatcattcgatcctcctgagggacggcaccgtgcgggttgcggggccgtcatcggacgtggtcctcgaatacaggaagcagctgcatgaggatgagcgcgactattacgcgtcggtcagtgcgcagcacctgcagtttgcccagaaaattgttgacgcgcaggtggctggcgaaggggccgcggacgtagagggccatgaaggttctgcgatcttgggtgcccgcagcgacaagttgtccttcggcgactatgactgcgtgatcgagcgggtgcgcgtgctcgaccagcgcgacgaggagtgcgcctacttcctgccgcaggacaaggtggtcattgaagtgaccgggcgcccgaagcgtgacatggaccgactcaacatcaatgtccggcttcgcaacaaggaaggggtgaagctctactcgtggggtactttgaaccaggatgttaatgcgtgggccgagcgcggacgggatgattcaggggtgtggaacatgatgttcccggcggacgttcctttcgtggtgcggtttaccttcgattgcgcccttggcatgaacttctatgaagtccaggtttctgtttcagaagaaatcgagcaatttggcggagcacagcgcatgctgcattggcgtgacgaggcggccttcttccaagtgggcatgaggcagaaggaatacacattcggtggtgtctgcgatctccgcatgcacgcggaagtggccggaattcagcgaaatacggagaaactgtga

SEQ ID NO: 504877 - DNA, 1800 bp, Stenotrophomonas maltophilia
atgcaaacaagcacgaatgttccccgttccgcgttgtcccccgcggcgttgcgcgtcggagttcgaagactgtatgactggttggctgcgggtccggttgcgctgctcggaaattccgagccggcattggcgcgcggcctgcggcagtgcggatatgaggtgcttgatggagtggaaggcgcagcgtctgcggtcctcgttgttgatcatgcagatgttggctccgccgatgagtgcctgcagtcattgctggcggatatccgtatacccgtatgccttctggtcggggggggggcggcaaccaacgtagcgcgtgcccagtgggaggcagcggccatccgccaagagtggcgcaaacatccgcagaacgagcgcgtagcgccatacggtgagttggatcgtgtcaatgggttgctgttgatggcgttcgaacgcgtgcccgacgcagccattgctgcctatcctctgagcgcgcttgtggaagagcgcgatctgcatacggacatgactcgcgaggctgggcgacgatccgatgcgcacatggcccgctatgcacaggctgcgcagttcattcgacctggggatcgcgtcatcgacgtcgcatgcggcttggggtacggctcctaccagcttgcccacaatagccaggcggcctcgttcattggacttgatgccagtgactatgcggtggactacgccagtacctgttttgcccctgatgccccggtagagatgagcttcgttgtcggcgatgcgcaggatctgtcgggaatggctgatggttccgcggacttcgcggtatctgtggagacgctggaacatcttcctgagcctgatcgactgctggcggagctgcatcgggtgctctcgccggaagggcgcttgtatgcaagcgtgcctaatgactggtcggacgaaactggcgaggacccgaatccatttcatttccatgtatacgactggccgcgactcatcaaccagttccatcggaatggtttcgttatcgagagggcgtggttgcaggatgccggaggtggccagaagcggcatctgtcggtgcgctccatgcttgagatcgatccgcacgcaggtccaagctgcgatggtgaatggctgctggtgctcgcccgcaagaccgatgcggcaatggaaacgggggacgatccgctgcgtccgttccgcgaaatgctcgccaacggacaaactgacgccgcattgcatgaacttgaggcccatttcgaaacgggagaaccgctgctccaggcccgctcgcgtgcggcggcggctgtgcttgcgacaaccactgggacgctggagtccgctgctgcgcattgggagcattgccggacagcggcccgtgaagcattggtcgagccatccatcgaggccgaggcggccgcgcttctgcatcttgccgcggcccagctggcattgccaacgcatctacgctttgctcgattgaaacttctgattcggatccgagccccgatcatctgcgatctgctcggcccggagcccgcattgctgggcgacaacgatgatcgcgccgtgtccgcgggcatcggggatggcaatgggcagtcgagcctgagtgctggcgatgtacagcagcttgtggatgccaagcgatggcttgatggcaagtaccacgagcagcagaagcatattgccgaactggagcagtacaacgtcgaactcgaggctgctcgcagatggctggacgcgcagtaccactcactgacggcagaggtacagcgcctcggacaagcgtctgctgctgcgtccggcgatagcaggtag

SEQ ID NO: 504878 - DNA, 2073 bp, Stenotrophomonas maltophilia
atggcgaccgaagccgctggggacggcgtatggcggatcgtgcagcagcaatcacgctgccgctggttgggcgtgctggcatcgcgaccacccgccccgtcgcagcccggcctcgaatggatcaaccctgcgcgctggccggagttctccgatttgctggatgtggtgatcacgcagatggccgtcgatgccgcggactggcacgggctgctgcggaatgcacatgctccactgcggcgaagcgggcggcttgtcctgcgcgtgccgttggcgcatggactcgatccgctgtcacatttggtgacttgcttggaagagttggagctggtggtggatcgcgcgtggtatcagcgtactgccggccggactggtcttgagcagttccacgaaattgaccgcgagactccgctcgccactgcgcgcggggagagcgccgacgcaattgtgctgctcgcggtgaaaactggcgggcgaggggtcacgcaggacccttccgcgcaggttcccaacatcatcgcattccatcgcgactatcaggacgcaagcgttgtccgcttgatcgtttccatgggggagcggatcgaatcaccggtgctacgccggcagcttgcccgcagcgtactcgactcgtcgtcaccgacttccgccgatcacggtgctgccctgtgcgtactgctctatgacgcggaagcagccgccggagacaagcgtgaggtgttgctcgctgccgtctggcactacatcaccgagccggctgccaatcctacggtgctgcgctggcaggtttccctcgcctttgccgccgctcagctctaccaggccgatggcaggctggaagaggcggctgagctctatcagcgtgtcctggcattcgatgtgctggccttcagcccgctgctgggtaccaagaccaccgccgccgccgcaaggttgggctggatcaggttcggccaaggcaacgtcgatgctgcgcgcatggcatggtcccgcggtctggacgaggcgcggcggctgtccgctcaggcggactggtccgaagtcgtggctgatcctgcggcgccggagacattctcgatgccggaattggccgtggtcatggatgaagccggtggcctggcgactgcgttgcgggtaactgctgagtctccactgcggccggggattgcttggcaagggggaaaccatacatggaaagcacaattgcaggaggcgcgcacggaactgcggcttcaacaggagtggattggcaaattgcaggttgccaaggactggctcgacggtcagtaccgccacctcaacgccgagttggagcggcgggaggggggggagcgcgtactcgagtcacagttgcttgtgctcgctcaagatatggacgaactgcgttcggatcttcagaggcatcgaatcgaaagtgaaacgctgcaggaaggaaaggcatggctggacgggcacactgcacgtctcgccaccgagctaaggcgactgatggcgcagcacgaggagctctcgtctgcgaaaaactggctggatgcccagtaccagagtctgagtcttgagctcgaccagcgcctgacgtggcagcgccagctgcaagaaggcaaagactggttggagcagcagtactaccggctgcatgaggagttggcactgcgtaccgaagagcttcaggcatcgcagtccgagaatgaagccagggcggcagagatcgtgggcctccgggccgcattccgctttgcgcatctgcatgcggaagctgaatgggcggggctgcaggatgagctccagcggaggcgggaggagctggcgcaggtgcacaacgcgtatcagcgccaatcagctgcactggacgacaagatcgcagcacaccggaagctggaggaggcagcgcgtgatctcgccgcagcaaccgggctgatcatcggcaactcacctcagctgcggttcccggccgaggccatcgcagaagagatgacctcgctcgcgtcagcacttcaacgcatgccgctgaagtccgtggtacgcacggcattgcgtttgcttaccaagctgctcgattggagacatccgcgatga

SEQ ID NO: 504879 - DNA, 732 bp, Stenotrophomonas maltophilia
atgatggctgaacttaccgtcgtagtgactttccatcgcgagggattgtttgcatatgctgcgctgcgaagctacatgcggtcgcgccagcatgcgtctgccgccggatcgcaggtgaagttcgtgctggtattggacaatgcagatgagaaaaccagcgcaattgtgcgcgggcatcctgacctggagggagatgagctgatcctcgtcacttcagcaggagatccggcgctggcgcgcaacctgggtatcgagcaggccagaagcacctttgtctgcatcctcgatggcgatgacctgatcagccgggattactttcagcgacacttggcctttgctgcggcagctccagttcggtccgttcttcacgccgaggtggttgccagcttcggcagggaaaatggaatcagtctgcagcttgatcagcgcagcatgccattttcgccggacgtgctgctccacgcgaatccttggataagtgccgtgttcgcgcgccgtgaagtcttcagtcagatcccctacgtcgcctgccggccagaaaagaccggatatggctatgaagattggcattggagttgccagaccgtggcggcgggctacgagcatctgatcgtgccacgcacggcctatttctacaggctcaagcacacaggctcggtcaatgcgagcagcgccgccatgcgcgccgtcttgccaccgagtgatctgttcggtcgatgggagcattgttga

SEQ ID NO: 504880 - DNA, 1443 bp, Stenotrophomonas maltophilia
atgcggcgtctgttcgctttggcgcgtcgtgtcgatgttcgccagctgctgcgtaatccacgaatggaactgggccgcatcatggtctggctgggtcgacgcattgaacgcgtgggtcggaataccggcagcgggcacagaccaatgccggactggctgcatgaggaaatggtggcgctggcggcgatcgagccggagctgttgagggagggtgacgagcccaggcgctttggccacgcttcgatcccgctcaccaaccgcccgggcgagatctatcgggaactggtggagtctgtcggcactcagtcagccagccacgttctcatcttgccatggttggtgcggggaggggctgatcggggggcgctgcatcaccttcgggtctgggcagaggcgctgcccgcaggcaaagcattgcttgttcttaccgaggacgttgcctctccttggcttgagcgagtcccagcggcggtcagggtgctcccatttggccggattgtgggcggcatggcattgcccggtcgcgtgcaacttctgacccggctgttgctgcagatgcaaccggcggtgattcacaacatcaattcaagggttgcctggcaggcgttcgcgcagcacgggctggcgctgcgccagaagtcagggctgtttgcttccctgttctgcgatgaccgcgatgaggagggggttccaaccggatttgcccgaagtcacctgcgcgacagctatgcaaacctggtgacggttttttgcgacaatagtgtctatccgaacatctggtccagggaccttggtgttcctcgacagctgttcagcgtgctgcgcttcccttatgaccagaaggttgtccggaaggaggggccgtatctgatcgaaggtcctgctcgagtactctgggcagggcgttttgatcgccagaagcggcttgacattctcctccaggtcgcaaagtcaatgccatcagtaggattcgacgtgcatggggtatccgaactgggccgtccggatcctgcagtcaaggagatcagaggattgcccaacgtagtcctgaacggttcattcgaacggttcgacgacatcgtgcgtcccacgcatgcggcgctgcttttcaccacatcatgggaaggattgccgacactgctgcttgatgctgcggccgcgggtctgccgatcgtggcgccagcagtcggggggatcggcgatctcctcgatgctgcttggttagttgatgatcccgatgacgttgctggattcgtggcgaggttgaaggacctgggacatgatcaggcgctgcgtgaacagcgtcggatcgagcagtacgcctcgctatcagatggtcgggactggagcaccttcgtcaagacactgcaagacataccgttctacctgccggaactgccggcagcgcctgacatatctatcgagcaaggaagaattcagtga

SEQ ID NO: 504881 - DNA, 708 bp, Stenotrophomonas maltophilia
gtgattattggacgaggcctggttgccaaggccttcgccggcaagtggccgcaggacggggcgactgtgatcgttgctgcaggggtgtccaactccgacgagcgggagcaggctgcatttgatcgtgagaagcgtctgctggatgaggtgttcacttatccgcaagcgcgccgggttgtctatttcggaagctgcgcagttggcaatccggacgagccgaggactccctacctgcggcacaagacttggatggagtctcgggtgctggccgatgagcgtggcagggtgttccggcttccacaggtggttggcgaaggaggcaatccacatacgctcaccaattttctcagccaacgcattcagtctggtgagcacttcgaggtgtgggtacgctctgagcgcaatctgatcgatgtcgaagatgtggtgaccctggtgacccatgtgctctgtcaccccgagcagttcccgcggatgatgccgctcgcagatgcccagtcgacccgtatgcctgacattgttcattgcatggaacgtgcgctcgcgaagcgcgggaactacagcattcttgagcgcggtgccgcgtttccgattgataccacggactgccttagggccgccagggcttgcggtattcactttggcccaggatacctggagcagctcgtggagaagtactatggcgtcgccaagagggttcgaatctag

SEQ ID NO: 504882 - DNA, 756 bp, Stenotrophomonas maltophilia
atgaccaggccagcgctgagcgccatcgtcactttccatggagaaggaatccttgcgcacacctcgctgcgctcgtacgcgctgtcccgcaaagtggcgcgggagcatggggtcgaggttgaactggtcctggtgctggacaacgcggaccaccagacccgcatgttcgtgaccgagcaccccgatctggatgggactgaaattcttgtcgagacccggctcggggatgcggcacttgcacgcaatgcgggtgtggcagcgtgccgggcagactatgtgtgcactctggacggtgatgatcttgtctccaccggctacttcctggtgcacatgaaggaggccgctcgccagcaagggcgcttcgttctgcatcctgagatggtcctgagcttcggcatgtacagtgcgttcaactggcaggtggatcaggagggaggttactacgatgagaacgcattgctcactgtgaacccctggatcagtgcagcgttctccacccgcgagctgttcgagagcattccctacgtggcctgctacccgaagcgaactggcttcgggtacgaagactggtactggaatgcggagacgattgcccgcggagtggtccaccggctcgcctggggatcggcttacttctaccggcgcaaatggcatggttctctcaacgaagccagccacgcattgaaaaccgtcattccctgcacctcgctgtttgcccttgggcgcaagcgcggcaaaggacaaggccatgtttga

SEQ ID NO: 504883 - DNA, 1470 bp, Stenotrophomonas maltophilia
atgtttgatcaactcactcataatcgctgggtccgcaatcggtacacgcgccgggtggcacactgggtccgccgtgtgcttgccatgctgtccgcaaagtcgacagattcgaatgcgtcaacgtatggcatcgcatcggcacctacgatgccggtctggctgcaggatgagatgcgtgcacttgcttcgatagaaccagagttgctgccgccaggatccggcgtggagcgctacgccttctattcggttccgatggatacccggcagggggaggtgtatgccgcactatccgatgccattggtggagagccgtatacgcatgcattgcttgtgccatggctgaagccaggtggggcggatcggggaatcctttatcacgcaagcgccatcgcgcagagcgatccgttggcacggattcttgttcttacgactgagcccgcttcgtcgccatgggcctccaggctgccggcgcaggcccaatgcgtcgatttcgggaacattgcggcttccctggatttcaaccagcaagtcaatgtaatggtgcgtgtactgctgcagttgcgcgcgccgacggttcatcttgtgaactcccgtgttggttgggatgcaatcctgcgccacgggctggcgctgacccagcactcgcgattgtttgcttcgctgttctgcgatgactacgaccagcggatgaatccggtcggttacgcgcgtgactatctgcgctactgctacccgcacctttccacggtaatctgcgacaactcgcgttatccgcagatatggtcgcgtgagctgggcattcctcgtggttccttcaccttcatcccgttcccatatgacggtcgggtggccgaatcgtgcggacaggcgatctctgcggacggtgccaggcgcgtgttgtgggccggccgtctcgaccggcagaagcgcccggacatcctggcagcgatcgctacgcggatgcctgacgtgcacttcgatgtgtacggtgcacaagtgatgtctggcgcagcggtgcaggatctctcccagctacggtctctgcacaacgttactctccacggcgaattccagaggcttgaggacgtggcaacccctgatcactttgcctatctgcacacgacggcgtgggaagggacgccgaccatcctgttcgatgtagccgcggcgagactgccgatcctcgcaccgcaggtgggggggatcgtggacttcctcgcagaggaggatatggtcgagcgttatgacgacgtggatgcattcgtttcgcagctaagactactgcagtcctctgctcaacttcgcagcgagcgcgtccagcgacagcttgaatcgcttcgccggaatcgccgctgggaggacttcaccgcatcgctcgaagccctcgatggttacctgactgcccggaagagaaatgcgtcggcaggaacggaaagagagatcaacgcggtgcacgtggcgcgtggttga

SEQ ID NO: 504884 - DNA, 1716 bp, Stenotrophomonas maltophilia
atgtcgtcccactcggaactcccgccgaactggacgcattcctttccctgcagcagtagaagagccatgtcgatctcacagccgtcagcacgccagctcggtgcagctgcagtttctttcgccctctacctggccgtagcgtggtcagcggactggtttggaatgaatgggcgcggcacggaagtgctttttcttcgcctagctggcgctggaacggcgtccattgcgctgctgctgtctttccgacttttcctactcgccgataccgcgtcgcgactggtcttcctggcctgggccatgtggctcggtgccgcactggcactggtctggccaggaatcttgatgtcggatacctattcggcttacttgtatggactcaacttccccatcgatagctggcttgggttcatgaccccggtcggctatcaatttgtcctgcaagtgattccgaaatactgggcgatcagcttggttcaagttctcatggccgcgatgttgctagcctatgccgactggactgtccggcgcttgggtggcggacttatcgccaggatcgtcctgcatcttccattggctgcatcggttgcattcgtatccacgagcctgctgctgagtcgagacgtgcctttcgcgatgatccaggtcgcactggcattggtgctgctcaactacctgcttgatcggcactggacatctacgcgctacatagtcgcgctgagcctgctgtccgccctgggcctagtggtccggaccgatggattgctcccggcattcattgccatggccatcgttctgatcaaggtactccacagtccgcgctccacagcgctgctgttttctgcattcgctgctccattgctggtctgcagtcttctgctgccatcggttctgggtgaatggcagaaccgctggggatatcaactgacattggctcttaacccgctcggccagctagtacagggcccctattacgaaagcacgcctggcgccgctcgtactgccgttgaccccatcattccatatgaccgtgtcgtcgaacgatcaattccacaggagatcccgctgtactgggaccaggcgatgaatcccaatgcgacagaagaacagaagcagggcttcctggctgcggtgactactttgattgtcgaaaacccggcgaagttcgtctctgcaaagctgatgacagcagggtatgcctctggcctcggcccaaggacgctcacatttgtcgagggtgacatcgcagggaactggtcaaccttgaacgcctccaatccctactattccgacggccgaccgatgtcgcatgtgcgcagtctgttcgggactcttgggccttcccgcgaatctgttatggcggccctaagttcgaccacgcaataccagggtatgcaccttaaggggtcgttcctgtggtggaatttcattccggaactggtactgcttcttttggtggtactggcctaccgatgggcacccgcaagcagcctggcggctgtgctgattctttccaggattccagcaatggtacttttcgctccaggatcgcatttcaagtactacttcacggtcgaaatagccggttcagtactcctgattacagcttttctggaagctcgcctgcatctgcagggaaccagctggtcaactcgactgctaaccggagctcagagagttcgcagcaactggtcggccgggacggcccgaaacacttga

SEQ ID NO: 504885 - DNA, 723 bp, Stenotrophomonas maltophilia
atgacgactctgctgataaccatggctgggctgggttcgcgcttcgctgcggccggatacaccgtgccgaagtacatgatagaagcaaaaggctccacccttttcgcttggtcaatgattagcttgaaaggctacatgcccgctcgttgcgtcttcgtcgttcggcgggaagaccatgcacgcgacttcatcatcaaccaatgcaaagcattgggcatcgatgatgttgagatcgtcgagatcgacggcttgaccaatggacaagcaacaacggccctgcttgccattgatcactgccaggctaatgcaccgattgcgatcttcaatatagacacacacatctcgcccggcagcatgcagcccccaggcgggaatgtcgacggtcatattccctgcttcttggctcccggcacacactggagcttcgttcgcctgggcgaggacggactcgcgttggaggttcgcgagaaacatcgcatttcggagctggcgacagttggactctattggttccgctctccggaactgtatcgccgcacctacgagcaacacttcggcgcaagcggttcggggcttgagcgcggagaagcttacatcgcccccatgtacaacacgatgatcaagcagaacgctcgggtcagcgtttcggtcctggaattctgcgatgtcgtcccactcggaactcccgccgaactggacgcattcctttccctgcagcagtag

SEQ ID NO: 504886 - DNA, 414 bp, Stenotrophomonas maltophilia
atgacatcgagcaaaactatcagcaacgattcaacactggtcattgatgtcgatggcacgctctgtccgatcaagaaggacggcgagagctactcggatctcgtgccttatccggagataatttcccgaatgcgcgaatatcgtgagctgggcttccggatcgcgctcagcacttcccgcaacatgcggacgttcgatggcaacctcgggcgcatcaatgcagtcactgcgccacagatggtggagtggttgcagcgctgggatatcccttacgacgagctctactttgccaaaccgtggccaggaaaggacgggttctacgtcgacgaccgcacggtcaggcccgatgagttccgcgacttgtcctttgatcagatccggaacttgctgaatggcgacagggacacggattaa

SEQ ID NO: 504887 - DNA, 1461 bp, Stenotrophomonas maltophilia
atgacgttgcaccttgtcattgacgatcgccagacggcatcaccccccgtcagtgacctgatcgggcatcggcggttcggcgaggtcaactaccgccggagtgccctgcttggctggatgaaggctcgagcaatggaggtgggctgcagcgatatccacgttgtccgttccgatggcgacctcacacaggcaatagaacaagcgaatctgaacgagtgcaggacactcatggttccagcgtgcgtttggatccgtgatatcggcagcggttccgcgctgataaagcgcctggtacttgctgccatcgacgcgcacattcgtgttggaaaccaagcagtgctgtatagcgcttcggggatatccctgggaaggctgataaaaggtctggaccagccgccgcttcctggcttggtggtcatggatggctcggatgcgttcgtcgacctgaatgactaccggaactgcttgtcgcttctgtcaggggcattcgaggcccgccatttcaatgacatccgcgccgatgagctcaccatcagcaagcgctcttccaacgcccgcaaaattactgccgagcatgattactggtacctgcttcctcaagcgatgcggcgatggtttgtcatgccctatgacctgcgcgtggaagccagcggcgcagaatatcggatggaaagactgcaggttgctgacgtagccctgcaatgggttcatggcgccatatccggccccgaactacagcaagtgctttccctgctgcgcgcgttccttcaagaacgtccaagccgtcaggtagatgtcgaggtctgcagcgccacacagcgtgagctctatctgaacaagctcatgcgccggatggaggaattgcgcgcactgccggagggccgcgagctggagaactggcttgccatcggcacgccatacacgtcgttcgatgaactgacagcccgctacaccgacctgtacaacaaggtcacccaaagcgtcccagtagccacgtctcgagagtgcatcgggcacggagacctatgcttctcaaacatgctgtatgagcgtcacggcaggcttcttaaactaattgaccccaagggcgccatcacagaagccgaactgtggaccgaccccagttacgacgtcgccaaactctcgcattcgatcctcggcgactatgacttcatcaaccaggatctatatcgacttgaagttgaccaagatgggcggctgagcttgatcgtcaatgcacacgcgggcattgatgacgcaaagaatagattccttgagtggctcaccgataacggttacgaccccctgcttgtccgcctccacgaattgtctttgttcctgtcaatgctgccattgcacattgacagaaagcacaaagttctcgcattcctgatcaacgcaacggatatccttcatgacatcgagcaaaactatcagcaacgattcaacactggtcattga

SEQ ID NO: 504888 - DNA, 915 bp, Stenotrophomonas maltophilia
gtgaggatatttccccgcctcctcgaccttgtgctacctgcggctgcgcttgggctggccatcttctggctgacgacccgcacccaccttggccctggaatctgggtagcggtgatcgcatacgccatctctcatttattgcgcgtgtcgcggctggtgatgtttttcatcttcgagaagccttcgctggcaaatgtgtcggcgacccatgcatggagcacctggctcagtgcggtggctccattcaagctcggtgagctcaccagggcatgggccatcatgcggctcgcccgcaagcctgcggctggcttggcagcctatgccagcgaaaaggtgctcgatgcctcggtcctgttgttggccattctggctctgacttcgagcggatacagcgatgcagcaatcggcctgctcgctgcggtgcttctaaccgtgcttctgtttgcacttgccgcctatctcaccagtcgcgcaacttccacagaacttcgtcagctcatcctggttggctccagcagcgtgcgtggactgcatgcattgaccttgcttaatacattcgaggcagccttcagcgcattccggcagatgatgggcggccgcgtccttcttctgctcctggtgaccattggaatctggatccttgatttcactgcgttctaccttatcgccatgaacgtcgaccctgcacctggtcagctcgcgggcttcatcgatatgttcgaatccgtcctgctgcagtcggcattctcaccttggcacgcaggctactggaacgtagtcaccctgactctcgccacggcaaccattccatcgagcatctattgcctttacagctcgctggcacggcgccgctccaggcagaccagctaccgcattgagcataggcagaagcgctattccggagaacaagcatga

SEQ ID NO: 504889 - DNA, 798 bp, Stenotrophomonas maltophilia
atgagcagacaccttgtcttcatccccgcctataactgtgcgcgacagattgcccgtgtgctcaggcagttcgaatcgctcccgactggctttgttgatcgtgtcctcgtgatcgacaaccggagcaccgacgagacgcttcaggtcgcatgcgacgcagcccgtcagttcacgagctgcgagattcaggtctgccgcaacgtggaaaactatggattgggtggatcgcagaaggtgggcttcgcgcatgccttggagaacgggttcgaacgcgtaacgattctgcatggcgacgatcaggggtcgattgccgatcttgtcccggtgttgtccggggacagcgtaaatctggatgcgctgctgggcgcacgattcatgcccggtagcaccctgcctggttactccgcttttagaaccttcggcaacgaagtgttcaacctgctgttctcgctcgtggctcgcaagcggctgcatgacctggggtcaggcctgaacagctaccgtactgcaatcttcaggggtggcttccatctgcgcttcccggatgacctaactttcaactactgcatggtgctggctcacagccacctgcgccacagcatgacgttcttcccgatcacttggcgggaggacgaccagatttcgaatgtcagacttttccgccaggcatcaaaggtgctggcactgctgggcgccttcgccttgcggccacgcgcctttctatccagggatcaccgacagcgcgtaactgcggattacaggaccgaggtgatctaccaatcgaggacgggggcgtga

SEQ ID NO: 504890 - DNA, 465 bp, Stenotrophomonas maltophilia
atgacaagtacgccgttggccggcgtccgtgctggcttccggaatttactgaagcagtacgcaggcttcttcatcgtttcaggcaccgggcttgtaatcgccgtgggcctgctgtggctgctggtacacctggtacacctgccggtgggatgggccaacgccatcgcagatacctccgcggcaaccttcgtgtttctggtttcccgccagaggatttttgacggcgctggcgggcacgatgggctcaagtatctggcatggctggcctggcaggcggttcacataatgctgatttcgctcgccttggcttggctgacgagcacgttcggtcctcgcttgtacgacattacgtcaggcagcccggagacgcttctcaagattgccatcacaccattcacaatgaccctcaacttcgttgttgctcgacttcttctccattccggcaatgccaaggaaaatccctga

SEQ ID NO: 504891 - DNA, 558 bp, Stenotrophomonas maltophilia
gtgaaagtcatcgagacgagtctggctggatgcaaagtgatcgagccgaacgtgttcggcgatgcccgcggatttttctttgaaacatggaatgccgaccggttcgctgaggcggggctggagggcggcttcgtacaaagcaatgtttcgtcgtcgagcaagggcgtgctgcgtggcctccattaccagtggccgcgcccgcagggcaagctgatctcggtgctgcagggtgaagtctatgacgtcgcggtggacatccgccgcggctcgccgaccttcggacgctgggaagcggtgatcctgagcgccgaaaacaagcggcagttctggattccagaagggttcgcgcacggcttcgctgtgctttctgacacggcgctgttcaactatctgtgcaccgatgtctacgtaaaggaggccgatgctggcgtacgctggaacgatgccgatatcgccgtggattggccggtcagtgcaccgacgttgtcggccaaggacgagaacgcgccgttcctgaaggacatcgctgaggaccgcctgccggtctacaccccatga

SEQ ID NO: 504892 - DNA, 963 bp, Stenotrophomonas maltophilia
atgacctcatccgtttccatcgccgtctgcacctacaacggcgagcgcttcctgcaggagcagctggacagcctgctggcgcagacacgccatccggatcagctcgtgatccgtgacgatgcgtcctccgacggtaccctggcattgctgcgttcgttcgtgcctcgtgcagaggccctgggcatcgcggtggacctgcaggtgaatgcccgcaacgtcggctatcggcagaacttcgacggcgcgctccgcgcctgtaccggcgacctcattttcctgtgcgaccaggatgacctctggtacccggacaagctgcaacgtttctgcaccgagttcgatgcccgccctgagctgctggcactgcacagcgatgcgcaactgatcgacggatccggccggatgttgtccaaacggttgttttccgcgttggggtaccggccttcggagcatgtgcggatgcatgcaggccacggtttcgagctgctgctcaagcgtccgctgatgacaggggcggcaatggcgctgcgtcgccaggttctggacgatgcattgcctcttcctgcttcgggctgggtccacgacgcctggatcagcacgctggcggccatgcgaggggagatcgacagcttacccgagccgttgatcggctaccgcctgcacggcaacaaccaggtggggcttggcgaccaggatggcgtctcgcgcgaggtgaggcgggaacgccaattggagatcgaacgactgcagtgcgagcagctgctggcccgcgcacgcgcgctgggcctgcccggatcgcgcctggagtggattgaacggaagcagcggcacttgacggtacgcacagggatgggccctgcacgccttcgccgcattcccgcggtgatggcagaggtgttctccggcaactacggctacttcgggcgtggcctgttgaccgccgccatcgatctggtccggcgctag

SEQ ID NO: 504893 - DNA, 2277 bp, Stenotrophomonas maltophilia
atgtcagctgtcttttccccaacccctgccgacaaagcccgcctggctgcagccgacctgccgccgcgggtgcgcgaactgctgggcgcgttgatcggcctctgccggcagaccctggccgcgcctctgatcctgaccgttgaagcgctggaacaagcgctgctgcacgacgcggatcgcgcgcgcaatcccatgcagcaggcggacctgatggcccagcgcggccagctgcacgccttcgccggccatttccccgatcgcatgctcgacgcagtcgccgaatccctggcacgcctgcgtgaccctgcggcggcggcgccggcgctttccacgccaccaccgctgcccggcatgctgggcctgtccctggtcgccgaacacgatgtcgaccgtgatctgctgctgaccgagatggtgcggcgtgaaaccctgcgttcaaccaactcgctgaacctgctgggccagcggttgggcgtactcgccgctgcgccggcattcgagaccgacgccctgccccttgcaccgcaggccttgtgtgcaatggtgcgcaggctggccgaacaggacggcctcagcaccgaagtgcagctggcgttgtaccgcagcttcgaacgccaggtactggagcgcctgggcgatgtacttgatcgtgccaatgccctgctgtcccagcagggcgtcctgcccgggctggtctacaccccttacctggcacgttcggcgagcacgcggcgcatcatcacccagtcggtgggtggtggccgcgcgacgcagcccgccaaacgtaccgcagcgccgctgaccggctggaacgggccggctccctccggctcgtggtcgaacctgctgcaggatgcggtcagcgacagtggtagcgccggctcggccatccccgggctgaccacctccgccggcagcgccttgcacgaactgctgcagcaggcccggcaggccagcgcagcgcccgcgcagagcgtcgccgtgcccagcgccgccgtagatgccgtactcgcgcgattgcaggcccagtccagtgccgccaccggcgttgccgatctgcaggcggccgttgtcgcccagctccgcagcgaacatggcgcacaggcgcagctcggcagccatgaccgtgacaacctcgacctgctgcgcctgctgatgcagcaggtgcagcagcagcaacgcccagacccggtgccggcggccctgctggcacgcctgcaggtgccactggcgcgcgccgccatggctgaccccggcttcttcgtgcgtgacgagcatcccgcccgcgaactgctcaaccaggtcgccgaagccggcgccagctggctgggcgatgatgatgtcgatccacagctgctgcagcgcatggcgcagagcgtgcagggcctgctgggccaggacgtccgtaccccggaagccttcgccaccgccaacgaggacgtgcagcagcaccagcgtgcggcggttcaccgcgccgagctggccgagcgccgccacgtcgaagccgcgcgcggcaaggaacgcctggaactggcccggcgccaggccaatgcacagatcgaccagtgctgtgatgcgcaggcaccgccgcgcttcgtgcagacgctgctgcgccaggcctgggccgatgccctcaccctgacccgcctgcgccacggcgatgattcaccgcaatggcaggagcgcctgcaacagacccagcgcattgcagcggtgaccgcgcaggccgtggatgccctcggtggcaccgatgccgcgctggccgccgatgtggaagccgcgctggtgcaggtgggctaccacgccgaggaagccgctgcggtcgcgcgcaggctggccacgcccggcggcgaggatgacagcacctcgcgtaccgagctcagtgcgcgcctgaaggcgcgcgcgcggctgggagaacaggccgggcccaccaccacggcaccatccagcccgcgcaacgccgccgaggaagccgcttaccagcagctgtccgcgctgccgttcggcagctggttcgacatcgacaatggcgatggcacgctgcgccgccagcgcctgtcctggtacagcctgctgaccggccatgccctgttcgtcaatccgcgcggacagaagatcgccgataccgacctggatacgttggcccggcagatcagcgcgggccgcgcgcagctggtcaccgaagacaaggggcggctggttgatcgcgcgtggcaggccagcctcgacgcactgcgtgcactggccgacggccacgccggggagacatccgcatga

SEQ ID NO: 504894 - DNA, 402 bp, Stenotrophomonas maltophilia
atgctcgatcatcttggtttgaccagcgccgacctggcgcgcagcaagaccttcttcctgcaggcactggcgccactgcagatcggcgtggtgatggaagtgaccgccgaacagaccggcgcccacgaccacatcggcttcggcagcgacggcaagccgttcttctggcttggcaatggcggcactgccagccacggcgtgcacgtggccttcgcctgcgccagccgcgcccaggtggatgccttccatgccgcagcgcttgccgccggtggccgcgacaacggcgccccgggcctgcgcccgtggtaccaccccgactactacggtgccttcgtgctcgaccccgacggcaacaacatcgaggcggtctgccaccgccctgccgatggggcaaccgcatga

SEQ ID NO: 504895 - DNA, 462 bp, Stenotrophomonas maltophilia
atgaaatccgcgacagtcttcagcagatgtgcaaggaaaacaggctttgccggaacaacgaccacccgctaccggttgctggacggcgcttcgcttgtcgtaaatcaccaggccgccagtcacggcaggggcttctatgtgaatgccgggctctacttcgcggagctgcttgagcacacgcttgaaccgtgcgacctcgagaaggccttcagataccgcaccagcattcccacgccccatgtggactggcggatcgaagagacgccagggctgcgccgggccttcacccagcaggatctccatgacctgctcgaggccggcgaccgcagcgcgatgaagcgcctgctgctggatgcctttcgcgatgtcctgcgcttcgtcgcagcccacggaaaccgcgcctcggtgcggcggatgcagcaggaaggacgctttcgcgcgatcatccgcaaggaggtctga

SEQ ID NO: 504896 - DNA, 786 bp, Stenotrophomonas maltophilia
atggatcagccagctgcggtgcgggcgcagaaacaacgcgggatccaaacgctgttccagcaccgccatggtgatccgcagcggatagtcatgtccacgtacccgcaggttcacgtagttccccgccgcctgggcgtactccacgtctgcggtggcgaccaggaactccttgcccagtttgcgcaccaggaagtactgcgggcgctcgaccggttccacgggcgggcctacatcgggctcggccaacaggctcgcctcgccctgcctgcgccgcccgaaccagctggtgaagtgctccagtgccacgaacatcgcgaacgtgcggacatccttcaggtattcgtaggcaaaacgctccagccatcccgcatcgtcctgatagcggtagcccagcgatgcataggccaggtgccgcagcaccatcatccccaccacgtgcagaaacgaccagcccacgctggccagcaggtacagcggcaaccgctgcttccaggtatcggcatgcagcggccagcgctcgcagccccaccacagcagcggcagggtcaacaggatcagggcgaggctgctgaattcccagatcatcggctcccacaggccgagatcgctgccccgccgcgtggcgtccatcacctcaaccagcgcattggtcaccgccgaggccgacaggatcgctgcccagaccagcagacggatggtggtgcgccagcgcggtggtcggccctgggtcattgtggcgtccatgtggttgcagtgctccagcgtgccccaagggaccgagagtag

SEQ ID NO: 504897 - DNA, 639 bp, Stenotrophomonas maltophilia
atgattcccgcctccctcgacagcggtcatcgcatgattgccgacacactggccgcgttccgtgccggccctgcactgggcagcatcgccctgcggccggcgccgcacgcacgtgtaccgctctacatcggcatcgccggcagcaagcgctcgggcaaggacacactcgccaatgggctggcatcggcgttggcgctgccacgcgacagcttcgcggccccattgcgccagttcgtcgcctccctcctcgggctctccctgcatgaactggaccgccgcaaggaggacgccatcgattggctggccgaactcaccccgcgccagctgatgcagaccgccggtaccgaatggggacgtgaccgcgtccatcccgaactgtgggtacgctcgctgttcgcacgcctgcccgagggcgggctggtacccgacgtccgattcgccaatgaggcgcgcgcgatccggcgccgcggtggtgtcgtgatccgcgtcaaccgcccgggccattgcagcaatgaccctcatgccagcgagcagccgctgccgcatgaactggtcgatatcgaagtcgacaacgacggcaccccggccgatctggtccgcagatcgctggaccagctgctgtcgcgcggcctgatctga

SEQ ID NO: 504898 - DNA, 2337 bp, Stenotrophomonas maltophilia
atgcacacaccgcatcccacgcaggacatcgttcccgcgttcctgcaggccatgcacgcgcacggcatcgtgccggacgcgcgcggccgcgacgcgctcaacgccgatggcacgctggtgcgtttccatgtggaaggcgaccgtcgtggcacgcgcaacgggtgggccgtgttgtttggagaccacgtgccggccggcgagttcggcagctggcggaccggcacccgccatgcctggtgcgcgaaatcgccgaccgcgttgagcgccgccgagcagcgcgccatccggcaacgccaggaagcggcccgcagcgagcgcgaacggcatcagcgcgagcgcgaggacgccgccgccaaggccgccaacgtgctgtggaaccgtgccattcccgccgacgtccagcacccctatctggtacgcaagggcatccacgcacatggcctgcgcgtggcgccgtggccggtgcgcaacagcgatggcctggtcttccgccatatcgacaatgccttgctggtgccggtgatgaacagcgcgggccgtatcgtctcgttgcaggcgatctttccccgcgtggatccagcacttggccgcgacaaggacttcctttccggtggccgcaagcagggctgcttccatgtcatcggcaagccgtcccctggccaaccgatcgccattgcagagggctatgccaccgccgcatccatccaccaggccacgggctggtgcgtagtggtggcctgggatgcaggcaaccttggcgcggtcgcccgggcctggcgcggcgccatgccggacgcatcgttcgtgctgtgtgccgacaacgatcaatggacgcggcagccgctggacaacccgggcgtcaccctggccacgcaggctgccgcggacatcgatgcccgcgtggcctggcccgagttcgccgcgctgcatggcgacgatgaccgtcctaccgacttcaacgagctgcacctgcgtgaagggctggacgccgtgcgtacccagctgttgcctcccgcaccgcccgcagcaggcgacgacgtggcgccggacgatgcgccgtcatcggccagcgcgcgttaccaggtgcctggcaacctgtccgcattcgatgccttcaccccgtttcccgacaccagcgcgcgcgggcggccgttgccaacggcccgcaacctggccgagctgtgccgtcgtaccggtgtgaccgtgcgctacaacgtcatccgcaaggacctggaaatcctggtcccggggctgcacacgaccgtggacaacgccaaggaagtcgcggcgggcgaagtgatggattgcatgcaccgcgccggcatggccaccgccagcttcgagaccaacctgtgccaggtggccgaagccaatccctacaacccggtcgcaagctggatcacctcacggccgtgggatggccagtcccgcctgcaggcgttcttcgacaccgtgcaggaagcccagcccacgcgcatggccgacggccgcgtgctgaaggaggtcctgatgaggcgctggctgatctccggcgtggcggccgcctttgagcccgatggcgtggtcgcgcgcggcgtactgacgttcgtctcgaagcagaacctgggcaagacgcgctgggcacggcagctggcgccggccgagctgcagctgatcgccgatggcgtggtgctcgatccggccaacaaggacagcgtcaagcaggtcatctccaagtggatcgtcgaactgggcgaggtcgatgccaccttccgccgtaccgatatcgcggcgctgaaatcattcatctcgcgcagccatgacgagatccgccgcccctacgcgcgcaccgaatcccgctacgcacggcgcaccatcctgtttgccagtgtcaacgacgaacgcttcctgcgcgatgccaccggcaacacccgctggtggaccgtgcacgccgtggcgctgggcgaaccggcacggatcgacatgcagcaggtctgggcagaggcccatgcgctgtactgcagcggcgagacctggcacctgactgccgaggaactggatgcgctgaatgccaccaacagcgaacacgaacccatctcgccgatcgccgaactgatcgatcgccatttcgactggtcgctccctgccgaacactggagcgcgcattaccgcgccaccgagatcgtcatcgcggtgggcatcgacaagcccaaccgtcgcgaggtgaacgaggccgccgcctacgtggtcaaacgccatggcgtacgcacccgcgtggtgggcaaggagcgggccaaggtctggctgatgccagagcgcagacgcactctcgccgagcatgcggcaggcccgttctag

SEQ ID NO: 504899 - DNA, 1140 bp, Stenotrophomonas maltophilia
atgcgccggccggcgctgcttgcactcgttctgctcagcctgctgtcggcctgcggcaaggatgcgcccaagccggccggcaggcttcatgaggtggaagtgctgaccctgcaggagaagccgttggcgatggaacaggagctgcctgggcggaccatcgcatcgcgggagtctgacgtgcggccgcaggtggatggcgtgctggtgaaacgcctgttcgaagagggcgaatccgtgcgtgccgggcagcccttgttccagatcgagccggccctgtaccaggcggcagtgaaccaggcgcaagccaacctgaagaccgccgaagcagcggcagtgaccgcacgcctgcgcgcgcagcggatgcaggcgctgggcggcgagcagctggccgcgcgccaggacgtggatgacgccatcgccagcgggcagcaggccgcagccgcggtacaggcggcacaggcgagcctggataccgcgcgcacgcggcttggtttcgccacggtgaccgcgccgatcgccggtcgcatcggccgcgcgctgttcacaccgggtgcgctggtcacctcgggccaggccaacccactggcgcggatccagcaggtcgacccgatgaacgttgacatcacccagtccagcaacgagtacctggccctgcgccgcgcgatcgccgatggaggcgtgcaggccaccaccgctgcggtgcggctgcggctgtccgatggcagtgaatatccgttgcccggcaccctggaatttgccgatatcgatgtgcagcaggaaaccggcagcatcaccctgcgtgcacgttttcccaatcccgccgggcagctgctgccgggaatgtatgtgcgggcgcaggtggggcagggcacgcagcagcaggccttgctggtgccgcagtctgcggtggaccgcagcccgaagggcgaggcgcaggtgtgggtggtggatgaggggggcaaggcgaagctgcgcctgttccgtaccgcgcgggcgattggcgaccagtggctggtacttgatggcatcgctgcaggtgaacgggtggtcgtggccggcgcacaggggctctccgatggcatggcggtgcaggtgaagcccgcggcggcaatcgctccggcagccgccgggaagggctga

SEQ ID NO: 504900 - DNA, 798 bp, Stenotrophomonas maltophilia
atggtccgttcgatgtcgcgctggctgccgctgctggcctttctgatgatgacgggctgtgcctcgctgccggacagcgcgcgcggtcgcttcgaggcccgcgcagtgaaggtggatggcgaaacggcttactaccaggtgttcattccggcggcatcggcgcgcacgccgggctcgctgccggtcgtgctgttcctgcatggctccggcgagcgcggcggcgatggcgtcaagcagacccacgctggattgggaccgtacctgcgcgcgcatgcggccgatttcccggcgctggccgtatttccgcaggtgccggggcgcgaggaatggagcggacgcaacaaccgcgtggcgctggctgcgctggacgccgccatcgccgagttcggtgccgacccagcgcgccagtacctgaccggcatgtcgatgggaggctatggcagctgggacatcgcgctggacgacccacgccgcttcgcggcgatcgtgccggtgtgcggcgcggtactggccccgcgtgcggtgcgcccgaccctgttcgtcgagcaggtcgcgcaggagcccgacccgtacgcgaccatcgcccagcgcctgcggcacaccccgatctggatcttccacggcgcactggatgacgtggtcccaccggacgacgaccgccggcttcacagcgccttcctggccaccaatgcacgcgacatgcgctataccgagtacccggaaggcaaccacaacgcctgggatgccacctatgcggacccggcaatgtgggcgtggctgttcgcgcagaagcgctga

SEQ ID NO: 504901 - DNA, 615 bp, Stenotrophomonas maltophilia
atggctgcgaggtgtctacggaaccctgggcgattcagtcaaagccgttacgaagatcaggagggtcgcgtgaatagattgagcacgcctcgacataggcgcccagtccgcttcaaccggactcgtgcgaaccccctccagcgcctccccttctatcgccagagccatgcaaaggtgggtgattattggcggatgccggaagtccatggtcatctgatgggcagggagctggggagggtctgctgtatcgccttccttcaggcgcttaaggctgctgcagcagacccacgcactagcaagagtgcccacctggccgatattgtctgctcggcagttgaggcctacggggggagtctggacagcgctcagcgaggcgttgtcgatggattctttgggtctggatcaccgctgagggaggttctgatgcgaggccttgaatccaagaggggggctgactacaccatggagcaattggaggatgctctcagcgacttggcatcggtcaccgttgaggagtacgccggtagacgcatggttccagcgcaatgtctgatccctgataggtccgaccatcctgctttcgaattgtcatccctggacgcaaggcctcagtaa

SEQ ID NO: 504902 - DNA, 1677 bp, Stenotrophomonas maltophilia
atggccaccttctatgaatcttttgctcaaggcatgcagaacggtcttgagcgccaaaaggcagttacgcagcgcaacatgctggcagagttgcagcagctggcacccaaggtcatcgcgggagatttgcccgcgaccgatcgggcgttcgcccttgatccgaagaccgcgcaggcctatcagactgaaggaggccgtcagcacgagaagctgattggtttggcgaaatccctgaagcagtacgccaacagccctcagatgcaggcgggtatctatcgcagcgcagttccttacctcaaaaggaacttcggcgcagagatccccgaccagttcgatgccactacggtgatgcccatcgttgagcaggtcctctcggtagcgaacaacaccccaaacatcagcggtcaaacgcctaccgatgttcgctccttcgaaatgatgactacagggctgtcgccggaacagaaggaagaggcacgccagatccggcttggcttgaaaggacgagcctccaacgctggctatggattcttcgaattccaaggagcggacggtcttaagcgcatgggccggaataacccgcgtacgggatcgcgtgaggtgtacgacgagtccactggggaatttgttccgctgggcggcactactgggatggtcactgctccgcaagccccgactggtccgcagcctgtagctactccggcagacggcaatcacttcgcggcattcagccaattggcgactgaattcccgtctgtgaccatgaccagcggtgcgcgctctgccgaacggaatgcccaggttggaggtcagcccaacagccagcatctcaacggcactgcagcagactatgcagtcccggccaaccagaagcctgcattcatctcccgtgcgcgccagcttggctatcaggccatcgatgagggcgatcacatccacctgcagctcccccgtggcgcgtccaacaatattaatcctgcacttgcagttggtcgcagtcccgaagaccaggctgcgcgtactgcgcaggctacaacgaatgtggagaacgccaacttcccgaacaagctcaatcaggagcgtcagctgcaggatgtgaagactcagggggcgatcactcaggcagccggaacagcagcggcggaagcacaggctaaggacgcagcacagcgtccgaagcgtatccagcagtacaggcaggctctgactgccgccgggaacgtggaaacgtcgctggacaaggcgctcggtctagtaagcccatattcgactggcttcgtaggcgctcgctctcgtggcgttgaggggagcccctcctacaacctggctgcagaattggaaaccatcaaggccaacctcggcttcgacaggctgcagcagatgcgcgattcgtcgcccacgggcggtgcgctcggcgccatcgcggtacaggagctggttgcgctgcaatcaacgattgccaacctcgatcccaatcagtctgaggctcagatcagagacaacattgagcgtgtaaagacacactacaagaagtggaggtccgcggtggaacagtccttggcggacgaggagcgggctcagagcgcagcgcccgctgtaggggctggccagcactacggaggcgcagctccttcatcaacgccatcttcttccaactacagcaatctctggaactga

SEQ ID NO: 504903 - DNA, 345 bp, Stenotrophomonas maltophilia
atggacaccagatgcctgcggagactcactactcccgctctgacggctgcctccctagctctgctattcgccctcacaggctgcgagcgagactcctgcaaggaatactcccgattcacctgcaagcaacttgaaaccaagcccttcaacgtctactactacgaaggcacaaagacctcttctgagccgaatgaggtcttccttggcacggctattggccttcagcagtgcgggaccgtcgcttggaatgccgcacagacaagaaggaaggacagcgcagaggattggtcttatgtctgctgccttcagactgaagaatcgtcatgcgcagagaagcatcgatga

SEQ ID NO: 504904 - DNA, 408 bp, Stenotrophomonas maltophilia
atgaagcggttcaaggagcttcttgtaagtgtcgaaaagcagcaggtggacttgctctatgaaacctcagcggatgtgctgtttctaagtccctcaaaggcaagtcgcctgcttcgtgatagcgattcactggaagtcatacatgaaacggtcattgcctcgggcttcttccagacgtttagtgaaacggaagagcggtttgagttttttgatgagcttcgagaggtgtcatacagagggtacgtgggccccgatgtgttacggcaacagtccggcgtggtcgttgggcaggaggcctcttacggcgtgatgatcgaatcgctcacaacccgctcggcgttcaaccggaacgacacgaagtacatgctgtcctcgattgttggtcgcttagatgacgcaaaaccttaa

SEQ ID NO: 504905 - DNA, 207 bp, Stenotrophomonas maltophilia
atgaacgacgtcgagggctacaggtacgcatccagcaccaatttgaagggctgcgagcgatatggatacgggtcaagtatcggagtgaaaggcttcaagcgatacgggtacatgctcgacgcagaagtgatcgttccatggaggctgcgttcctgcgagcagcgaatccagctcaagatgttcagtgagagtcgcgcgcgaatctag

SEQ ID NO: 504906 - DNA, 162 bp, Stenotrophomonas maltophilia
atgaatgacttcaaacgtgatgcatccaataccaacaagccggctgtggcggagccggatgcagggaagcagaagcaacagcaacaggagcaggaacgccaggacaaggagtccaaagagcgcaacgccaatgaaggcggggctcataagtcgaataagtaa

SEQ ID NO: 504907 - DNA, 291 bp, Stenotrophomonas maltophilia
atgaccacccaattcacggaaatccttgatcgcctccaagcctgcgaggccggtctcgagatgcatcgcggctacctcaaggcgatggagtatgcggtgcggctttccgtactgacccatcctgctcaggatcaactttccgaggcatggcttcaactactacccggcatcgtctcgaagcacaaagaggacgcgagcgatcttttcgctgcggccttccaacaggcattgaccgtactcaccgaacaaatcggggataagcatcagggagatcaggcagccagggcgtaa

SEQ ID NO: 504908 - DNA, 615 bp, Stenotrophomonas maltophilia
atgagcatcctcaacgttctgctgcggccagaccagttccttgttgcggttgacaccctcgcggaggacgcgagaaccggggtccattcctccggagcaaagctgctactgattcctcagcacaaccttgtgctggctactcgtggctccactcagttcttccttaggatctacgagctggcgctgcaggcgagcttccgcgccgacttcactatggaacggctgtccgctgagttgggtctggtagtggaccagctgtggccaaactacataagagcggcagccgaggcgcgcttgccaatcgagaagcttggtgctgaatttgtgctgggcggctggtcgccccagagcggtcgaatggtggccaccgcttacgcaaagagcgatagctccagagccaccgtagtgcacccgttggacggtggcttagcttctcctggcgatccgctggcgggcaggccggatagcttcgctccagccgacgtcctcgcggccggcaggatccaagcgacctggctcaacaaacaggtagggaggcaggtggcgggtgggcgccttctggccgccgtgctccgtgaagggcaggcggtgattcaggacctagggccgatttag

SEQ ID NO: 504909 - DNA, 474 bp, Stenotrophomonas maltophilia
atggtcggtggggcggagatgtatccgaccaagacgatcgtcgagaacgccatcaactccaaggaccacaccacattggtcgcagcggtcaaggcagcaggcctggtcgacaccctcaatggggccggtcccttcaccgttttcgcccccaccaacgcagccttcgacaagctgccggcgggtactgtggataccctagtaaagcctgagaacaaggctcagctgaccaagatcctgacctaccatgtagttcctggcaactacagctccgtccagcttatggcggacgccaagaagcatggcggaaaggccactctcaagacggttcagggcgagccgctcaccgtagcgcttcgtgatgggaagctttgggtggtcgacgccaagggaggcaaggctggaatcagcatcgccgacgttggccagtcgaatggcgtcatccatgtgatcgacaccgtcttgatgccgaagtga

SEQ ID NO: 504910 - DNA, 468 bp, Stenotrophomonas maltophilia
atgctcccctcgcacggctaccaaggcttcagcaccaccccgatcccctctggctgggtccagatgggggacagctgggtgctgtggtggagcggccggcagatcgccagcgtttccccagcgagggagcagggcgttcgagtacacctggacgcccggaagatgtggcagaccaaggatgtgctcgcggccagcatcaggcagggcatgcgctacgctgagcgctggtgcgcggccaggctctaccccgatctgccactgcgccaggcggtcgcccggctgaccgacggcaccccgatccagcctctgccgccactgcccggcctgccgccgacccgcgagcagcagcaacaggcccggcgcctagccgaggccggagctgtggaactggcgcggatcaaggaggcgctggagccgcgcaggccgccggtcgctaagcccatggcgaagggcccgatgaaagcatga

SEQ ID NO: 504911 - DNA, 789 bp, Stenotrophomonas maltophilia
atgagcaagggcggggagggagccgctctcccgataagccaggtgagatgcgcccctttgatctgctgtgcccgcttcacctgtaacctcgggcataccaccggcggcctactcgatccaatggacttgatacgacttcttcgatcgcttgaggaatttctgtacgagcttgtaggttggctcgtgttctatccgcgaacgctttggcgcgtgctggttcgaccaggtgaggttgctcagtacacccgccgggagttcgcgaaggatcaggagcagcgctttgcggatgcgatcagtccggttctcatgctgatcctgtctgtggcgatagcccatgccatcgagatggcaatgcggatggccccgctggtggtctccggccctgtcggcaagctgctctttggcagcgaggaggggctgctgctgaccaggtccgccatcttctgcatttatgcgcttggtgcggcgctgagcacccttcggaggcagtgcctcccggtgaatcgagagaccctgagggaacctttttccatccaggcttttatcgcctgtcccttcgtgatcttgctcgcaatttcgcaggcagtgacctcgacggagacggggcctttgaatccgctggggccgttgatcggtcttgcagccgtagcctggtacttgtgggctcggacgaagactttcgtcgcgctgaatgaaggggggcatctacgggcatttggcttcgtactagcgtcattcctgttgacttcagcgctgatcgtggcgctggtgttgaccatcgtctcttag

SEQ ID NO: 504912 - DNA, 363 bp, Stenotrophomonas maltophilia
atgggcaccccagaaaccgacgtctccctgctgaacgagatcaaggcacttcgacagcaaatagcggtgctatgcgtcgatctgtccggcaaggactggcttacagcagacgaggccgcccactactgcggcgtatcagttagccagttcaatgcccgcgcccacgaatacgatctcgatccgcgaaagttcatgggaaaaaagctctatgcgaagggggctctgtatcaggcaatctatggcgccaaggcttggacgcgctcctccgtagcttccacgcccaccctagtggcaacctcgcctgatatgagggaggcgctggtccggctgcggcgctatgacgagcgcaaggggaagcgctag

SEQ ID NO: 504913 - DNA, 1824 bp, Stenotrophomonas maltophilia
atggaagagcatttcgatgaccctagtctcagctactggatcccgtgggcaggggatgtgaccgacaagtccgggaaagtgtcgtacacctacaagcctggaaatgcgttcgtggcccaaggagatgctgtcttccgcggtgatgtccaagacaccttcccgttctatcagacaggtggcatctactaccctaggtacttcacctatggtcgctactctgcccgtgtgaaaatgactaatacgccaggcgtcattcccgcattctggctggtgtcatatgggcctgcatgcggtgagatagatatctttgaggccactgggctgcagaagtccgacccacgcacgatcaatgtgcaacattactggtttacgaaccctgccgattgctccaccgcagtggcggatgcaacgctttcagcctacaccaagcttggatctgtcgactattccagcaactatcatgtgttctccgcagagtggagccccatccacatcgcatactctgtggatggagtggagttctatcgaacaacactgaatattccgagcgttccaatgctcgtgaatcttaatactaatcttgcacctccgactacaacacctggaggcatcaacaatcggatgacatccaacaccgttctgcctgcagattttcatgtcgattgggtcaaggtggagcagttggcaccacgatcatgtcctgcgcgaggcgatcatgccggaagtctccgccgcgccaatggcagttgcgctgcagtgcgctctgtggactacaacggcgatggtggcggcgacgtcatcctgtacaacccatcctctggcagcgcgtcggtggcaaccggacagctggccccccatgcgggcctggtgacccattcgctgacggatgccccctcggcgccatgggcaacctcggccaaactggtcagtggcgacttcgacgccgatgggttctccgatctgctggtgcacggcggcgacggtagcgtacggctccactatggacgtcctgacgctcgattcaccgaacatcttccatcacgcactgcatggaatgtgggcagtcaattgatggcaggagatttcaacggtgatggacggagcgacgtactcatcctgcaggacagcggcgctctcgagatccgctacggaggcagtgatcgcggattgcgcttcgccccacaatcgcaacggcaggtcgccctgggcagccgcccgcatgttggcgacttcaatggcgacggccttgatgacctgttgctgtatggacccaacggtgaggtcgacctcttctacggacaggccaccgacggactgcgcgcagaacccggtcagcatgatcaatggcgggctggccatacattgaagattgcggatttcaacggcgatggatacagcgatgtgctgatctatgccgccgacggagccactgagatccgctatgggcagatgaacggcggtttgcgctttgcaccgagcaccgccgacctatggtccaccgggcacacgctgttgacgggtgatttcaacggcgacggcagagacgacgttgtgatctatgcagcgaacggacactccgaaatccgctacggccaagccggtgatggtcttcggttctccgcgcagagcgtctccagctggagccctgggcatcacttgttgaccaacgacttcgatggcgacgggcgcaccgacgttctcatccagtcggcgaatgatgatgtggaaatccggtacgggcaggcaacggatggcctgctgttctcaccagcttccgcaacccgctacaaccctggctggcgcttgcacaccgggatccgctga

SEQ ID NO: 504914 - DNA, 150 bp, Stenotrophomonas maltophilia
atgcccgctccattgcaccgttacccacaggatgtggtcacggcgccccgtctgcgcgacgttgattgcgtcgcattccccgaattcccggtccatgccctggccacgcactcctgcgtgcgtcgccgcatggccgctgtcgtctgctga

SEQ ID NO: 504915 - DNA, 1248 bp, Stenotrophomonas maltophilia
gtgaaccgggcactggacgcgctcgggctcgacaccgacgccgacgaacgggcgatcaagcgcgcctacgcgcagaaactgcgcacggcgcgccctgacgaagaccccgtggcattccaggcgctgcacgaggcttaccaggaggccctgctgtgggtgcgcaaccgcacgcaatggcaggaggaagacggtgcagaagcgctgtcggccccacctgcagacaacagcccacccggcccaccggcgctgtacgacagccattcgtcgatggaccacatgccggtgctgcatcgtccatgcacgttcgacaccgacctgccggacgatgtggtggagccgtcattgaacctgccccggtttgcgcgtctgctgatcaacaccgcgaccgatgccgacccggccagcttcgagcactggctggcccatcgtccggagctgtggtcattggccgacaggccgcgtatcggtgacgtggtattgcagcagctgctgcacgagggccggccgctgtgcgagtccaacttcgatctgctcggtcgatacttctgctgggatgagatccgggctgatatcgatccctaccgcgtccgcgcacggcgcaacctgctgcatcgccactggcagctgcagccgcgcaaccacgcggccctcaccgcagccctggaccgaccgcacgaccgggtgtccgctatcgaggcgcatgcccgcgtggaacgcttgacccgaccatggcactggctgcaatcgctgctgtcggccagcgtgcccgggcgtgctgccaccatgcggcacacgatgcagcgtctgggggtgcatggcgtccgtgacacgctggcgccattggacggggatcaggtcgccttctggatggcgatatccgaacccaggcgcttcaatctcatgaagatgcaggtggcaattgtccgctgcctgctgggcgctctcgtcgtgctggccgtcctggcggcgctggccttgctgggtgatgccgctcgacccatcgcgatcagcacgtccagcatgaaacacgtggcaatccatgcctcggtggtcatcgtgtctggcgtcctcatgctgacacccttcgttggagggactccatcgcggacggcgtccgcgccagcgcccgtcgagcgaccgtcgccgcttgatggactcggcatgctcacgcacgggcctcgtccgcgcaggccagcccgttccttcgccgttgtccgccagatggaccccggcacagaggggggttga

SEQ ID NO: 504916 - DNA, 1482 bp, Stenotrophomonas maltophilia
atgagctgggcacttcacgtcctggagctggacgaatccgctgacgagcgcgcgatcaagcgcgcctacgcaaagcgcctgcgggtgactcgccccgaccaggatcccgtcgccttccagcacctgcatgaggcctatcaggcagcattggactgggtccgccaggaagcgctggccggtaccgatgctgcggacgaggacgaggacgaggacgaggacgaaccggcggagcatgcagccgatatcggcccctggccgcacgacgccgacgtggcatgggcgccacccgaaacgcgttcgtactcgcctccgttgccaccccgcggcacgcctgtgctgctgcgcacggcaccggtggtggagctggacggggtggtcgatgtagcaagccacgcccagttgatcctgcgccaggcatacctgttgccggtcgacgacttcggcccctggctggaagccacgccggtgctgtggtcgctgcgctacaagccattggtgggcgacgcgctgctggatgaactggcacgcagtcacaacggcatcagcgcagccaacatgggtctgctggcacgctgctttggctgggatgatgtacacgatggcgtggatccggacaggctggcatcgatccagtcgcgcggtcatcgacgctgggccgccgagaccgggaatgcggcggagctgtcggcactgcttgaacaagagggcagcctgcggctggggaagatcacggtcagccgttgcctgcgttacctgtcgcagccatggcacccgcgacgatccctctggcaggcgcagctgcccgagcacatcaatgaagtcaacgcactgctggatgccatcgaggcgggcggaagggaacaggtgcccgaggcatgggatccgcagcagatcctgttctggcgaagtcttgcagacatctcccggcccaaccggtggcgctggcagctgaacgcactgcgtggcgtactgctgggcgtttgcagcctgttgttctttgctggaatcgcaggcgtctcgctggtccagggaaagacgggcgaagccgcgattttcgcccagctgggggtgccttttggcctgctgctggctgcgatcggcgcactgtgggtgcctgtgcgctgggcgctgcgccagctgacgctggatctgcccccttcacgctggggatggctgctggcgctgccagcgcccttgatggcgatcggcagcctggttcttgtccatggccttggccaccgcatcgaaggtaccctgttgatcttcatggcactgcccttggcgactacgcgcctgtggcgacgcgtcggttcgcggatacggttcggaatccgacatgccgtgttcatggtgcttgccatgctgatcgccgaagcaggcatcgttctgatcctgctgcagtggggagccgagttcatacatcgcacgcgccgtcacgcgtcgattgacgggctcccgccggcctctggaaacaccgtgtga

SEQ ID NO: 504917 - DNA, 720 bp, Stenotrophomonas maltophilia
atgtcccgaagtgaccaacacgagcccctgatgcccatcgcatgctcccgcctgaagatgacggtttcctggagaatgaacttgttgagcttgatcttcactctgcttgcaacactggcttcaacagaggatacgaaggctggcagcgggagatgggtgcacgctggcagcaacatcacactgcgatacgacggcgaggagagcggtcgctaccggaacctgtcggtgatgaagcagggcaaactggtgcgccgcatggcactcggcaagcgctcgtactctctgttcgagtacgaccccgatccgacgacgtcccctgacggtcggtatgtgcttgtcactgacttggaatccggggaggttggcttgacggatgggcgcggttctctgcatgaaaggcagtactgcggtttcatcgacacacaaagcggctgcctgttcgcgcgtcagaccgggcaattctgtggagggcagttcaatgacgctggcgcctgggtatcttcggcgcttccagagctgatccttgctgatgggcgccccaccgcggaggactatgtctcaggccgcctgagtccctcggatgcacccgatggttccctcgacaatctgcttcgctgcgacccaccaggcccaggcaacagagaccactacgagaagctgatcgatgcggggatctttaacgtcactccctcgcagagaagggcgctgtacggcgggtag

SEQ ID NO: 504918 - DNA, 684 bp, Stenotrophomonas maltophilia
atggccggaactgccgatgccagcgagcagtccattgatgtcgcggaagtcggcctgaacgccgagcacgaacacatcccgttggtaggcgacaccctggctgccgtcgtcggcgatctcgagggcgatgccacacccggtgccagtattggcagggtgctcgagatacttgcagagagactcgaacgtacgacctgctatctacagccccccgtcaaagacagctcacgttcgtccggcgtgacctgcggcggacccgatgtagacagcgtcttcccgtactacaccgccttgcggcaggcgaagacaccagcagagcacgagagtcggggccgtcgcttcctggacgcctatacggcgttgctcagggatgcgccggatgtcgccctcacgcgaccaaacgaagatgaggcggcagatgggttgttacatgtgctcttcccgttcaaggcctgggacgagaagctgaacgttccacgccatgacgtgtacttcccgtttgttcctgtgtgcaacctcgttgtcgctcgcgctgcgcgctgcccggaagccgaccagttgcgcagaaagatcgagcaggcaggcgatgagagtgaacagcgcttgttgtgcatcaaggagttctcgaggcgacagctggcggaggaaggtgaatgtcccgaagtgaccaacacgagcccctga

SEQ ID NO: 504919 - DNA, 543 bp, Stenotrophomonas maltophilia
atgatgtttgctttgaagcgcgtggcgctggcatttcttgctggcccacctctgctcttgtctgcctacgctgtggatgcgagtgcgatctatggcgtcaaccacacccactgggcgatcaaccggttcagtgtcgatggtcgttcagccgttgacatcattggcccatatcaaggcgggggtggaggctgctgctacggtgcaccagagcgctggtatccggggctgacggtgcgggttgactgggaaacgggtgcaggaagctcgatagattttcctgggacagaagattggtccaaagttctggcttggagagaaaaaatcctggcgcagaagcgcaggcaaagcaaagtcgtccccgtcccggactacaccggccaggacgtctgcggcatcaccgtgcatttcctgccctgcgatgagattcaggtcaccacctcctgttacgcgtacagcagccccgagtacccgatcaaaatcccgcttgagttgccagaacctcagtcatgcccggcagaacctaccgaccagaagaaggcgtag

SEQ ID NO: 504920 - DNA, 672 bp, Stenotrophomonas maltophilia
atgcccacgttccagtcgccccgcgatcctccccgccggttgttgctgctggatccgcacccactgctgcggcatggcgtacaggaacttctggcgaagcaggcgggcctgcgcgtggaagggagctttggctgcagcggtgacctgctgcaacgcctgaggcaacaggaggctgcgatcgatctgctgctggttgatgcattgccgatcggcgacagcggagaaggccttgaactgctgcgccacgtatcgctgcactggccggcaatgccgattctggtgctgtcggcgcactgtaacgctggtgtcgtggccagggcactgcaggcgggggcgcgcgggttcctgtccaagacctgcgccccacagatgctgctgcgggcattgagcgtggtgggccgtggtggacgcttcgtgccgccggaactgcgagcgcaattgaaccagtcacgccggcagcgccagcagtccatgcgtccactgcgattgagcatgcgcgaacgaatggtcctgcaatgggtgttgcgtgggggcagtaccggcgagatggcacgccgctgcggtcgttcgcccagcaccatcagcacgcagaagcgcgcggcctatcgcaagctgggcatccgcaacgatagcgagctgttccgcttccgccatctgatcgaagcggattga

SEQ ID NO: 504921 - DNA, 450 bp, Stenotrophomonas maltophilia
atgccgaagatccgccctgcccacgccgatgacctgcccgcgatcagcgcggtgtgcctggccgcattcaacgcggcggtcgcgccctcgctcagtgcaaccggcgttgtcaccttcggcagtgtcgctgcggcagatgccttcggcgcacgcctgctgggcgacaaccacatcctggtggccgaacacgaaaaccgtatcgtcggtgtgatcgaactgaaggaaggccggcatcttgcgatgctgttcgtcgatcccacctgccagggccagggcatcggccatgccttgttcgaggcggtgctgccgctggtgcgcgagccggtcctgaccgtgcgcgcctcgctcaatgcagtgccaacctaccggcgctacggcttcgtgccggacggcgatgtcggcgagttcaatgggctggtgtatcagcagatggtgcgggcagcggcctga

SEQ ID NO: 504922 - DNA, 426 bp, Stenotrophomonas maltophilia
atgagaagcactcttgcactggcagtctgcacgatgctcagcgcctgcagcctggtgatggacagttcgttcgacacccagcagcaggccatcgacgccgacatggtgaacaagggatggattcccgattgggtgccccacgaagcgaccgacctgcgcgaagtgcacgacctcgactcaaacaccagcgcgctggccttcgccaagccccctgcgataccactgcagcttcctgcggattgccaggcgaccacattcaacaacagtaatcctgttgcattcaatcgacactggtggcctggcaacgcgacgctcagtgcgtcgtaccgcgtctttcgctgcgcgcccgaatccagaaagtcagtcttcgtcgccatcaacaggaccgaaggccgcgtgctcttctggcgaacctacgcgcggtga

SEQ ID NO: 504923 - DNA, 126 bp, Stenotrophomonas maltophilia
atgtgggttggcaggaccgttggcgccatggatggcgccatcgagcccccaaggatgggtttacggcgtgtcctgccaacccacatggccccgcccaaccagcagaaagccagctccggcttttga

SEQ ID NO: 504924 - DNA, 822 bp, Stenotrophomonas maltophilia
atgcattcgattttccgctggaccagcgcgctgctgctggcgctcggcatggccctcaatgtgcatgccgacgacaccgccgcgcagatccgccaacacgccggtgagcaccgcctgttgatactgggcgaattccacggtacccgcgagacaccgctgctggttcgggaactgatggaggcctacgcagccgatggcactccggtgcggttggcattggagctgccgactgacgagaacgccgcgctggcgacgtatctggtgtcttccggcacggccaaggcgcgcgctgcattgcgtggcacgccgtactggagcgtccgcagccgcatgcatgacggccgtcgcagcaaggacatgctcgacctgatcgaagcggcgcgcgcgctgcgtacccgggggcgcgacgtgcaggtattcggttttgatcgcgtgctacccgccgaaacggcgggtagtggggcacgcgaccgggcgatggcccaagaggtccgcgtgcgcgcacaggcattgccgaacaacgcacggctgctggtgctgaccggcaacgtacatggcatgcgtacgcagccgaagatgattgcgtaccccccgatgacggcattgctgaacgatctggagctctacaacgtgcgtatcgaggcgcgtggcggggagggttggggctgtgccgcccctggacgttgcgaagcgcgccagctgccgggtcatgccgggacatcgcccagggtggataccggtgctgaccgcagctacgacctgagggtatggctgccgcgattcagcgtggcgcggctgctggacagcgattcggtctggtga

SEQ ID NO: 504925 - DNA, 144 bp, Stenotrophomonas maltophilia
atggcagtgaccctgttccgcttcaacgactcggcctatgtgaagaagggccaggtgggcttcatggcctggatgcgctctggcggcaacctggttgacgtgggcggcgcggtgaagaccttcaagcacggcgctgcggcttaa

SEQ ID NO: 504926 - DNA, 534 bp, Stenotrophomonas maltophilia
atggcaaagcagaagaacacctccgcgcaggcggccaatgccgtcgaccagcgcctgctacgcgatcgcaagttccgcgtgggccgggagacccgcggcgagctgaagcagccgcgcgaggaatcgcagcaccgcctcatccacaagatcggacacctgatggtcgacatcgtcgaaggcggggagcagctgggcgcgcacgatgcggtgaagcgtctgcagctggacgctgacgtctgctgcgagatcgtggaaatggacgccaccccagtgatcgccgcggtgctggacgcctgcgaggcgcctctgggtgcaggcgcccgcaaggtgccggccggcgcgctgccggaaatccgcaccatcccggtcaagcgcgcagagagcctgtcattcggcgagatggaacaggcccggttccaggagctgttcgacggtctgaccgagtacatcggccgccgctacacccatgtgatgctcgacgacgtgcgcgccgagttctggaaaatggccgggcagaacaggagagtggcgtga

SEQ ID NO: 504927 - DNA, 684 bp, Stenotrophomonas maltophilia
atgggctcgaggaatcggatcaactggatcacggtgctgctgtacgtcgcgctgatcacggcgggcttcggtgcagctcttgggctgctgtccctgaccggacagatatcgcttggcaaagacgcgcccgcgtgggttcaggccattggtagcatcgtggccatccttatcgctgttgcagttccttcggctcagcactatctgactgagagaaaacaagagcgcgagatggccgataaggcgcgcagcctggggctgatgctgctgccacacatccaagagtttgccgaaagaaacaatgctgtgtggaccgacgaggatccggacgaacacgcgcagtctctcggtgaagatgcctgcgtgatcggtccgctcgctgagagtgcactgaacattccaccagctatcaccgcagtgatttcgcgaattcatgaacttggccctgcagccgaaggcctccagcgcgcgatctacaacgtcacacgcgctcgcgagctgatgatcgtcaccggcgccaccgtcgagcaccttcaaagcggccctctgtataaatctcgaatggccacctacagcaagagcaagttctatggcctgctctgggacacgctggcggctctgaccacttcgcagaatcgcatcgaggcgtttttcttccgcccttccgcgcttaatccctctgattga

SEQ ID NO: 504928 - DNA, 429 bp, Stenotrophomonas maltophilia
atgtgcgagcacagcgacaagactatcatccagcggtacctggagaacaacctgcacaccgatctgcccgagaccgagttcaaggccctgaccttcgcgcaggtgaagaaggtcggcagcatcggtgagcgcggcatcagcaccaacatcgtccagtacgacacgctggacaccctggtggcgctgaagggcaagggcatcactaacgccggtgaccctcaggtggaggtggccgaggacctgaccgacccgggccaggttgcccttcgcgctgcgggcgaccccaatgtgccggacgcctatgcgttcaaggtggaacgcgccgacggttccatcgagtatcggctggaggcgcgtgcgagggtgacctgtcgattcaggcgagagagcactggtgctgtagggcgcagccctcatgaggaaatgtga

SEQ ID NO: 504929 - DNA, 966 bp, Stenotrophomonas maltophilia
atgcgtttgaaggctgcaaaggtcattctcggaatatcgcttttcacaagtgccctctccgcacacgcaatcgactcaataacctgtgatgactgcactttgacaaagcgtcagatgcagtcaaaggcaggaggagacggagactactacttctgggatttcaagaatcgacgcctgtaccacatgaacgtatccggtagtggcggcccgctttatcgcgcagctgccgctccaggcggaacaaaagtaaaggaaatcatgctgactgcggacgaacaagcaatgttcaatgcgggcatgcagctctacgacgcgaatggccggtctgagacggttagagtccaagcgcctgtatatgacagccgcgctgcgctcaactcattcggtggcgcgatcgccgcagcgcccacccaggctataccactcgccgatccacctcagacctacccgatgaatgcaatggatgcggtgacgacaccggcttggcgtgaggcggctattgcgaaaacactatcctacgacaatctcgggcctttgcggtttgtgggagagacccttcgtgttctcgtttcaggcttctctcaagccgtcaacatcacaaagctgccgagccccttcagcatcgtaaccactattcccttccctgacggctcttacattctcgtgcaatacacctatcaagatcacgggtacagatacatccgtggatccgggcgagacgcagcaggcaatgtgattcctgacgggcagaaggatattgcgagccccgatcaagcttcccaaacgtacatttatccgacgggcccacttgcggcaggcccgggtggtgagatgataagacacctcgacaacctgggtgtccgttggatcggcgcaaactctccaccggtatatgttggtttccgaatcggctgttcctacactccctcaggtgcacaatgccaagtgaactccctaaccccatag

SEQ ID NO: 504930 - DNA, 423 bp, Stenotrophomonas maltophilia
atgcggaaaggaatgcttggtgctgcggccgcaatggccacgttaatcggctgttccacggtccccgtcacggaggaaaccgccaggccggtgcctcctgatcgtatctacaaggccgaacgcttggcgccgtcgccggaccgtagtgcgcagatctacatcatgcgggacaagggtttccatggatctgcctgcacgcatgccatctctctcaacaatgagaaggtgatggacattcgccagtccgaagccgccactctgtatgtatcaccaggctcctacttcgtgaagctcgacacaggcggcggcgcctgcccgaacatttcaacgtctcagaacctgaccatcaacgcgggcgaaaggcaggtctatcgaatcctgctgccgtccgatgggaaccttcgcctgacccgcgagcaataa

SEQ ID NO: 504931 - DNA, 702 bp, Stenotrophomonas maltophilia
atgaaggcgatgaccgctgttctggttgcggctgtgctttgcgttggttgttcaaccaaggggggggccactgcaccctacaacgtctctttcgttggccatccttcccgggccgccgtagcaccacctccacctccacctccacctccgccgccccccgttgacggtcaggcccaggcgcctgatcccagcggagtcaagcctccgaggaggcttccccgcgacggatggtatgagcctggagaggaggtggatgacgcctcggacgttgaggaggcgttgccagcggtactggcggaatgcaagaagctcatcctcgggatggagaacaaatccgttgatcagcgaaaggcgtccctctgggtgtacggcatcgggctggtcgcgggcacggtcatcgcacctgcacttacggcggcgaacgctgccaagcacgccggtgcaatagcgggactaagtgcattggggggcgcctctggtatggcgggaaaggcgctggaggactctgggttcgggggatccgcggcaattgctgatcgtagagctgtcgctgacgtgattcgtctgaagctcccagtgatcacggatcgcagagaggcgtcgcacgatcgacggaaggcgcttacggaaatgcaggctgcatgctttgcctacgatctgaccaccccgaagcccatccagtcgtcaacaaccggcaaatga

SEQ ID NO: 504932 - DNA, 426 bp, Stenotrophomonas maltophilia
atgtcgatacgagtagcgtgcctgtgcgggaacgtcgccattgagctgggtggagagccggtcgcacgcgccaactgccactgttcatcgtgcagggacttctacggtgtcaccgtgttctccgcgacggcatgggaggcttcgtcggttcagatggcctccttcgatgcgcgaagcttcagccatccccacaagcagctgaagaagaccttctgtgctacgtgcggcgaggttgtgttcggcacgaaccgtctgtgcatgcgtgtcgttcccaacgccatgctcgcccgcgctggcggcggatggctggacgttgccatggcgcccacaatgcatctctactaccggcaacgcgtagttgaggttcgcgatgagttgccgaggtaccttgatggctgggacggccctgcctacctgcagggctga

SEQ ID NO: 504933 - DNA, 6174 bp, Stenotrophomonas maltophilia
atgtggcagtcgacgacgtcgcgcattcgcgcgggcggtggatgcgttcatcccggaaaaaacctgcagtacctgcaccccggccgctggatggcagccggcctgttgctgttgctggcaatgctggcaccctcgctggcctgggctgcggcctatgccaccggcggtagcagcccgtatcgcaacaccgtgctgtggttgacctggggcggcggtgccaatggcgtgaacaacgtcgcgctcaacgacggcgcgacgtcgtccatcgatatgcctgtggcggcgggagtgaacctgcgcgtggactgccgcctgaacaccgccgagaccggtgtgctgcgcagctatcggcctggcaacttcggcggtgacagtcttgacgatctgtacaacatcggcggcactggcaccagcaaccagctgattgccggcatcgcacgtgcgggcggcacctccagtttcagcatcacctgcacgtcgaccctggggggcgcgccctaccgcctgcgcggcgtggtgatggccgatgccgaatcgatcaacaacagcggcgagttcgtcgaagccagcgcgcagggcacctggaacgtggtggaggttcgcaagaacctggccaatgccacgccctatctggtgaacaagtcgaccagcggcgccaaccaggtgatccgcttcggtcccggcaacgacgacaacacggcggccgttaccttcctcagtttcgacaatgccgcacacgcgccgggcaacctggcggtgaacatgggcttctcgatgcgcggcggcggcaccaccgccatcgccatcggcctgctggtgccgtatgccgacttcggtgacgcaccgcagagctacggcgatgccatgcacgtggtggacgatctgcagttccgttccgatggcattccgcagggcgccagcaacttcaacatcaataccgccggttatacgccgggtggcctggcaccaccgttgactgatttcctcggcagcctgggcccggataccgaacagaagagcagctacagcgcggacgcactgggcgatgacaacttcccgcaggtggggagccgtgaagaagatgcctggccaaccagctaccggttgacggtgatgcaggccggtacgctgatcacccagtcagtagcctgcgcgggcaatggcagcgttgccggctggatcgacttcaaccgtaatggcaccttcgatctcaacgaacgcagcacgaccgccgcctgcagcggaggccaggcgaacctgagctggacggtacccagcgcggtcagcgccggcacgagctacgtgcggctgcgctactccaccatcgccgcgcagatccagaacccgaccggcgtggccgatgacggcgaggtggaagaccaccgcatcaccatcaccgctccctcgctgaaggtggtcaagggcagcaacgccaccggtggcatctggaactacgggcaggccggcacccagtacacgctgacggtgagcaataccagtgatgtgcccaccggtaatccaccgaatgtgccggtgggtgcgatcatcgtgcgcgaccagctgccggccgggatcgtgccgaactggacgggtgcccatgtgagcggcagctggagctgtacggccagtggccaggacgtcacctgcaccagcagccaggtgctggctgcagccggcagcgccggctccagctcggcgttcacgttgccggtgacggtcactgcggctgctaccggtgtgctgaccaaccatgccagcgtgggcggcggctacgatcccttcaacaacggcaatccgccggcacccggcagcagctgcaccgacgttgaccactgcacgcgcagcgatgtgaccgtgccggtgacacgggtgggctacgccaagcgttcgaacaccgccggcccggtcgcggtgggtgcgaccgtgaactatacggtggatgtcaccgtggccgacggcaacacccgcgatgtgctgaccttcaccgacaccctgggcaccggcctggatttcgccagcgtcagcagccccggtgcattcacctgcaatgcggccaacccgctggtgtgcacgctgccggcaggcaccgtgccgggcacctacagcctgagctacacggccaccgtgaatgcccaggccagtggccaggtggtcaacaccgtggccggcaccggtaccgatacgcccacctgcagcagcaactgcaccaccaccacgccagtggcggcgccgcgcatctcggtgtccaaggccagcggcaccgccggtccggttgccatcggcgacagtgttgcctataccgtgacggtgctggtggccgacgcgcgcaccacggcggtgaccacgctgaccgatacgctgggcaccggcctggactttggcagcgtcaccagcgcgggtagcttcagttgcacgccaggcaacccgctggtctgcacgctgccggccgggaccgtgccgggcagctatgcgttctcgtacaccggcgtggtcaacgctcaggccagtggccaggtgcgcaacgcggtggtgcccagcggcaccgacaacccgtcctgcgtgggtgcgtgcgataccaccacgccgatggccgcagcgcaggtggtctatgccaagcaggcctccaccggtgggccggtacgggtgggtgaccgcatcgactacaccctgactgcaaccgtgacgcgcgcgcgcaccagtgccgtggtcaccctgaccgatacgctgggcaatggcctcgatctcgctggcgtgagcagcgcaggcatctttacctgcaacgccgccaatccgctggtgtgcacgctgccggccggcaccgtgccgggtacctacagtgttacctatggcgccaccgtcaatgcgcaggcgagcggcagtgtgcgcaatgccgtgcttggtagcggcaccgacaatccgtcgtgcagcgtgaactgcgataccaccaccccggtggcgacaccgggggtgagctatgccaagtcggtgaacagcaccggtccggtttcggcgggcgatcgcctgacctacaccctgactacggtggtgaccaactcgcgcaccaccgatgtggtgaccctgaccgatacgctgggtaccggcctggacttcggcgcggtgaccactgcggggggctacacctgcaatgccgccaatccactggtgtgcacgctgccggctggcaccgttccgggcagctacagcctgacctacaccgccgtggtgaatgcgcaggccaccggccaggtcaccaacgccgtgctcggcggtggtggcgacaatccgtcgtgtaccgccaactgcggcaccagcacgccggtgaccggcagcgcgatcgactatcgcaagacctcggccgccgcaggttcggtgaaggtgggcgacagcatcgcctacacattgactgcattggtcagcaactcgcgcaccacggcggtgttcaccctgaccgacacgatgggccccggcctggacttcggtgcggtgactgccagccagggcttcagctgcaatgccgccaatccgttggtgtgcacgctgccggccggtactgtgccgggcacctacacggtggactacaccgctcgggtgaatgcccgggccaagggcagcgtcagcaatgccgtgctcggtagtggcaccggcgtcaccacctgcaccagcaactgcggaaccaccacgccggtgctgtcggcggtggtgacctaccgcaagcagtcgaccaccgtcactccggtgggcgtgggcgatgcggtggactacagcgtggaagtgacggtcgccaactcgcagaccctcgatacgctgaccctgaccgataccctgggcacgggcctggacctgcagtcggtcacccaaccgggaccgttcacctgcaacgccagcaatccgctggtctgtacgctgccggccggtaccgcgcccgggacctatgcgctgggctaccgcgcgctggtcaacgcccaggccagcggcagcgtgcgcaacgccgtactcggcaccggcggtgacacgcccacctgcagcggtgactgcagcaccgagcacgcgctggccgaaccgcgcgtggtgctggagaagcaggccggcccagccagtggcaccgaagtgcgaccgggcgaccgcctgcgctacacgctggtggccacggtcgagcgggcggcgctgcgccagccgctgcagctggtggatacgccggacgccggcttgagcatcgaaagcctgcccgccggatgcgtccagcaggggcccgacatcgtctgcacggtgccgacgggtactgctatcggtcgccacgagttcgcctaccaggccgtggtcaaccaggaggcccgcatcgaggtgctgaaccgcttgcgcggacagtatccggatggctcgccgccgccggactgcacgacctgcgagacgcgccacaaggtggtgtccgacttcgccctgcgcatcaccaagaccgccagcccgcgccgggtgaaggtgggcgacctggtgcgctaccagctggtggtcgagaacgtgggcggcagccattggcgcaacggcgtggtggtcgatacaccgccgccgggcttcagctacgtcgacggctcgatgcgcgtggccgacgatgacggcgcgttctcgctggccagcagccaggttccactgcgcatcggtgcggtggacattgccgtgggtcgcagtgcgaccatcacctacctgttgcgtgtgggcgccggcgtgcgcgcgggcaaccacgtgaaccaggccgttgccaccgccgacgatggcacgccgctgtcgaacatcgccaccgccgaggtggccatggatgccgatccgctgctggaagacagcctggtattcggcactgtgtttgatgatcgtgacggcgatggctggcaggacagtgccgagctgagcggcgttcgcgtgcagggcggcttcgctgctgcggcctacgtgccgggctcgaccacgctggatcgcggcgatggcccgcaaccgctggccgatgccagtgcaccgttgctgcacggagtgcagattggcgtggtgcatggccgcgcgtccacgtccgacaccgccgaggcgcatcaggtggtgctgcgccagcgcctgcgcgaactgtccttcagcgatgacttcgtgctggaaagcgcgcagggccaccgcctgcggatggacgcgcagggcgccacgcgcgtggaacgcagcggtgaggccggcaaaggcctcaccgcagccgagccgagcgtgcgccgcgagatcgcccgtgtcgccgagggttacgaagtggcttatgtgatcggcaacgaaggcatccaggagcagggcatccccggtgtgcgtctggccacggtggaaggcctgctggtggagaccgatccgttcgggcgctaccacctggctgacgtgcacggaggtgacgcgcgcctgggccgcaacttcatcatcaagctggacccggccacgctgccggccggggctgaactgaccaccgagaatccgctgctgcggcgggtgacgcagggcgtgccgacccgcttcagcttcggcgtgcgcttgtcgccatcgccgcaggccgccgccgagcgcatggagattgcgttgggcgaggtgctgttcgcaccggacagcagcgagctgcaggccaactatcgcccggtgctgaagaagatggccgaggtggtcgaccgctaccagggcggcgacgtggtgatcgctgccaatggcgagagccaggcactggcctttgcccgcgccgcagcggtacgcgatgcactgcaggccgaggttgcggaaagcgcacgcgccggcctggccgtgcagctgcgcaccgatgtgcgcgatccccactcgctgctggccggtgtggatgccggtggcgcgctgctgggcaacgtgctgttcgacaccgacaaggccaccgtacgcgacgagttcaagccgctgctggccgccatcgccgcgcgtctggaacagctgggcggtggccaggtcagcctggtcggccacaccgatgtgcgcggcagccatgcctacaaccaggcactgggcctgcgccgtgccaacgccgtgttcgaggcgctgcgcagccagctcagccccgccgtgcagcagcgcctgcgcgttcgcaacgaggagagcgccgccacccgtgcggctgcccgccaacaggaggcacgcccatga

SEQ ID NO: 504934 - DNA, 3690 bp, Stenotrophomonas maltophilia
atgagcgcgcatcactctgccgcccgccgtgcggcccgcctgccgcgcgctgcgctgtatcaggccctgctgcttggcctggccggtgccgcccatgccgagccgcccgccgccgagccggcgccgatccgttgtgacggcacccagtgcaatgccgagggcgaactgttgttcagcctgcgctcgcgcagctatgacgaaccggtgaccgagggaacgtccacgcgttccagctcgcaggccctgcaaccggaccgccgggtcagtgtggcgatcgatgagccgggcaaggccaccgtgcgtggcgagttcatgatccgcttgccggaaggcggcgcgatctgggccaccgaagacccggcgatgggccagccggaactgtcggtctctgcaccgggcatggtcgccttcgacgaaggccgcatcgtgcggccggtcgagttctacgtgcgtggcaactacaccgccttcatccagcgcctggaagtcagcgtttaccgcggcagcgacacggatcgtgtggcagcactggcgacgttcgaactgccggtggccgccgttgcccagggcgtgtgggatggcgcgttgccggcctcgacgccgctgcgtcgcggcgaccggctggtctacgtgctgcgcgcctttgatgccgagggcaatgtcgatgaaaccaccgcgcagtcgatgcagctggtgacgccggcggaattcgagcgcggcaaccagcagttgcgtgacgcgctggaagaccgccgcggtacctcggtggacgccaaccaggccgcgtcgttgtcactgctgcagcaggtgttcgatggcaatggcctgcgccagcagaacatcccggtgtatggatcgcgggtgcgcctgcgtggccgcgacctgccactgggcgcgtcgctgaagatcaatggcgacagttatccgctggaccaggatcgcaagttcgccgccgagtacctgatgccgatcggccatcatgccttcgacgtgcgcgtggagcgaccggatgcgccggccatcgcgcgcacgctggaagtcgatgtcagcggccagtatctgtttggcgtcggcctggccgacatcaccgtgtaccagaacaaggccagtggggcagggcaggacttcgcccggggcgagcgcaatgatgacgtgctcagcgatggccgcctggccttctacctgaaggccaagacccgtggccgctacctgctgaccgcacaggccgatacccagaaccgtccgctggacgagctgttcaccggcttcaccacggccgatccgcgcgacctgttccgcagcctggacccggacctgtactacccgacctatggcgacgactcgctgacccagcgcgatgttgacagcatgggccgcttctacctgcgcatggactgggacaagaaccaggcgttgtggggcaactacaacaccggcctgaccggcaccgagtacgcgcagtacgtgcgttcgctgtacggtgcggcactgtcgtggcgctcgcgcggagcaaatgcctggggggatgcacgcagcgagctgcgcgtgttcggttcacaggccgaaacggcgccgggccacagcgagttcatcggcaccggtggcagcctgtactacctgcggcatgcaagcatcctcagtggttcggaccaggtggtgctggaaatccgtgaccgcaccagcggccgcgtcgagcagcgcgtgccgatggtgcgcggtgccgactacgagatcgacgccctgcagggccgcatcctgctgacccggccgctggcccaggtcagccgtgagaacctgcgccggatcagccgcgacgtgccgctggacggctatgagcagcgcctgatcgtggactacgaatgggtgccgaccggcttcgacagcgatgacatcaccgctggcgtacgcggcaagcactggtttggtgatcacgttgccgtgggcgccacctacgtggacgagcagcgctccggccaggactattcgatgaagggtgcggacctgaccctgcaggccggccgtggcacctacctgaaggtcgagcacagccgcagcgaggcgaccagtgcgccggtgttcttctcggacaacggcggtctgagcttcagccgcctcaacccggaggggctgcgcgaaggtgaagcgaccgccgttgaagcacgcgtcaatctgcgcgaactgggctggacccagcgcgactggagcgccggcgcctggtggcgccaggtggacggcggctattcggtgggccgcttcgacaccggccagcgcgtgcgcgagcagggcgccgagctgctgggctacgtgaccgacgacttcagcctgtatgcgcgctacagcgaggcccgccgtggcaatgcgtcgttgatccaggcgcaggccaccgccgaatggcggatcggcgagaacgaccgactgtcggccgaactgcgccgtgtgcaggaggaccgcggccttggcggcaatgtggctggcgtgctggctgcggcgcgctacacacaccgcatcggtacgtcgctggatgtgtacggcggtggccagctgaccgtcgacgatgaccatggccgctatgccgacaacgacgcggtggtggccggtggcacctggaccttcgccaacctgtccaccattggtgcggaagtctcggacggcgaccgtggcaccgccgcgcaggtcaacgccgagtaccggctgaccccgcagcacagcttctacggtgcattcacccagtccaccgaccgcagcgagtacgacccgttgttcagcccgaacgcacaggatggatggactctgggccagcgctggcgcctgtctgaccaggtcaacgtgttcaacgaaagccagttcctgaaatccgggcaggagtccggcctggcgcacaccttcggcatggacttctatccggcggtgggctggaacgcgggcttcaccctgagcaacggcaagctggacgccagcagtggccaggtggatcgcaaggcggtcagcctgtccggcggccgcaccgcgcccggtaccgagtggcagagcaagctggaatggcggcgcgataccggtgccgagcggcgcacgcagtgggtcagcaccaatcgcctcagccaccgcctcagcgacagctggcgcatcgcggcgcgcttcaactatgccgacaccgacgatgcgatcaatccggtggcgggtgcgcgcttcatcgaaggcaacctgggcttcgcctaccggccgtgggacaacgaccgctgggcgttgttcggtcgctacagttacctgtacgacctgtcgacgatgggccaggtgaacggcgtggactacgatcagcgcacgcagatcctgtcgctggaaggcgtgtaccgcatcgaccagcgctgggaggtggcggccaaggcggcgcggcgcgaaggcgaggtgcgttatggacgcggcagcggcccctggttcgactcggccaccaacttcgctgcgggacagctgcgctatgacctgtactaccagtggcacggcctgctggagtatcggctgctggatgtccgcgacggcggcagcaggcagggttggctggccggtgtcgatcgcgatatcggccgcaacttccgcgtgggtgtgggctacaacttcaccgacttcagcgatgacctgaccaggttcgattacacccatcgcgggtggtacctgaacctggtggggcgctattga

SEQ ID NO: 504935 - DNA, 972 bp, Stenotrophomonas maltophilia
ttgttcaatttgataagggattacgagagaattgtctcacttcaggcggacaaacgagtcgaactaggcacgcaaggcgcttgcagatactgcaggaaatctggatccgatgtcacattcagatccgctgcccacgcactcccagagcttattgggaacaagcacctctattcgctggacgaatgtgattcctgcaatgcgtacttcgacagaaatcttgagaacgaccttgcgaactttcttggcatcctgcgcactaccactgccataaaagggaagaaaggggtcccaggattcaagtccaaggacggacagagggttgagcgtgtcaacgactgcctgatagtgatcgagcatcacaactctgagcttgtctctgagaatgcagctacagaatctattactctgcaaacaaggacgaatccgtacagacctacccgcgttttcaaatgccttgccaaaatggcaatctcggtactcccggagcaagaagtgaagcgtcatctgcgttgtattgactggattcgaggcgctacgacatcggcgccgccccatccacgcacgcttgtatcgaaggtgacgatgctctccggacatattcctttcccgcacccatctatctcaatctggaagcggaaacaaaagagcaacgcgcgcccgcgaataatagccattctgtgctttcagaacttcgtattcgagttctgccttccactttcaaagaagtcttctcccgctgaagaaagcaatttttcctttcccgatcttgggttgccgtggaacctcctttccggtgaaggcaacgcgtcggcatcgctagtcgatctatcagaacgggacaaggtcgttacagaccggatagcgcatctaaagctgaaacaaccatgggagcagatcgagccggatgaaattccagccgagctaaaagagcacctgaaaaagctcgatatttcgataggaccaccaaactag

SEQ ID NO: 504936 - DNA, 2001 bp, Stenotrophomonas maltophilia
atggtcagacagtcgccgcaccaagagattgcagatcttgcgcaaagctttgagcgcattagtaatggtcttatgactatgacaaagcccctgtctaagttcgaatacgagcatggcgtctacggcgtcatttttgtaaagcccaataagcgcctttcaaaaatattctctactgatcgagaagtaattgtcatagtgacaaattttcaagatcaacagcagcgtactattcaggccctcaaggcccagttgctcgagtcgcaggggcgcctcgagggatcgcttgcaatagtggtccatgccgatcccgatgggaacagaaagcttaagaattggggtcgagaacaggggctggctatccttccgctttcttctcgtgatatttcgagtgactcagattcttttgaaagagatctgcttcaggattttttctcaaatgaccctttcgatgtaaccggtccagtttcggacgatgcaagattcttcggcagacgcactgaggctctggatattgcccgccagttgcgcggtgggcagattcgttcatcgcttggaattagaaagattggcaagacttccattctaaatcgaatacttcatgaagccagatcgcaccatgattgcctatgcgtgatggtggattgctcgaaggatgaaatctggagccaagattctggcaggttgcttcactcaattgcggacgcgataggatccgccactcgggatggcgcgcgctatgttgaagtcggacgcgtgaagggtcgacccattcgcctcagcgatgcaagaggaaaacttaacgaggctatcgattcatctagcgcaactgtcattatcttctttgatgaggtcgattacattactcctggaagtccgacggcaagggatgcgtggtcaaaggaatttaaccccttctggagaaatttgcgcgctgtggttcaagagggggcgcgtcgggatcgaaagatttcgctgtttgtttgtggtgtatcaagtaagtggtttaaggttgaatctgtaaatggcgtggagaatgcagtccttgcatttattcctgaggagtatctatctcccttggcctctagtgctagcgctggaatgatccgagccatctcgaaagtggctggactttctttcgatgaagcgacagctgaatggattgggaatgcttgcgggaatatgccttactggacaagaaaggcttgctcttacattcaccggcatattgatattagagataggccttgcgcaattccgcgtgaaacggctgagcggctggttacagaatttgttgaggtcgagggtgcagcaattgccgaagtggcgataaatcatctatttagggtgcatcctgaggtctattccgctgctcgagaagttctccaaggaagcactcccaaaaagacggatccaatggcttcgacgctattgaggtatgggatatttcaggaggttcgtggtgaggtcaggcttgccagcattatgatcgaagagggacttaagctctatgagcttaagaatcaggggggatctggtgtcgctgatatccttccggtaagttcccagcccttgagatataatattgatgactgggcggatgagctggcgcaggtaaatgcgagcaggaacaagcttgaacgaaagatgcgggctttgactctcaatttcatcaagttttcatacctccaggataagtctaagggtgttccttctgcgcgcataattcgcggcattgaaaaatctcgcgtggagaagcttcagcacctgccgccggatgatctgattgagaagctgctttggactgaattgatccgtttgatcgaaagagagtggtcccttttttctccaatatttatcgatcttcggcagctcaaagataactctgcagtggtaaatgaccgacctgatgctcatgcgaaagatgtggatggtgctgatttagcctactatcgccgggcgcttcggtggcttgaggatgctgttcaacgtgccagttcctga

SEQ ID NO: 504937 - DNA, 456 bp, Stenotrophomonas maltophilia
atgaaacgacttctctgtggcctgttgctgtccgttgcgattccgctgcgtgccgagccgatccccccaccgatgctgcaactcgatttcccggtgctggcggtgggggatatcggccagttccgtgtccaggtgccggcctatgccggcgggcaggggcgcgtgtcctacgccgcgcatgcgctgatgccgggcagtgccgaggatcgcggctaccgcttcattgcggtggcctgcggcgatggtggctttaccccggtggtgcactacgaggaccgtggcgtggtctgttcgcgcatcggccaggcgccgcatccggcgttcgagatggtggtaaccgtgctcaacaccggtgccgccaatggcgggacggtgatgccggagggcctgcgcggcctggtgtatgacgtcgggccgagcgcggcgccgtggcggatctacggcgtcgggccgtag

SEQ ID NO: 504938 - DNA, 1677 bp, Stenotrophomonas maltophilia
atgagtctggatcgtccctggctgcagagctatccgaaaggcgttcccgccgagatcgacgtcaacgagttccattcggtagcttcggtcttcgacgcttccgtcgcgaaattccgcgaccgtccagcctactccagcttcggcaaggtgctcacctacggtgagaccgatgcgctggtcacccagttcgcggcctacctgctgggtgagctcaagctcaagaagggtgaccgcgtcgccctgatgatgcccaactgcctgcagtacccggtggccaccttcggcgtgctgcgcgcaggcctcaccgtggtcaacgtcaacccgctgtacaccgcccgcgagctgaagcaccagctggtcgacgccggcgtgaccgcactggtcgtggtcgacaacttcggcgataccgtcgagcaggtcatcgccgacacgccggtcaagcacgtgatcactaccggcctgggcgacctgctcggcgccaagggcgcgatcgtcaacttcgtgctgaagtacatcaagaagatggtgcccaactaccacgtcaagggtgccgtccgcttcaggcaggcactcacgctgggcagccgccacgcgctcccgccggtcgagatcgaccacgacgacatcgccttcctgcagtacaccggcggcaccaccggcgtggccaagggtgcgatgctgaccaaccgcaacctgatcgccaacatgcagcaggcctcggcctggatcagtgcgtcgggcatcgagatgggcaaggagtggatcatcaccgccctgccgctgtaccacatcttcgcactgacggcgaacggcctggtcttcatgaagttcggtggctgcaaccacctgatcaccaatccgcgcgacatgaagggtttcgtcaaggagctcaagtcggtgcgcttcaccgccatcaccggcgtcaacacgctgttcaacggcctgctcaatacccccggtttcgacacggtcgacttctcgtcgctgaaggtcaccctgggcggcggcatggccgtgcagcgcgccgtggccgaacgctggaaaaaggtgaccggcgttaccctggtcgaggcctatggcctgaccgagacgtcgccggcggcctgcatcaacccgcttaccctcaccgagtacaacggttcgatcggcctgccgatcccgtccaccgatgcctgcatcaaggatgacaacagcaacatcctgccgctgggcgaagtcggcgaactctgcatcaagggcccgcaggtgatgaagggctactggcagcgtccggaggaaaccgacaaggccatcgacgccgacggctggctgcacaccggcgacatggcgaagatggacgaacagggcttcttctacatcgtcgaccgcaagaaggacatgatcctggtgtccggcttcaacgtgtacccgaacgaagtcgaggatgtcatcgcgatgatgcccggcgtgctggaagtggctgcggtcggcgtgccggacgagaagtccggtgaggtggtcaaggtggtcatcgtgaagaaggacccgaacctgaccgccgaaatggtcaaggaacatgcccgggccaacctgaccggttacaaacaccccaaaatcgtagaattccgaaaggagctgccgaagaccaacgtcggcaaaatcctccgccgcgaactccgcgatacgcccgcccagtaa

SEQ ID NO: 504939 - DNA, 1086 bp, Stenotrophomonas maltophilia
atgtttccgcatcgccccacgaccctgatgctcgcccttgcactggccctgccgctgctggcccaggccgctgcaccgacgccggccgccaaacccgcggctgccgctgcggccacccccgaggtacgcgggccgaccgacctgaagccgggcgaatacctgtggcatccggaaatctcgccgaccggcccgatcgtgctggtggtcagcctcgatgagcagcgcgcctatgtgtaccgcaacggcatcgccatcggcctgaccacgatcagctcgggcaaggccgggcacgaaacaccaaccggtgtgttcaccatcctgcagaaggacaaggaccacaagtccaacctctacaacagcgcgccgatgccgtacatgcagcggctgacctgggacggcatcgccctgcatggcggcagcctgcccgggcatccggcctcgcatggctgcgtgcgcctgccgcaggccttcgcgcagaagctgttcagcgaaacccagcgcggcgataccgtggtcgtggccgatgccaagagctcgccgatgactctggcctatccgtcggtgctggcgccggtcaacgcacgtggccaggccttgccggagaccgagggcggcgcgccggcgcaggcctggtgggatgacagcgcggccccggccgggcaggtcggcatcctggtcagcctgcacgaccagcgcctgtacgtgctgcgcgatggcgtgatgatcggcgagtcgccgttgaaggccgacgcgctgccggcgttccagggcaccaccctgttcgtgatggggcagggttacagtgatacccccagcccgctggacgcgaaccagcgcctgcaccagtggacggcctacccgctgctgggccaggaccgtgcccaggccacgccggacctgctggccacgccctcgctgccgatggcgctgccgaccgatttcgctcgccagctgtaccaggtgctggtgccgggcacgaccctgctggtcacctcgctgccggcggtccgcccaagcccggctgaatccggaatgcagccggtcttggaatccgagccgccagggtccaccctcaagggcaactga

SEQ ID NO: 504940 - DNA, 291 bp, Stenotrophomonas maltophilia
atgaaacgggccgtgtctgcgccggtgctcgacgatcgcctcggccttggcggctccgaccatcgtcaatccctgctgcagcgcctgggcatcggcgcggttgatgtcgatcggttcggcggcatgcgccccagcgatccccactaccagtaccagcaccctcaacacgacaaaccaaggcacaacgtgtatctccttgtgattctggccgtcccgaccggcaatcccgtcggcaggaacagtgtccgtcaccacatgtgcacagcctatcggtttcccgtatttccgtaa

SEQ ID NO: 504941 - DNA, 1038 bp, Stenotrophomonas maltophilia
ttgccatttcccgttatgcaatgggcacaagttgcccacaactaccatcgaagcacgattctgttgggcaatggcgcgagtattgccgtatccccgagcttcagttatggctcattgctggattacgcccaacagcgcggcctgctcgcaacggatgtacgccgactattccatttcttcgggacttctgactttgaactaatcctgcgcttggtttggcaggcgtccaacgtcaaccgagcgttgcagataccggacaacagtacgcgccaagcctacttgaacgtcagagaatgcctaattcaggccgttcgtgatgtgcatcccgagcataacctggtgaatcctcaactacccagcatgtaccagtttctcaaggggttcgacacagtactgtcgctgaactatgacttgttggtctattggacgatgacttatggcttgaatgtcgatgatggacatgcgttcaaggattgcttccaatggaacggcggattcgacgataactggggaagatatcgggaacggtacagggagcaaaccaacaccttggtgttctatccccatgggagccttgccttgtgccgcaatgccgtggagcaggaatccaagattcacaacgctggagcaggtttgctggaggccatcctccaagagtggtgcagcgagcgagttgttccgctattcgtcagtgaggggacgatgcaacagaaggtgtcatcgatccagagcagctactacctctcaacggtgtaccgtgaagtgctcgcatcgcaacgggtcgcgctgacgctgtatggctggggcataagcgagcatgatcggcacctgctgaggcggatgcgcggaactggtatccatcgggtcgctgtctccgtttttcgcggcgatcaggtctattgcaactacgcgtaccaagctcttcaggatgatctggggccagtgcaagtggacttctttgatagcgaaagtccgggatgttggatacacgccgccccagagcctacgccggtggggttgggtcaattcggcatctag

SEQ ID NO: 504942 - DNA, 210 bp, Stenotrophomonas maltophilia
atgacccgcaccaccatcaaccgcccgcgcatgacggcgatctacgctcccggtacggtacgcgcccgccgctggcacggcgcaggcgacgtgcgcggctaccgcccgccctcgggctggacggcctgcgccgacctcaccgacattcatcccatcacggaccgcgccttgccgcgtgccgtgtggtggctcatcgagacgaaggaataa

SEQ ID NO: 504943 - DNA, 825 bp, Stenotrophomonas maltophilia
atgcaactcgcatcccgcttcgcttcccgttccccggtgctgcgttcggaatatcccttgtccgatgaccaaatccgggccgtggtcccgtccatcttcgccgaggctccgcacgaaagccgctccgagcggtacagctacatccccaccgccaccgtgctgcaagaactgcgcggggaaggcttcgagcctttcatggtgacgcaaacccgcgtgcgccacgacgaccgccgcgactacaccaagcacatgatccggctgcgccacgccagccagatcaacggccgcgaggccaacgaaatcatcctgctgaactcccatgacggcaccagtagctatcagatgctggcagggatgttccgcttcgtttgcagcaatggccttgtctgcggcgacaccgtggccgacgtgcgcgttccccacaagggcgacgtagccgggcacgtcatcgaaggcgcttacgaagtcctgcacggcttcgaccgggcgcaggagtcacgcgatgccatgcgcgccatcacgctggacgccggggaatccgcagtgttcgcccgcgctgcgctggcgttgaagtacgacgaggacaagcccgcgcccatcacggaatcgcaaatcctgatgccgcgccgccatgacgacgaccgccgcgacctgtggagcgtgttcaaccgcacgcaggagaacttgaccaaaggcggcctgtccgcccgcgccgcgaatggccgccgccagaccacccggcccgtgcagggcatcgaccaaagcgtgcgcctcaatcgcgccctgtggctgctggccgatggcctgcgccagttgaaagcctga

SEQ ID NO: 504944 - DNA, 666 bp, Stenotrophomonas maltophilia
atggaggaaaccatcatcaacaacgacccgttggagcacatgctccaccgttccaataccttgcacgagcggctggatgaactgctgggcgatgccgatttcgatggatcgccccgcggcgaatcaaccctcggcatgtgcttggtcgctatggaacatgcggcggcaatgcgagcattgatgtcgctgcgactgcccacgtctgccgtcggcctcatgcgcctgcagttcgaggccctgacacgggcaatgtggctgctctacgcagctagcgacgcagcgatcgataagttgctggcgccactgacgcagcagagcgaacgggcagccaagaacttgcctggcgccagcgaaatgattgagcagatcggcaagcgagtcggacaaggcgcgccggcagccgcgcaccagatgctgttgcacttcaaggatgtgacctggcacggcatgaactcattcgtgcatggcggcattcatccgctgcggcgtagtgccgacggcttcccggtcgatcttgcgctgcaagtactgcgcagctcgaacggtctgacgaccatgaccggcatgacgatggctgtcctcaccggcgatgaaaccgtggccaagcccgtgagcaagatccagccggcattcgccgactgcctgccggatctgctgagaccttga

SEQ ID NO: 504945 - DNA, 351 bp, Stenotrophomonas maltophilia
atgaactgcgcattcatcaccgacgagcagcgcatcgtgctgctggccaatggccgcgaatccttgctgaacccggacttcgatccggcccccgtggtcaagctgttcacgccggatgccggcgcgacctggctgctgaccgagattgatcccgatgaccacgaccacgcctttggtctttgtgacctgggcctggggatgccggaaatcggctgggtcagcctgggcgaactggcgaccgtgcgcggcgggctgggcctgccaatcgaacgcgacctgtctttccgggccgaaaagcggttgagcgcctatgcgcgcgatgcgcgcctggccgggcgaatcgttcaatga

SEQ ID NO: 504946 - DNA, 510 bp, Stenotrophomonas maltophilia
atgtcgcaactgtccttttcctcgttcgatgcctcgctgatggtgcgtgatgcacagggccgctatctgctggcgacgactgaccagattctggaggccgcgcgccaggctatcgagcacaagatgcagcgcggtgcgtcattcatttcgccggtggcggtcaaggagtacctgcgcgccaagctggctgggttcgagcacgaggtgttcgccgtgctgttcctcgatacgcaccattgcttgatcgagtatgccgagatgtttcgaggcaccatcgacagcgcatcggtgtatccgcgcgaagtggtcaagcaggcgctgcggctcaatgcggcggcggtcatcgtttcgcacaaccacccgagcgggaatcctgagccgagcgcggccgacagggcactgacccagcggctcaaggaggcgctggcactggtggacgttcgcattctggatcacgtcatcgtcgcgggcggcaacaccgcgtcattcgccgaacgcggcctgatctga

SEQ ID NO: 504947 - DNA, 366 bp, Stenotrophomonas maltophilia
gtggaacagctatcgcaagcccccaatactgccggcaccgatgtcggcctccccttgccaggcacggatgcctacgaggctttgccgcaatttccaaagcgcagtgtccttcccttccgtcgcaccattcgccggcaggaactgcggcagatcgttcccctcgccgaaacgacgatctacgaaatggagcgtcgcggtgagttcccacgtcgcttcaacctgacgccacgctgcgtcgtatgggacttggcagaagtggaagcctgggtcgaagaacgaaagcaggctccgcgcgccggcgtgtcgaaaccggatgtctacctacgaaaagcccgccctgtccgggcgggttcgagcgaggcataa

SEQ ID NO: 504948 - DNA, 525 bp, Stenotrophomonas maltophilia
atggaatacaccttcactctgaaatatcagctcacggatgctgaccgcgacccggatgcactggtggagcgcctgggcgaagccggctgcgacgatgccttggtcggcatcgggcagccgggtcggttggcgctggagttcacccgcgaggcagcggatgcggacgaggccgtgcgtagcgcgctggccgatgtgcgctgcgccgcgccgaccgcgcgattgatcgaagtagcgccggatctggtgggtctgactgacgtggccgacattgttggcgtgtcgcggcagaacatgcgcaagctgatgctggcgcatccgggcagctttccggcgccggtgcatgagggcagcgcgtcgatctggcatttggcggacgtattggcgtggttgcaggccaagggcagctactcgctggccaaagacgtgtttgaggtggcacgggtggccttgcaggtcaacgtggcgaaggaggggcggcgattgccgcgctcgacatccaaggcactggaggctttgattggatga

SEQ ID NO: 504949 - DNA, 276 bp, Stenotrophomonas maltophilia
atggctcgttcccctcatccgaagaaagatgtcgaggaagctctcaggcacgccgaagggcagggctggcgcgtcgaagtcggcggcagccacgcttgggggcggatgtattgcccttacaacgatgaagaatgtcgctgcggcgagttctgcatcaccagtgtatggagcacgccgaaaaatcccggcaaccacgcgcgctccttgcggcgcgtcgtggacaactgcaccacgcaccggccgcagcgcgacgctgatgatggtgccaaggagtag

SEQ ID NO: 504950 - DNA, 1257 bp, Stenotrophomonas maltophilia
atgctgaccgacgctgcactacgcaatttcaaacctaagtccaagatttataaggcttctgaccgagacgggatgtacgtgacggtatcgcctggcggaacgatcacgttccgctacgactaccggctccacggccgccgcgagacgctgaccctcggacgctatggccctggtggcatctcgctggcaatggcgcgcgaactgctgctggacgcgcgcaaagccgttctcaagggtgtctcgcccgcgctggagaagcagcgtgagaaacgccgggtggtcgccatcaagaccttcggcgcggtgatggagacgtggctggccaacgcaaggctggccgacagcacccgcgccatgcgcaagcacatcatcgaccgggacatcctgccggtcttccagaatcgcctgctcaccgaaatccaggccgaagacctgcgggccttgtgcaacaaggtcaaggagcgtggggcgccggccacggcggtacagattcgggacatcgtgaagcaggtctacatctacgccatcgcccacggtgagaaggtggacaaccccgccgacagcgtgggcgcggcctcgatcgccacctttgtgccgaaagatcgcgccttgtcgccgctggagattcggctgttcatgcagcagatggaatcggtggcgacctatccgaccatcaagctggcgctgcgcttgatcctgctgacgctggtacgcaagagcgaactgatccacgccacctgggatgaggtcgatttcgagagcaagacctggacgattcctaagcagcggatgaaggggcgcaacccgcacgtggtctatctatcgcgccagacgctcgacatcttcgtgacgttgcacgcctgcgcggcgggatcaaggttcgtttttccgtctcgctatgacgcagaacggtgcatgtccaacgctactttgaatcgcgtcacagggctagtagtggaggcggcaaagaccaaggggctgccgctgaaacccttcaccgtccatgacctgcgccggaccggctcgacactgttgaacgaaatcggcttcaaccgcgactggatcgagaagtgcctggcgcacgaggacgggcgttcctcgcgctcggtttacaacaaggccgagtacgccgagcagcggcgccacatgctgcaagagtgggccaacctagtcgatgcctggggcggtgggcagacctacgtgccgaagctgttaccggcgaacgtggtggtgccggcgttgagcgcgatagcctga

SEQ ID NO: 504951 - DNA, 1530 bp, Stenotrophomonas maltophilia
atgcagatgcgatcgaagatctggctgaggggtgcggccctggtgctgctggcggggtgcaaccgcacgccgccagacgaacaggtggcgcgggcggcgccaccgacggcgggcgagaccgcggtgccggccgtcacgccagcgggatcttcggcacctgccgagggcgcgggcctgaccgatcgcgatggcaaaccagtaccgcaggtgccgttcgatatcgccagcgtgccattgagtgacgccgtgctgggcgagctgccgttcttcagcctgccgcagggctacgcgccacagaacgccccgcacccacgcgcctgggcacgcttcccgttccgcatgggcgacggcgtgcactgggtggaggggccgagctggtcggcacgcatcgttgcagactcccagggcgctcccgacaaaacgttctctgcacttgaagtgcagcgcaatttcgatggcgtgatcaccgccgccggtggccgcaaggtattcgaaggcacgctgctgcgcgacatctactacggcccgcagctggaaggcgagatcggtggcggattcatcgatgcggtgaacggtgaacaggatgcgccgaccacggtctacgtactgcgccaggctaaccgcaacgtctgggtgcagctggaagtggacagcaacggcgccggcctggtggtggtggatgaagtgccattcaaggccaccgcacagtggctggagaccttcccgcacctgtcgctgcccgccggctatcgcgaccgcaacaaggccaaacagcgtgacttcgatgccttcccgttctggaccggcgatcatttcgagcaggtcgagggccgcatcttcgctgccgacttcgacaagggcgagcgtgagtactcgatgcatgaagtacgccgcaacctcgaagcgatgatggagcaggcaaagggcaccaaggtgttcgagggccgtattccgctcgaggccgccgagggcgtttcgaagcaggtgcagtcggcctacagcgaatccgcaagctacaactggaacaactacgacagcgtggtctaccgcgtggacctggccgacggccgccaggtgtgggtgcacgcgcggctggaatacctcagtgccggctgggtggttgccgagcgcaagggattcgcccagacagcggcgctgctgccggccgatgcgctgaagaagaagctcgacagtgatggccgggtggcgatccaggtcaactttgccactgacaaggcacagatcctgccaacctccgaaccgcagctggcgcaggtgctggaccttctgcgtggcgatccttcgttgaagctctcgattgaaggccacaccgacaacagcggtgccgcagcacacaaccgcaccctgtcgcaggaccgtgcgacgtcggtggtggccgcgctcaccgcccagggcatcgcgcccgaccgcctgcaggcagccggattcggcgccgacaaaccgttggccgacaacggcagcgaggacggcaaggcgcgcaaccgccgggtcgagctggtcaagcgctga

SEQ ID NO: 504952 - DNA, 237 bp, Stenotrophomonas maltophilia
atggtggcgcagacacatctgatgcagcaagcgacagcacgcgacgtgttcgttctagtgctcagtcaatcgcgttggaaaatgtcgaaatctgctggcggcggcgactatgccgtgatgtatcacgtggatagttggcgtgattatcgcctgaagtggtggcacgacccgcgagtcatgtcctcaaatatcggtgcatttgcgacgaacgaggtgttggcgtccgcgcctgggtga

SEQ ID NO: 504953 - DNA, 357 bp, Stenotrophomonas maltophilia
atgacccagcgtccgccctatgcttcagatgccgccagcgtcaacgatgacgacgacaacccttcgcccgaactgagcaccttcctgggctgcctcagacgcatccgcgcgggcgaaggcgccgatggcttgccctggcctgaaaccagcctttccgcagggcgcggggttgccctgtcgcgggtggaacgggccgccatcggcatgctgaccgttgcggaaatgctgcacgcagccgaccgttgtcgatcgatggcaacgccggaacgccatctggatgcaggcgtggttgaagggctgttctttggctgccgcagcctggccgagctggtgtgccgggatgtgcggccggagtag

SEQ ID NO: 504954 - DNA, 297 bp, Stenotrophomonas maltophilia
atgcgggccgcggcaggagggctgatcgtcctcctgctggccggctgccagagcgacccgtcgctgcacagcacgcgcattggtccggaccagtaccggctgcaggttgatcgttgccatgtgatcgaccgtgcgcaactcgaaggcgacctgcaggccctggccgcacagaagtgcccggcgggcgtgggtgcgttggaaaacatccagtccctgccgagccggcagggcagcctgctcggcgaatgcctgcggcgcggggcgctgcaggccgaggtgcgctgcttgaagccctga

SEQ ID NO: 504955 - DNA, 1221 bp, Stenotrophomonas maltophilia
atggaccgcgacagccgccctgacggcattgatgcgcccgggtacggcgatcgccttgtagtggtggcactgaccttgctgctgggaggcagcgtggtcgcgctggtcggccagcacaccgcagcccaggccggcccggccatcgtcctgagcctgctgctggctgcgctgggcatggggccgctgctgtactgcctgcacgttcagaaccagcaatggcccgctgccgacggcctgtatggcgtgttgcgggatcgtttgggaagcgtgccggccgttctgctcggtggtgcgctgctgctggaactggtgctgactaccgctggcgtggcgcagtcgatcgccagccatctgcatgcgctgctggccggttctggaatcgagacccgcaacgggatgccggatcaactgatggctgctgccagcctgctgctgcttgcagtggtcggattgctgcggccacaccgtgtggtgctggttgccggtgtgctgctgacggtgaagatcggcgtcggcctgctgttgctggtgctggcagcccgccatgtgcactacgcgtactggattccatggctgccgccggcaacggcaccctatcgcttcgggatcggcggtgtactggcggcgagcgtgccgctgtccggtgtgttcgccaccgttggcctggtgctgggattccctggcatcggcaggcaggcgagggcacggacgccgcggctgctggtgtgcgtgctgctggccatggtgctgctgatcgtactggccgcgttgcaggctggcctggtcgaatttccgtccttggccagcacgcggcctttgtcggtggccctgcagcatcacccggagctgtactggatgatgcccttgctgccgctggcgggagtggcggggttggtggcgctcgttctggtgctgctgatgttggctgcgcggctggcgatacagctgtggccgacggaaggtgacgaatccctggaattccgggagaggctggtgccggttgccgtcgtcctgtcggcggcattgctggcgttgtgggcgccaatgggcagcctgccggtattgcctggcccggcaaccctgttggtgatgggggccgtgtgcctggccgtgctgcgtggacaggtaccgcggtcacgcgccctgccggtgctggcgcccgtcgccatcgcactgtgtctgctggccgcagtcgaacggatgcgggtctggcccggctga

SEQ ID NO: 504956 - DNA, 1476 bp, Stenotrophomonas maltophilia
atgggcatggttgcggcgctgttcgtgctgatgggcgtgctgttcgtgcgcctgcccagcgcattcctgcccaatgaagatcaaggaacgctggtagtgctggtgaacggagtggcgggatcgacactgcaacagaccacgcatgcattgcaggcggtcgagcactacttcctggagagcgatcccatggccgaggcgatgttcacggtcgccggctacagctactcggggatgggccagaatgcgggccttgccttcatccggctgaaggactgggcgcgacgcggctcagccgacaatgctgaagccatcgcactgcgcgcaacccgggccctggcaacgcagggaatggccgatttccacgtgctggcgccgcccccgattcccgcgctgggcaatgcatccgggttcggcttcttcctcaaggatgatgccgggcagggacattcgcacctggcccaggcgcgcgatacgcttcttgccgctgcgtcacagagcccattgcttcagcagatgcgcgccaacggcatggaggatgtggctgctctgcaggtgtgcatcgatgatgcgaaggccagggcgcatggcctcaccgccgagcggatcgggaacgaactgggggctggttggggcggccgctatgtcgccgacttcctggacagggggcgggtcaagcggatcatcatgcaggccgatgcgtccagccgcgggcttccgcaggatttcagccagtgggcggtccgcaatgaccaggcccgcatggtgcccttcgatacgctgggcagtacccactggatccagtcgtcaccgcgcttggagcgcttcaacggcacggcggccatggaaatccatggccagcctgcgcccggtacgtcgtcaggcgaagcgatgagggagatcgagcgtctcgtcgcactgcttcccccgggcttcagcattgaatggacgggtgcggccagccaagagcgggattcccgctcccagttgccgctgctctacgttctttcattgttgatggtgtttctctgcctggcggccatgtatgagagctggatcgtaccggttgcagtgctgctggcggctccgttgggcatccttggtgcggtgctggccaataccgtcaatggcctggaacgcgacatctacttccaggtggcgatgctgaccacggtgggcctgaccagcaagaacgcgatcctgatcattgagtttgccaaggagcacatggagcacggggcaggcctgatcaacgcgatcatgcacgccgtgcgcgaccgcttgcgcccgatcgtcatgacctcgctggcttttggcatgggagtgattccgctggccgtgtcctcgggggcgggttcaggcgccaagcaggccattggtatcggggtgctcggcggaatggtcgcgggcacaagcctgggcctgctcttcgtaccgctcttcttcgtggtagtgcagcgcgcgttcaagcgtggatag

SEQ ID NO: 504957 - DNA, 867 bp, Stenotrophomonas maltophilia
atgcagttgaatccggacatcagcaccggcctgtatcacggcctggaggcctggcacgtgcgcacctccaacgcgacggcggtcatcagcgtgttcggtggacagctgttgtcgttcatccccgaagggcaaccggacctgctgtggctgtcgccgcaacgcgcggagctgccgacgccgatccgcggtggcgtgccggtgtgctggccgtggttcggccgccaggggcaggatgctgatgctcccgcacatggcctggtgcgaaccgcgcgctgggagttgcagcacgccgggcagaatgaggccggcgacgtggaactggggctggcaccctccacggctgaccatcccggcctgcgcctgcagatgcagctgcgcatcggccgccagctgcgccagcagctgatcaccgagaacacgggaacgtcgccggtgacgttcacccaggccctgcacagctacttccgcgtgggcgatgcgctccgtgcccaggtcgatggccttgatggcctgcagtacctggacaagtacgaggactacgcgcagctgcgcctgcagcaggggccgtggtcattgcgcgacccgcgtgacccgggccgcagtgatcgcatctacaacggtgccggcggccattacgtgctgcgcgatccggtgctgcaacggcggatcgagatccgcagcgaaggcagccagaccctggtggcctggaatccgggcgccgaggcggcggcaaacatggcggatgtcggcgatggctggcgcgactatgtgtgcctggaagtggccaacgccgggcctgggcagatgacccttgtgccgggcgcgcgccatcagctggtgcagaccctggccagttccacgctgtaa

SEQ ID NO: 504958 - DNA, 774 bp, Stenotrophomonas maltophilia
atgcaggaagcacaatggtggtacgccaacggcaggcagagcgaaggaccggtggatctggccggtcttcgccagctgcagcaggaaggaacggttacggcacgcacgctggtgtggtgcgaaggcatgctctcgtggcggccgttggcggagctggagcaggtctcaacacccatcgcggtggctccgcccccggatatcgacgcgataccgggggttgagggcattgcgccaagtgtcggcgacccgtccgatccgtatcgtgcgcctgccgctgcaccggagatggctgcggccgccgggctggagggcgagatggccttgtacgccagcgtggtcggcggcaacttcccggtctaccgacagcgctggcgcctggatcaaggcatcgccacgggtgccggaacctggcactggccggcattcctgatcggcctggtgtggatgatgtaccgcaggatgtaccgcctcgcggcgctctgggttggcctgctgctgctgatcagcgtggtggagaccttgctggatgtgccggatggcctgtcactggtcatcacctttgcgctcagcatcaccaccggcatgttcggcaacagctggtacctggcccattgccagcgacagatcgcccgcgcccgtgccgtggcggggggcgatgaagcacgcatgcgcaacgaactggccgcgcgtggtggcaccagcgtagttgccacactggtggccatcgtcatcatgctggcggtgggtacggttggtgctgtgctggcgggatag

SEQ ID NO: 504959 - DNA, 3522 bp, Stenotrophomonas maltophilia
atgaccgcccgggatcacgaccacggtgcctcgccggcgagcgacggcgccgccgccggcatgcgcggcggcctggtggaattcgccacccgccgccgcgtgaccatcgccatgtgcacggtcaccctgctgctgttcggcctgatcgcgctgggcaacctcaaggtcaacctgctgcctgacctgagctacccgacgctgaccgtgcgcaccgagtacaccggtgcggcgccgaccgaaatcgaaaccctgatcacccagccggtcgaagaagcggtgggcgtggtcaagaacctgcgcaagctgaagtcggtctcgcgcaccggacagagcgatgtggtgctggagttcgcctggggcaccaacatggaccaggccagcctggaggtgcgcgacaagatggaggcgctgaacctgccactggaggccaaggccccggtgctgctgcgcttcaatccgtccaccgagccgatcatgcgcctggtgctgtcgagcaaggacgcgccggccaccgatgccgatgcgatccgcgagctgaccggcctgcgccgctatgccgatgaagacctgaagaagaagctggagccggtcaccggcgtggcggcggtcaaggtcggcggcggcctggaagacgagatccaggtcgacatcgaccagcagaagctggcgcagctgaacctgccaatcgacaccgtcatcaagcgcctgaaggacgagaacatcaacatctccggcggccgcctggaggagggttcgcagcgcttcctggtgcgcaccgtcaaccagttcgccgacctggaggagatccgcaacctgctggtcaccacccaggcgtcgaacggcagcgcggccgactcggcgctgcagcagatgttcaacatcgccgcgtcgaccggttcggcggccgccatcgcggcggcctcggcggcgcagagcgcatcgtccggcggtggctccagcgtggtcgccaatggtgtgccggtgcggctgaaggatgtggccaccgtgcgccagggctacaaggaacgcgaagcggtgatccgcctgggcggcaaggaatcggttgaactggccatctacaaggaaggcgatgccaacaccgtgtccaccgccgaagcgctgcgcaagcgcctggagcagatcaagggcacgttcccgtccgatgtcgagatgaccaccatcgaggaccagtcgcgcttcatcgagcacgccatcgccgacgtcaagaaggatgcagtgatcggcggcctgctggcgatcctgatcatcttcctgttcctgcgtgatggctggagcacgttcgtgatcagcctgtcgctgccggtctcgatcatcgccacgttcttcttcatgggccagctcggcctgagcctgaacgtgatgtcgctgggcggcctggcactggccaccggcctggtggtggacgattcgatcgtggtgctggagagcatcgccaaggcccgcgagcgcggcctcggcatcctgcaggcggcgattgccggtacccgcgaagtgagcatggcggtggtcgcctcgaccctgaccaccatcgcggtgttcctgccgctggtgttcgtcgacggcatcgccggccagctgttccgcgaccaggcactgaccgtggcgatcgccattgcgatctcgctgctggtgtcgatgaccctgattccgatgctgagctcgctgaagggacggccgccgctggcgttcccggaagaagcaccgaacgaaccgtggcatccgcagaaccgctggcagaagccggtggcactgggtcgccgtggtgctgtcgcaaccgcgcgctggagcttctatgcactggcctggctggtcgtgcgtgcatggcgtggcgtggtggcggtggtcggcccggtgatgcgcaaggccagcgacctggcgatgaagccctatgccggtgccgagcgcggctacctgcggctgctgccaagcgcgctggcccatccgggcaaggtgctgggcgtggccacgatcatcttcgtggcgaccatggcgctggtgccgatgcttggtgccgacctgatcccgcagctggctcaggaccgcttcgaaatgacggtgaagctgccggccggcacgccgctgaagcagaccgatgcgctggtgcgcgaactgcagctggcccacggcaacggcgagggcgtggcctcgctgtacggcgtcagtggcagcggcacccgcctggatgccagcccgaccgagagcggcgagaacatcggcaagctgaccgtggtgatggaaggcggtggcaacgcgcgaaccgaagcggagatcaccgagcgcctgcgtgacaccatgggccagcatccaggtgcacaggtcgacttcgcgcggccggcgctgttcagcttctccacgccgctggaaatcgagctgcgcgggcaggacatggcgacgctggaagtggctggccagcgtctggcggcgatgctgcgtggcaatgcacactacgccgacgtgaagtcgacggtggaagagggcttcccggaaatccagatccgcttcgaccaggagcgtgccggtgcactgggcctgaccacccgacagatcgccgatgtggtggtgaagaaggtgcgcggcgacgtggccacccgctacagcttccgcgatcgcaagatcgacgtgctggtgcgtgcgcaggagggcgaccgtgccagcgtggagagcatccgccggctgatcgtcaatccgggcagcacccgtccggtcacattggacgcagtagccgacgtggtcgccaccaccggccccagcgagatccatcgcgccgaccagacccgcgtcgccgtggtctcggccaacctgcgtgacatcgatctgggcgctgccatgcgcgaagtgcagcagatggtggccgaacagccactgggtgcgggcgttggcctgcacatcggcggccagggcgaggagctggcgcaggcggcgaaatcgctgatcttcgccttcggcctggcgattttcctggtctatctggtgatggcctcgcagttcgagtcgctgctgcatccgttcgtgatcctgttcaccatcccgctggcgctggtcggcgcgatcctggcgctgatgctgaccggcaagcccatctcggtggtggtgttcatcggcctgatcctgctggtcggcctggtcaccaagaacgcgatcatcctgatcgacaaggtcaaccagctgcgcgaggccggcgtggccaagcatgaagcgctggtggaaggtgcgcgctcgcgcttgcggccgatcatcatgaccacgctgtgcacgctgttcggcttcctgccgctggcggtggcgatgggcgagggcgccgaagtgcgcgcgccgatggcgatcaccgtgatcggtggcctgctggtgtcgaccctgctgaccctgctggtgatcccggtggtgtacgacctgatggatcgccgcggtgatgcctattaccgcgagcgtggccgcaagcacgccggtgagatcgagccgggtgcggcgggcagtgaggcgggcgcggaggaaccggcatga

SEQ ID NO: 504960 - DNA, 516 bp, Stenotrophomonas maltophilia
atgaagcttgaaggaatgcccaccaaggaactgctagccctgcacaaccggattgccgacaagcatgccggccccaagaccttcgcgacccggaccaagatcgtcgcccggatcaagcaggtcgcggccgacaagaacatcgacctggcctcgttcgggcagccgaagaaacccaaggcgaccacgcagcgcgcagagccgaaggccgaggccgccgaagcgtcggatgcgaccgagaagaagccgcgcggccttggtgtcggcgcgctcgcacgcgcgatcctgatggaccccgcaggctacccgcacgcgctggtggccgatatggtcaacgcgcagatcgagggcgcggcggcgacggccaagtccgtgcgctggtatgccaacgacatgcgcaagaagggcgtcgaggtgccgccgcgtcagaagcaccacccggctgacatggatgaggagcagtcggccgaggcgctgtccacggttcgggtggtcgcgcccgcgccctccggcgactga

SEQ ID NO: 504961 - DNA, 1185 bp, Stenotrophomonas maltophilia
atgaagtcgaagatcacccagtccctcgtcgagagggcaccgaagcccgagccgggcaagtcggtcctgtacgccgacaccgcgatgagggggttctacctcatcgtcaccgccaccaagcgcagcttctacgtccagtccctcgtcaacggccggcaggtcaggacgaagctgggcgaccaccccgcaatggacgccaagcaggcccgagacgccgcccggcagacgctcgtcggcatgcggggcggtaccaacccgaacgaggagcggcgtcgggcgcgtgcgcgcgggatcaccctgcgcgaggcgctcgaccttcacctggcggccaagccactgtccccgaggaccaaggacgactaccgctacaactgcgagcagtacctgtccgactggctcgacaggccactggccgagctcggcgcggaccggtcgggcgtgcgcgacaggcaccgcaggatcaccgagcggcacggcgcgccctcggcggacaacgccttccgcatcttccgcgccgtgtacaaccgaggcctgcgagagcacccggacctgccgccgaacccctgcgggaacgtggactaccacgggctgcggcggcgtaaggtggacgcgccgacggacaggctcaatgcatggggcaaggcggtgctgggtctccacccggtgcggcgcgaccttcacctgttcatggtactgacgggcatgcggcgcacgtcggcctgcgaggcacgcggatccgacctggacctcacatcagggcgcctgcacgtgccgaagcccaagggcggatcgacccgagcgttcgacctgccgctgtccggaccgctcgccgacctgctcggccaccgcctcgaagataaccctcgcctccacagaaagacgccgtggctgttccccgcagagtcgaagtcgggccacgtcgccgaggtcgcgcagcacgagctggacggactgacggggcacgccttgcgccacgcgttcgcaacgctggccgtgcaggcgggtgtcccgctgcttgagctgaagtacctgctcaaccacgccgcgagcaacgtcactatgggctacatccacgtcggacccgagcacctgcgaaagcaccaggagacggcgtcgcgctacatcctcgaacaactcggcctcgaatggaccaagggcgaatggccgcctaggctggccacctaa

SEQ ID NO: 504962 - DNA, 255 bp, Stenotrophomonas maltophilia; identical to SEQ ID NO: 498321

SEQ ID NO: 504963 - DNA, 720 bp, Stenotrophomonas maltophilia
atgccctgcaggtcagtttggctcgatcggccagcggcggaccttctcatgcacgggcaccggttcgtgggacgcttggacgcaaaccaacaccacctgcgcggcttgcccagcacctttcccacaagccgaaacccagtgggtcgccgcgagtgccgcttgcccggcaggccaaagtggatcgcacacgtggcaggccgagcagcggcggaccaggatggggtcttacaactgcccggccaccacgtggtcgctgcccagcccgacgttcaccacttggacaaattgggcggagacgggggttcgtcgcaacgaggccaatacatgcacacccaacgcaccacccccgacgtttcccgaatacaccgggcgatcttggcattcgtggggagacggagggcactacggctgggcgatcttctgcaacgctccccggaccctggccgagcttcaagccacctcgttggcatgcacctggcaatacgaaacgaacgacacccccacgtttacgccagagccacctggcgtgacccgcccaacaccggctttggaagcctgtgtctacgcgctgcgcgccaacttaactccgatgccaggttacggcttcgtcaaccacccaggcaccgcggtttggccggcggcttgctcgtgcagcgtcgtgggtccaggcgcgcggttctactggcaagacctgggagcgagcgactgggtgggctttga

SEQ ID NO: 504964 - DNA, 1992 bp, Stenotrophomonas maltophilia
atgcacagacttattccaacagcagccatcatcgctgtactcacacctacggcttgcgcccagccaaccccggggcccacgcgggatgctccgacgtccgggcctgtccttatcccgcctgccctcaccacgccagccgatgccaagacccgggacatgctgcttcacgtagagggtgacagctatatgggcaaggcttacatcgtgtccgcatcgacgcaggaggtcagcactgcgcttcgtgcacgagactatttttccagctcattccgccagagggatggcgctcaacctatcctgggggacatggagcgggcgtggatgaaggtctacgggcacttccaccctgagaaaagtgcaatcgtgttcgcgaagaagcttgatgcaatcgatgtagcggccacgttgggggtcatcgcccccgaagagaagtcgcgctggcgtacttacgtagaacagctgtctccatccgatctcgatcccacaggtggctcgttcactgatctgacagtggatcgactgacgttctccagttcccacattgacactgcgcgacgcaggtcaggcgacaagcacgttgttttgatcgacctgacggatatgacaggcgctccttcgcaaacgctgctttggtatgcggaacggcgccaggaacaacgccgtgtcaaatggaaagccttcgcctccattccgggggtcgccggtgtgccctacccgcattgggagaccgagatgatcacggagaaccacgccagccaggaattctcagaccagatgcaggcgctggtatcaacgctcccggcgggccctgaaagatcattggatgtcatctcgaatctgttcaatccaagcgaagagacgccggttcagcgcatcgcccctcgtctgcccatggatggcgcgacgacgatgctgcagtggctcccaatccaggggattcaaccgggcaacaactctggccagattcgttcgctatccagtgaccaattccatgtcacgtcagcctccaacaggtcatacggctacgttgccgcgaagaaggacgggggcgtcgtggcttggcgaatgggtgaaagtcagcggatgatcgagacaaaggtcgaccgaaaggggcggttatgggtcctgatcgcaaccgtgccaagtctgacgcaacagattctcacgtcctgccctgtgcagatcagcgttgatgcgactgggtccatccgaagcaaccgttgtatgcagagcaccatggcgcctcggtggcaactcgatgtagacggcaactcctatctctactcggagtctcacatggcgacggaagagcgcttccctgagcggatcatggacacaggatcaggagaagtcatcgcgatgaaggagctatggaaagacagaaccaacttgagacggcgcgtctttggctacatgcaatcctgctcctcaggtccggcacccgatctgggagacggactcttctggttcacgagttgcggcctggtgggtgttgcacctgcttcaggcgatgtggtcaagagctttccactgaggtccggaagcactggacgcttggtgttagggagcgccgcgggcgactgggttgccgaagaagctcgtgatccaacagaccagagggaagttcttcgcattcatcgtctttccaccggggaagcagcatttgaggttgaacgaaaaactggtactcaggcgctggcacgtacggctcatggcaggctgctcgcgatgacggttacaggcgcttcgccgggccgttacgtcgatgtctggcgcatggattccggcaagcacgtctcgcgcctcgccattccagaaggaatcgcattgaaatcccttgcattcaatcgagcggggacggagctctgggtccatgcacatcaatttgccgacaaggactccggcgtacttatctggacggtgccggaatcattgcaggatggtacagacgacaactggagccctgacgaggccgtagtaaagaaacactag

SEQ ID NO: 504965 - DNA, 834 bp, Stenotrophomonas maltophilia
gtgatccaggaattggggaaggtcgctccgatccggttggtgtgtcagttgatggactatccccgtagcagctactacgcctggctgcaccgggagccccggattgaccgggcgctgctggcccaggttgatctggttcgtcgcattcatcagtcccatcgggggagctgtggctctcgcaagatggccagggagctgaccaactgcggcctacccatggggcgctaccgcgcccggacgctgatgcgccgagccggtgtcagggcgcgacagcaccggcggcacaagtaccacagccttgggccgcaggcactgacggcgcccaacgtgttggaacgccaattcaacccggcggcccccaaccaggtctgggcaggggatatcacctacatcccgacccagcaaggctggctctatctggccatcgtggtggatctgtttgcccgccggatcgtgggctgggctcactctcacgaaggggatgcctggctggccgtcagagccctgcgcggggcgctgaaacagcgtcgtcccaacgggcgactacttttccactcggatcaaggtcggcagtacaccagccatgccatggccgaaatcctgcgtgacaacggcatcacccagagcatgagccggaagggcaactgctgggacaacgcggtggtggaacgggttttcgccaccctcaaaggggaatggctttactccaaataccccactcgacaggaggcggcagcagacatcgagcagttcgtggactggtacaaccaccgtcggctacacagtgccaacggccttgtgccacctgcgctttgtgaagagcaggtggcctga

SEQ ID NO: 504966 - DNA, 294 bp, Stenotrophomonas maltophilia
atggcaaaacagatcactcagggcatgagggatgaggcggttcgccttgtcgttgtggaggggcagacagtcagggacgtctgccagctgatggatgtcggcccgacggcgctgaggcgctggatcgagcaatggcggcgaaagcatgaccctcaggccgaggcaccgccggtggatgcccaggtcagaatcgccgagctggaggcccagaatcgcaggctcaaggaggagcgcgacctgctaaaaaaatccatcgccttcttcattcgggacagcgatcaccggaacaggtga

SEQ ID NO: 504967 - DNA, 1050 bp, Stenotrophomonas maltophilia
gtgggcctgacccgcgaactgccgggccgtaccaatgccttcctggtcgccgaagtgcgcccgcaggtgaacggcatcgtcgccaagcgcctgttcaccgagggcggcatggtcaaggccggcgagccgctgtaccagatcgaggacgccagctaccgcgcccaggccaacagcgcccgcgcccagctggcccgtgccgaagccaccgccaacgctgcccgcctcagcgccaagcgcatcaccgagctggccaaggtcgacgcggtcagccagcaggatctggaaaacgccgtggctgcgcagaagcaggccgaggctgatgtcggtgccgccaaggcgtcgctggatgcggccaacgtcaccctgggctatgcccgcatcgtcgcgccgatcagcggtcgcatcggcaagtccagcgtcacccagggtgcgctggtcagcgccggccaggccaatgcactggccaccgtgcagcagctggacccgatctacgtcgacctgacccagtcctcggccgagctgctgcagctgcgccgcgaactggccgccggccgcctgcaggacaatcagtcgctgccggtcagcatcctgatggaagacggcagcaccttcgagcacaagggcacgctggaattctccgaagtcagcgtcgatccggctaccggcagcttcggcctgcgcgtgaaggtggacaacccggacggcctgctgatgccgggcacctatgtgcgcgcagtgatcggcggcggcgtgcgcagcgatgcagtgctggtgccgatgcagggcatcgcccgcgatccgaagggcgacaccaccgcgatggtggtcggcaaggacaacaaggttgaggtgcgcccggtcaaggtcagccgcacggtcggtgacaagtggctggtcgaggacggtctgaaggccggcgacaaggtcatcgtcgaaggcctgcagaagatcggccccggcatgccggtcaaagccaccgagaagggcgctgctccggccaagccggcggcggccgcccagcctgcggccccggccggcggcgcgaagtaa

SEQ ID NO: 504968 - DNA, 234 bp, Stenotrophomonas maltophilia
atgtcgttggcgtccatgctgccgttctcggacacgaacgcgatgacgttcaggaagcccgagctggacttggccacgttgatgccctgccgctgcacttcctgcggcagcagcggcatggccagctgcaacttgttctgcacctgcacctgggcgatgtccgggttggtgccgctctcgaaggtcagggtaatggtggcctggccgttggacgagctgttggaggagaagtag

SEQ ID NO: 504969 - DNA, 486 bp, Stenotrophomonas maltophilia
atggatggctccactcaagcagtgctagacccgtgttgcggtagccgcatgttttggttcgaccgagccgacgagcgcgccatttacggcgacatccgttccgaggaacacacactgtgcgacggccggcacctggaagttcgcccggaccagggcatggactttcgagccctgccattcccggacgggcgcttcaagctggtcgtgttcgatccgcctcacttgcgcaaagcgggggagcaaagctggatgcgcgccaagtatggctgcctcaaccccagcacttggcgcgaagacctgcgagccgggttcgccgaatgctttcgcgtgctggagccttcgggggtgctggtcttcaagtggaacgaaacccagatcaaggtcagcgaaatcttggcactgacggatgagaggcccctgttcggtcaccccagcggcaagcgtgcagcgacgcactggatctgctttatgaaggggcagcgctga

SEQ ID NO: 504970 - DNA, 417 bp, Stenotrophomonas maltophilia
atgcgcaatctttgtttgtcggccatcgccggtgcgttgctgctctctgcggggtgttccagtcagcccggcactgctccacttgagagcgaaactgcggccacttccgtgatcctgttgggggaggtagacctgcccaagggcgcgaccctggacgatttccccagccttctcaatgccgggggtatcgcttgggagaaggtccaagaaggaagggttcagctcgaaggctccttcgaccgtccttggagcgacggccgttcgttggcagtggccgttgacgttctcggccgaaccacccggttgatcgtgcgggctggcgaccagccacggctttcaccgccggccgtttgtgttcgcggtgttgggagggatgccgtcgcgtcggatatttcggaagcgcatccctgtaagtaa

SEQ ID NO: 504971 - DNA, 249 bp, Stenotrophomonas maltophilia
atgcagccgctcatcctctcgctcgacccctcgctctcgacccacttctccaccctgacaccgcaggtcctcatcgacgccctggccgacgccttgcctcaggccctgacccagctcgccgctgacaccagcacgtcggtcatcgtgcccaaccgcgacatgcgcggccaccaccccgcccgggtgctcaccctgcagctggcaacgctggacagcttcctggacgtggccgacgccgccaacggctaa

SEQ ID NO: 504972 - DNA, 315 bp, Stenotrophomonas maltophilia
atgtctcgctcctgtgggctcgaaaagtgggggtttggcggcgttgccatcggggcgcaggccgtgcgtcgccgcgaatccactgtaggagcgaggggcgagggaggatcggcgccagccacgatgtatgcggcggaaccgacggaacaggagcgcgggtgcattgatttccccgcattggcgcagagcccgtggccgcccagggatcagcgactgccggcgcctgcctccggggcgtgcagcacgcgcagcttcttcttgttgatcttgccgacgctgatcacctggctgttcctgaagcactacttgcgttga

SEQ ID NO: 504973 - DNA, 1185 bp, Stenotrophomonas maltophilia
atggcactctctgatctgaccgtgcggcaagccaaggctgccgaaaaaacctacagcatccccgataccgatggcctcggcttggtggttgcccccactggcggcaagtcctggcacttgcgctactactggctcggtaagcaaaagcgcatctccctcgggaactaccccgagatcggactgcgcgaagcgcgcgccttgcgcgacgaagcccgcacgctcctggccaagggcatcaacccccataccgatcgcaaacagaagcgacacgcggtcaagctggcggccgactacaccttcaaggcggtcttcgatgcgtgggtcgagcatcgccgcaaggaaatcaaggaaggcaggaacagcacgctgtcgcagatcctgcggatcttcaacaaagacgtgctgcccagcctgaagcagatgtcgatctacgacattcgccggccccagcttctgggcgtcctgacgaggatcgaggagcgcaaggcgttcaccactgccgagaaggtccgcacctggctggggcaactgttccgctatgccctcgtcattgtggaggggctggaagccaatcccgcctctgacctggacgtggtggccgagcccaagcccccagtgaaccacaacccctacctgcatcttccgcagcttcccgagttcctgcgcaagctcaggctctacaaccctcgtggttggcagacccagctcggcatccggctgctgttcctgaccggcgtgcgtaccggcgaactgcggctggcgaccccggaccagttcgatctcgaccgtggcctgtggatcatcccgccgcagatcgtcaagcaactccaggacgagatgcgcaaggccggcaagcgcccgcaggacgtgccgccctatatagtgccgctctccgtccaggccatcgagatcgtgcgctacctgttgggtgtgatgaggcaggcccaggtccatctgctcacgcaccgcagcgaactcaaaaagcgcatcagcgagaacaccctcaacgccgctttgaaacgaatgggttacgaggatcaactgaccgggcacggcatccgcggaaccatctcgacggcgctcaacgagatcggctatcccaagatttgggtggacgcgcagctttcgcactctgatccgaacaaggtgagttgggttctaccccgaaatcacggacggttgtaa

SEQ ID NO: 504974 - DNA, 969 bp, Stenotrophomonas maltophilia
atggtctcagggggccaagtgaaatcttcaataccgctcattagggtcaaccagtggctccggtcttgggaaatggcggagtacagcgagcgaaacctgcccaagccggcggatcacttcttcttaggctcggtgccgatctcagaactgcgtaggctggctggcgtcagccgacgtcaagtcgtcgaagatcgaaagcccggtgaggccggatatcagcgcgtacacgaagtcgaaagatcgaagaagatcgcgcgatacatgcaatggggcttcccggtttcttcttcggctggcatcaaagcagacgagcatcgacatctaattcatcctggctggcttccgacggcaattctggtcaacattttggagccggaagctacgcgacgtcgccatggtaaggattacaccttgtcgaaggagaatgcacttcttatcagtgagaaggacggagcctatgaactgctgctccccaacccgagtgcgcaaagcgagcatggcttggagccgctggagatcatcgacggacagcaccggatattcgccgttgatgcgctcggcgagatcgatggtgactacgatgttccggtcgtcttcttcaatggattgaccaactcttggcaggcttatctcttctgggtcatcaacgttgagcctaagaagatcaatccaagcctggcgtttgacctctatccagagttgcgcaatcaatcttggctcgatgaaggcgaaaatctcaaggtctaccgcgagcatcgtgctcaagagttgacggaggcgctctggcgccacaaagacagcgtttggcagcagcgtattgaactgctgggcagcagaattgaagggcatgtttcaaatgcggccttcatccgaacattaatggctaccttcatccggcggtggggaacagatcagcgcattggcggtttgtttggctcgataaagggtagtggcgaagatcgcgtttga

SEQ ID NO: 504975 - DNA, 462 bp, Stenotrophomonas maltophilia
atgtcacaggatctgagcgactcgcaactgaaggatctctggcgtcagggaaaaatcccggtcatcttcaagcgcaataagcccctcccggtcttggcgcgcattccgtttgccgaagggaacatggagtggctgcgggacggccgacgcttgaagcccgattggtgtgcgcagttcaaggcctgggaaattccgactgcgtggttcgacagcgtgatcaaacttgcgctgaggcgacaccaagaggtctacgtgatccagttgtaccgggagcaccagaaatgcgctccggcatgctggaacgctgagggctttcactgcgaatgctcctgcatgggggagaaccacggcggtggtcatccaggcggcaactggtacgaggtttccgaaacctttgccgtgtcctgggggcagcagcgatattcatgccgccatctgaaggtcaagaacctcgggcgctga

SEQ ID NO: 504976 - DNA, 249 bp, Stenotrophomonas maltophilia
atgtccaagaacacaaagcagacgtcctcacgaattggtcggctggcgtcggaaacgctgcaaagcagcagttcgtcgcaagtggccaagagtctggccgcctcggcactgtctcagcgcagcggcgacaaacagaccggtgcccagatggaagacaaggccgcacgcgttttggccagcgaccgatacgccaaagagacgaaagaactggcggcatcggtcctgtcccaagccaacaagcagcgctga

SEQ ID NO: 504977 - DNA, 930 bp, Stenotrophomonas maltophilia
atgctggaggcccgccttgaatgggcccaagacgtggcggcggccctgatggagtacgttgactaccccgatgtcaacttgccatctcgtgattacaccgagccggagcagatcactaacgaggacatcgagaaggctgcctgcgaatgccgggatctgtggcgtctgggccgctcggcgattcaagacttggcactggccgtggaaggcgctggggtcatcctcgttcgggaagaaaccggcgtggcccagattgaagggctgtcggcgtggagcgaggtattgggccgaccgttgattctcctgtccgccgacaaggacaatggttaccgcagtcgcttcgaccttgcccacgaaatcgggcatcttgttttgcatcgtcacattcagcgcacgactgacagcgcacgccacaaactgatggagcaacaggcacaccgcttcgctggtgcatttttgctgcccgccgaaacgttcgccagcgaagttcgtgtgccaccgactctggatgacttgttgctgctgaagcgccgttggggcgtgtcggcagcggcgatcatcatgcggctcaaggcacttgagatgctggatgaagatggtgctctgatgcttttcaagcgtcgctctgctcggtggggtgcgaaatcggaacccggagacgaggatcgtcgaccagagcagccacgcctgcttcgtcgcaccattgatctgttggtcgaagagaaggtcatgcctttggacgccatcccgaggcacatcggactggctgcgggcgacgtggaagcactcgccggtttgcccgaaggctacttccagggcaaaaccaatgtcgtggagtttgcacgactgaaagcaacccagaagccgattgatgaccaaccggcccaaggcaataaggtggtgccattccggcccgtctccaagtcctga

SEQ ID NO: 504978 - DNA, 657 bp, Stenotrophomonas maltophilia
atggcccagccgaaccaagaaacgatccatgacctgctcgtgaggaatatcccgcgtgagcttgtcatgggcctcgaagaagccaagctggtcggcgctcaacgtgcctatgctgcggcccgagggatggatgacgggcacttgcccagcgtggtggggcagttgcgccacttccatatgaacgagtccttccatcgcgctctcgccgttgcagacgcatctccctcaccgctacgcggcaatcagatcgtcacaggccggtctgggatcttcaccttggcacggttcaacaccaagtatggggtctggaacagcgggcggcgtagcgaaacccgaaaacagatgtccctggcgaacgcagccatcgagccactggttcaacccggactcttttcaggctacgtggagccatcccaagcggttgtgttcgtcgtggcctgctttgcaggatcgctgcacagccagccggacacacccgtctccatcgaaatcgcggttccagatcgccacatgcaaggctggcttttccgggaacccattgacgcattcatcaagcgctacgaccagcagccgacagcgggccaggacgatttggctgtgccgaagctgaagaagaacattggcaaacaacaagacaaagacggaacaggatcatga

SEQ ID NO: 504979 - DNA, 606 bp, Stenotrophomonas maltophilia
atgctctccagtacccacaatcaacgcgtcctcgatctggccagccagaaggggctactgcgcgccagcgatctggacgccatcagtgcgcctcgggtcgttctgacgcgcctgaccgctgcgggtctactagagaaggtggggcgtggcctttaccgtctgccggatgcgcaggtttcggaattcgagagccttggcaccatcgccaccaaggcacctcaagcggtgttctgcctgcttacggcgctgcagtttcatgagctgaccacacagctgccgcgtcagatctggatcgccatgcctcggggcagccacccgccccgggtcgactacccgcccgtcaagatggtgcagttcacgggtgatgcctactcggcagggattgaggaagtcgaacgcgacggtgtcaggctccgggtgtacggcgtggccaagaccgtggcggactgcttcaagcaccgcaacaagatcgggctggatgtggcgcttgaggcgctgaaggacgcccgggcgcgcagcaaagcctccgtcgacgacatctggcgtttcgccaagatatgccgcgtggccaatgtgatgcgcccctatctggagagcgttggatga

SEQ ID NO: 504980 - DNA, 864 bp, Stenotrophomonas maltophilia
atgagtactgccaccccaaatgttgcggcgtccgtccgtgcgcgtctgctcaatgtcgccaaggcgcaaggcgtcgatttcaatcaggtgctggtgcgttttgccttggagcgcatcctctatcggctgacccagtcgccgcacgcggaccgttttctgctcaaaggtgcgctgctgttcacgctctggtacgacatgccacaccgggccacacgcgacgccgatctgttgggtttcggtgccagtgatctggagtcagtggcccaagtattccgggacatcgcagctgtaccggtcgacgacggcatcatgttcgacccagcctccgtcacggtcgaggagatccgcaaggaagctggctacggcggcgttcgcgtgatgattgcaggcgatctggccagagcacgctgcaagacccaaatcgatgtcggcttcggcgacgccgtcaccccggcgcctgttgattcggtctacccagtactgctggaggaaatgcccgcgccacggctgcgggcctacccaacgtacaccgtcatcgcggaaaagctccacgccatcgcgttgctgggcatgaccaacagccgcttgaaggactacttcgatctgtctgtgctgttggaacgagaaactctggacactgatctgctggcccaggcgatcaaggccacgttcgaaagacggggcatggcgcttcctgatgcgctgccagtcggcctgacggacgagtttgcgcacgacgcttcgcgccaggcgctgtggctggcatttctcaagaagaacgaacttccgccagaacccttgcccgccatcgttggccgcttgagcgtggcattggcccccgcgttgaacaccgtcgctcgttga

SEQ ID NO: 504981 - DNA, 1566 bp, Stenotrophomonas maltophilia
atgcaggcagaagagttctccattccgggggcggatcagccaccgacatttcgggccgccgagtacgtgcggatgtcgaccgagcaccagcagtactcgacggaaaaccaagccgacaagatccgcgagtacgcggctcggcgcaacatcgagatcgttcgcacctatgccgacgagggcaagagcggcttgcgcatcgatgggcgtcgggcgctgcagcaactgatcaaggacgtcgaggcaggcatcgcggacttccagatcattctcgtctacgacgtcagccgctggggccggttccaggatgccgatgaaagtgcctattacgaatacatttgccgccgcgccggaatccaggtcgcttactgcgcagagcagttcgaaaacgacggctcgcctgtgtcgaccatcgtcaagggcgtcaagcgtgcgatggctggcgaatacagccgcgagttgtcggcaaaggtattcgccgggcagtgccgcctgattgagttgggtttccgccagggtggcccggctggctatgggctgcgacgcgtgctgatcgatcagtccggcacgctcaaaggtgaattggctcgtggcgagcacaagagcctgcaaaccgaccgcgtcattcttcagccggggccggatgatgaggttgccgtggtcaaccagatctaccgctggtttgtcactgacaacctgacggagctggacatcgccgaacggctgaacgcacaaggaacgcgtactgaccttgggcgggattggacgcgagcgaccgtccgcgaggtactgtccaacgagaaatacatcggcagcaacatctacaaccgtcggtctttcaagctcaagaagctccgggtggttaacagccccgacatgtggatcaaaaaagaaggtgcgttcgagggcatcgtgccaccggagcttttctacacggcgcaggggatcatgcgcgcaagggcgcatcgctacagtgacgaggagttgatcgagaagctgcgcaatctgtaccagcgccacgggtacctgtccggcctgatcatcgatgaggcagatggcatgccgtctgcggcagcctatgcacatcgattcggcagtttggttcgcgcctaccaggcggtgggcttcaccccggaccgcgactaccagtatctggaggtgaatcagtttctgcgcagactgcatccagagatcgtcagccaaaccgaacgcatgattgccgaggtcggcggcaacgtcgaacgtgacccggccaccgaccttctcaccgtcaatcgcgagttcaccgtttcactggtgctggcgcggtgccaattgctcgacaacgggcgacggcgctggaaggtgcgcttcgacaccagccttgcgcccgacatcacggtggccgtgcggctggacgacagcaaccaggctgccctggactactacctgctgccgcgactggacttcggtcaggcacgtatccatttggccgaccacaacggcatcgagtttgagtgctatcgcttcgacagtctggactacctctacggcatggcgcggcgcatccgcatacggagggccgcatga

SEQ ID NO: 504982 - DNA, 912 bp, Stenotrophomonas maltophilia
atgagtcaagacaaagagcatcggcattcggagttgcggatgattccgctcaaccggattgaggttctcaacccccgcgagcgcaacagccgggtcttcgagcagatcgtcggcaacatccagaacattggcctgaaaaagcccatcatcgtgacacctcgtccagggagcaatggcgagcactatctcctcatctgcggcgaggggcggttcaaagccttcaagacgctcgggcatcaagagatcccggcaatggtgatgaacgtcgatgacgaatcggccttcatcatgagcctcaccgagaacatcgcccggcgaaagttcagcccgttggaattgctgtccggcatcgagcagctgcgggatcagggctacgacaaaaaatccattgcccaaaagacaggcctgagtccggagtacgtgcagggcatcctgcagttgctgcagaacggtgaacagcgactgctgatggccgtcggcagcgggcgcatccccctcaatgcggcgatcaccatcgcaggcgcgggcagcgacgagaaagccattcaagccgcattgcaagatgcctacgaaaccggaaaactgcgtggcagccagttgatccaagcccgtcgtgtgatcgaacgtcgccgcacccaaggcaaatccatcggcggcaggatgacctcccgcaagaccaatgaggatgtcaccacgtccagcctggtgcggaactaccagcgggaagtcgagcgacagaagctactggtcaggaaggcggagacagctcaacgcaatttgctgttcattgtcggggccctgcgccaactgctgtccgacgagaatttcaccaccctgctgcgcgcggaggggctggacacactgccacagtatctggcggagcgggtctgggctcgagggagcggcgcatga

SEQ ID NO: 504983 - DNA, 879 bp, Stenotrophomonas maltophilia
atgagcaaaccgcccctgggcttcgtgccggaaccattgattttgtccctctcgtccgtcctgccttcgcgcaagacgccagaaggcttgcttgcctcacggaaattcaagcagatcaccgcatctatcgaggcggtcgggctgatcgaacccctgtcggtgggaaaacccaaccgcgaggggcagcacatcttgctggacgggcacacacgattggtcgcgctgaaacagttgggcttcgataaggctccctgcctggtggccaccgatgacgaaagctatacctacaacaaccggatcaatcgcctctccagtattcaggagcacctcatgatccgtcgcgctgtcgaacgtggtgtcaccccggaaaagctggcgaaggccttggacgtggacatcagccacatcatcaagaagctaaacctactggaggggatctgcccggaggccgccgagttgctgcgcgaccagacgttttcggcaaaccttggtgctgtcctgcgtaaactcaagccgacgcgtcaggttgagtgcgtcgaactgatggtcagtgccaacaacatcacggtcgcctatgcccaggccttggttgcggcgacacccagcaacttgctcgtcggcgaggccaagcccaagaagatgaccggtgtcagcgccgaccagatggccaagatggagagggagatgggcaacctccaagagcagttcaagctcgccgagcaaacctacggtcaggacatcctcaacttggtgctggccaagggctatctcgccaagttgatggcgaacgaagccatcttgcgtcacctgaccaggaaccaccccgacgtgctgaacgagttcgacagcatcgtccgtatggtggcgctggacaaataa

SEQ ID NO: 504984 - DNA, 1446 bp, Stenotrophomonas maltophilia
atggagtcactgcgcgaaaccaatgaaatgtcccaactaaacacagaagcgatgcgagagagcattggtattcagttagtgggcagaaatatctcgaacacaaaaccagaacgtgttgtagctcaagtgcataaaaacctaacaaaaatcctggagccgctggatgcgctctatccgattgagcaacgcttcgatcttgggccctatgtgcattggcgaggcaacgcgtcatcacccatgcatcgttggttgagatatcgagaagcatattcgccagagcttattgataagctgcagttgggcagtcgaattctcgaccctttcagtggttgtggttctattcctattggcgccgctataagagggaaaaagtcggtaggtatcgatttaaatccgattgccgcgttctcgtcaaaggttaagctgacgccactgaagccgtcttctatacgcaaaattaagagtttccttgaaagtttgccctccctccttaggagcagtgaacaatggccactccccgaactgagcatatcgaagaaagtatttgagccacagatgcttgatgctgttttgcgcgccagaacagctattgaaatatcatttaaaaccgaccctcttgcacgaaactttgtattccttgcctggctggccatcctagaaggggtcggcagctacttcaaagagggtaacgggataaagtatcgtaacaagaagcgacaaaagggtaagtacgaaaatcgcgccgacggcgaatggcaactggaaagattcggggcggaccaaacagcttttttctccaaaacctttacgcaccagctggagatgatgctggaagacactgttgaatggcagtctggagattggacgggacagcagctgatagagggcagtgcattcaatcttggcgaaatgctcaagggggagactttcgattcggttatcttcagtcccccatatgcgaatcgttttgactactttgagtcattcaaggttgagctatggtttggcaactttgttaactcctatgcagatcttaattcgcttagaaaagcatccttaagatcgcatctaaacgcggactataaaaggccttcagagaacttgcctgttctcgaggaattaatttcgttgatggatacctccgcgagtagttggcgaatgggtgtgccagacctcatgcggggctattttcacgatatgggcatggtacttcgtcagtgccgaagtgttcttccggccggtaagtgttatgtagttgttggaaattcggcctttgcaggcgtgattgttcctactgacgttctcacagccatggtcggtataaacgcaggctttaaaaaagcaagaatcattgaaaccaggcatttgaccgtcgcgccacagcagcgaaatatgctgaagggtttcgaaaaatacatgcgcgaatcgatagtggtacttgaatga

SEQ ID NO: 504985 - DNA, 1395 bp, Stenotrophomonas maltophilia
atgcccgtcgagccacctagaactgggcggtcaagaggcgttgctactcgaaaagaagggcaagagagtcacgatgtaatccgtgaagtggaagagtttcccaagcacactgaaatcagtcatggggagctactgagcctaactttgtcgactaagacatctgggctgacgcatggccttcaccgcttcccagccaaatacatcccgcaggttcctcaatgggcgattcgcaatttcgcaggagataaaagtgttgtttgggacccatttatgggctcaggcactagcttggtcgaagcgttgtgcgccgttaaacaaagttacggaaccgacattgatcctctggcccgcttgatttcgagcgctaaaactacccccttagacccgtcacgactggctactctatctgagaaattagattcttcatgcctgccgccattggaagattgctttcttccaatggcaggagttaagaatgtgactcactggttttcagagaaaacttggatagacctctgtcgaattttctctgccatcgaaaatcttgactgcaagccaagtgagagaacgtttttctttgttgtctttagttcaattctgcgttgggtgtcaaacgccgatgaccaaactcaaaagacctatgtgtcggggactctgaaaaaaagccccccagaggtgtttcccacattcgataaagccctacagaaagccctactcagtgtttccagcttggaatctgcgcggcaggggcgacaggccacaattcttgagggaaatgcattgtcggttcctcttaaggacgcgtcggttgaccttattgtcactagtccaccgtacctcgattcggtggactacatgtacaactttatgcttgagtatttttggctaggtccccaaattggtgtggctagccgagctgaatacaacagtcgccgtagaacgccaatcggagcgaagaatcctgtaactccagcacattccgtacatgaagccttgctggatttggttgatccacagcagattcccgagtatcgaagaggtgccgccttgagctacttcgatctgatgcaaaagcactttgccgaagctgctcgagtaatgaaggatggtgccaggtatgttttggtagttgggaatagtcaggcatccacaggggtgctaccagttcatgattgcctactccgacttgcaaaaacagcaggacttcaccttgagaaggcgtttgcgtatcgaattcgtcgccattacatgaagttcccacgaaaagggcgtggcggaattattttgatggactgggttattactcttaaaaaaactgatactgcgcttatggaagttgaggaccggcttccacttccgcaagtaacgataggagcagatgaggtggcaaattga

SEQ ID NO: 504986 - DNA, 1197 bp, Stenotrophomonas maltophilia
ttgacgagtgctttcccccgcgcatcaagggcgcatgacttttggcgtgtcaatagctacggttatccctgcttcttcagcgacagtgagaagtcacaggaagcttggacgaccttgctctcattttttgattttaccgactacgacgaattgaagtctcactggtcgtcgccgggagctcctcgccagttaagctcacatgcagttgaaagttggaaagcaacgtttgaagaattcggtattctttacgtagagtcgcgttcgaaccgcataaccatcaccccggcaggcatacagcttcgcgaagccgccgaaagagatgaccgcaacgaattcgcctggatcgggctaaatcttttgttgcgctacccattacgaggcccccgccgtcctaaaagcgaagcacacagagagtccgacctgcttctatacagattttggtatgcggcgctactcgatctggatggctatgtgtggtggactgagttagaacgaattctgtgccgagtgtttcttacaaacgaagcaatagatgcgattgaggatgtccggagcttgaggttgcatccagaacttattgcccacgttaatttgcctgcggcacaaaggcaaggtgctttttataactcacttaatcaagttgctgttcacgccggaatgaatcacttgctacttggtggtgaggacattgaatgtccatatggtgtaaccgaacctaagaggcggcatttcattcggcgggattggatgggaatgatcagaaaggcgctatccaacagtgggcaatccgatcagtgttcgaccggtgggcttgcaatcgctcgcctgcctgcagcacctcgtttttctgatgagcgggagtatttcgactaccttggtgcgcgtgtcacaccgatggcgacactagtaacatccaccctttcaagcgtggagcttcagggtgagcgagtgctacttttgtcttcgggagaaaactatcaggtcctcgatgaacaccacattgtgggctctgttgcatcactctgccaactcgcacgtggacagcggattattctgagtcatgacgagcaatggacacatctggttgagggcaaggagctggtagatgcccacgttgtaagaataaggattcgtcgagcacggcccatatcaaatatccaagcaatccgcacacttctcgggggtaataatgtctga

SEQ ID NO: 504987 - DNA, 1242 bp, Stenotrophomonas maltophilia
atgtctgatatcaatgaaagcgagctagttgatagcggcgcaattcctccgactgattttcacgaatcaatcgaacgcttgcgtgagattgctcaatatgaccttgaatttcctgatgattttgataatcgcctagcggaggccacatctcagttggtcgtaccggaggacgtcctccgagcagcggctgctgcaatacgcgttggacatattgtgttgcaggggccaccaggcacaggaaagagttcccttgtacgtgccctagctaaagcattcaacgcatcgactttcgcagtgactgcacatgaggattggacgatctacgatgtcattggtcgacttgagttgcggctaaccgaagaccgcaaggaagaaattaccccggtcaacggcgcactaaccgaggcagtgattcgatgtggaaataatgttgttcagcattttgatgaccccagccatccgcaggcggagtggctattgattgatgaattaaatcgcgctcatcttgataaggcattcggcgagcttttctctgtgctaggtacggatgatctggtaccaattaatctcccccatcaaaaagatgggaacagggaattggtcataccaaagagatttcgaataattgcaacacttaattcatatgacaagcaatttgttcaaagtctgagccaagctattcgacgtcgatttacatttatttctcttgacgtgccacccaagaaaccttcgagtgagacgtggcgttttgatccaggccacgcatctcccgcgatcaaagaattttcgtatgtcattcaaagagctgcgcaacgcatcgctcgtcgtgaatgttcaatgaatccggagcgagcagctgcaaccactgatctcattttgcaagaggcgaaaaactcccaccttgagcgtattgcagctttgttcggggttgtcgaatctgttagatatgctccggatggtggaggagttccacaccttccgattggaacagctcagttaattgatactgtagaaatttttttgacaagacatcgacaagatggggacgtcgatgcaactgctgatctgaatctcgactgggcagcatcagtcaagttggcgccgctgttcgaatccgacgttctggagcccgatcaactagtcaagtttgcgagcgcactaccacagccgttttcaaatcaatttgcgcgccaattgctcattattgcagcatcgggaatgcactttgtcccagaacaatga

SEQ ID NO: 504988 - DNA, 1311 bp, Stenotrophomonas maltophilia
ttgtcccagaacaatgacaatcagcttgggaagcgtttccttaaggaggcgcttcctcttatatcgacgtacttctctggagagagcgtagggcttgcaggagcatctgcgtctattggccaggaggctgacgaagaaagtatcgaatttggtcagcacattcgattcaggcacgccattgcatgttgtgccgagctatttccaatagttcaaagaatagagagtggattgtcaagcgtaacagacaccactcggacagagactaggggggtgatacgcggtcgactcgatataccccgatacgttgccaggagatctgcgtctttttcttggccgaagagctatcctatcctagtaactacggagaacgcatcgacgccagaaaatgagctggtagtgcgagtttttagggtattgcttcaacgtcttcccatatcgcagtttccgccgaactccgccgagaccatacttgggcggaggtataagagctggatccttggccgaatgaagcgtgatccatggagtgtgatttcctgtacctcatccttgcctaggctgtatatggaggcatgtcgtcgaattgcacgaagacagacaggtaacgaacaggcttatgcagccttagtagctttggtaagggattggcacttaattggtgaggaattttccgggtcaccatcttcggagaagttcgtcaactcgcttctatcctttccggctgatcaatcgtttcttgatcggatctacgaaatctggtgcattcgttcagtcgcgcaggcattcatcaagcttggtgggaaattgatagatggcccatgcaagatgacggatagcagacgaaagccaatttacacgtttgacttttcatcaacgcgcattgaaatttggttccaatgctccttgcccagcgatgatgcgaattggttttatgaatccaccggaagctctctgcgaggtataccggatataacagtagttgcagataggactcatcgaatcataatcgatgcaaaaaacaggatggtagttggggcaacgcggtcagaggaaacatacaaaatgcttgggtattttgaaaactttcaaaaaaccctcgtcggcgaaacgaattggggcgttcttgcctttgtttcccagaacggattctcaagaactatcaagtcgcctgatggacgtttgcttgaattaatcagcgcacaccctacagcattcgcggaatgtaattttcatgaagacatactaaaaatcgttggcgcgtggatgggcaggattgatggcaaattgcttggatcaagcaattcgcaaaattaa

SEQ ID NO: 504989 - DNA, 351 bp, Stenotrophomonas maltophilia
gtggtggccggtgacctcacggttgcgtgggcccaccgcgaccgcacgcagcagaccgcctatctcgtgcagcaagacgagggcgacatcgggccggaactgggcgtgacctacacgctgcgtatccgcaatcgcaatggcgtgctggcgcacaccgaaacgggactgctcggtaccacctttatctggacggcagcagtggccgcgctggatgccggtgcgctgggcgaccgcatcacagtcgaaatcagtgccgaacgcgatggtttgagcagctggcagccgcaggtgcgggtcatggatcgcgcgggctacggcctgcgctggggacagtattggggaggtgtgtga

SEQ ID NO: 504990 - DNA, 216 bp, Stenotrophomonas maltophilia
atgaccactcagaccgtcatcaccatcgatcacgtgcgcgccgtgggcctgtgcgtgaacggcacgcgtacatggtttgcgcgtcacgacctggatttccgcgccttcctgcgggatggctgtgacgccgaaaccttgctggccaccggcgatgcaatggcaaaacgtgtggtcgaacacgcccgcaatcaatccagccagcgggagcaaggctga

SEQ ID NO: 504991 - DNA, 3387 bp, Stenotrophomonas maltophilia
atggcgaacaaccgtgcccagatcctcatcaccgccgttgatcagacgcgccgggccttccagtcgatcaatggcagtctgacgcaactgcgcgaccaggccggtcaggtcggtgccgtcctgtctcgtattggtggagccatcggcatcgggctgggtgtgcgcgagctggtggcggtcgcagatcagtacaagaacctgcaggcccgcctcaagctcgccgtcacctcacaagaggagttcaatcgcgccgacgcggccctctttgacattgcccagcgcaaccgtgcgccactggcggaaaccatcacgctttatgcgcggctggcaccatcggtgcaggcactggggcgttcgcaggcggacgtgctggcggccaccgatgccatcgggcaggcggtgtcgctctccggtgcatccagcgaggcggcagcaggcgcactgatgcagctcgggcaggccttcgcctcggggcaactgcgcggtgaggaattcaattccgtcgtcgagcagacgccgcgactggcgcaagccatcgccgacggaatgggcgtgccgctgggctcgctgcgggcactggcgcaggaaggcaagatcacctcggcggcggtgctcgatgctttgctcaatcagcgcgaacgcctcgccgaggaatacgcgagcctgcccgataccgtcgcgggagcgttcactcgcctgaaaaacgccttccagcgcgcattcggcgagcgcgatgccagttccggcctgacggcaggactggcgcaagccatccagctcgtcgccaagcatctggagctgctgatccatctggcgggcgtcgtgctggtcgccgcctttggccggatggcaggtgccttcgccaccagcatcgccgctgcgcgtgccgaagcagcagcgcgactggccaacctgcgcaccctccaagccgaggcgctggcacgggtacgcgtggccgatgccgccttggcgcaggcgcgcgcgcaaggcctcgccaccagcgcgctggtcgctgacgcggcgaaggctcggctgcaagcgaccgccgccagtagcgccgtgacgcaggctgttgcgtccaccacgctgctggggcgggcggcagggttgttgcgcggggcgctggcactgctgggcggccccatcggcctcatcgtcaccacggtgacgctgctggcaggtgcgctctattcggcacgcaacgccgtggtcgagttcggcggcaagagcgcgtcgatcaagcagatcgccgtcgccatctgggaactggtggtcgagaaagttcttgcggtcgtcgacgcccttgggcaactggtcggtgtcaacgatctctcctgggctcgcgtgcgcgaggtgatggtcagcgcgctcaccaccatcggcacggcgatccgcgcgatggtcaatggcgtcatcggcgcgttcaacgcggtcggcagtgtcgtgggcatcacggcggccttcttcgtcgagcgcttccgcaatgctttctccgacatcggggcactggcacaggccttgggccaggacgtagccgctgctttcagtggtgatttctccatgtcatcgctacgcaccgtcctcggtcgccgacttgaggagatgcatgactttggcgaggcgctcgcagacaccgtgcgcgatgcggtgacgcgcgactacgtcggggaagccgctcaggccatcgctggccgcatccgagccgaacaagcgcagccgggcgtcttcggtcgcgcacaaccgccgacgccacccgctcccggcaagggtgtgcaggccgacaaactggccctggtacgggcgcaggccgaggcggaattcaagctcctcaaggacgcattggagcgtcaatcgcgggtgctggatgccgcgctcgaagatcggttgatttcgctgaaggattactacgccgccaagacgcggattgagcagcaggagattgacgcggaaatccgccgcgtgcaggcatcgctcgcggaacagcaacggctggtcaatacgggcaaggacgaatccgcccgcctcaaggcgaaggccgaggtcgccaaggcggaagccgagctgatcgtgctcaacaatcggcgcgccgacatcgagcaggccaatgctcgcgcggcggcgcaggccgaacgcgaactggctgatgccttggcgcaagcacgtgaagaactggcgcagatcaccggcaccgccaccgatgccgaccggcaggcggcgattgcccgcagttaccgcgatctgcgcgcccgccttgccgctgaaagcgatgccgacggcgtgtcgctggtggatcggctgatcgacgtcaaagccgcgcaagccaatctggcggcgctcgaagcccagtggcagcaagtcaccgaacgcctgcgcaatgcacaggaagccattggcatccagcagcaggcgggattgctgaccgaagcgcaggcgcgccagcagatcgtcgccttgcagcagcaatcggccagtgagatggaacgtctgctgccgaccatgcagcaggccgcgcaggccatcggcccggacgcggtgatccgcgtacaggcgtggcgcaacgaactggagcgaacccggctcaccgtcgatgaactggctccgctgtggaaccgcatcggcgagagtttcggcagcgcattgaacggaatgatcaccggcgcgcaaacctggcgcagtgccttggcgagcattttccagcaggtggccgacgccttcctgcagcagatcgtgatccagcctttccagcaatggatggcgatgcaggtgcggatgctggcgatgaagctgggtttcatccagcaggaacaaaccgccgacgtggccgccagcgccgccaaggttgcccagaaaaccaccgagaccactgccgtggtgtcgatggatgccgccaaggccggtgccggtgcggccgcgtcgcaggcgtccattcccgtcgtcggcccggggctggccattgccgcaatggtggcgatggtcgctgcggtgatggcgctgttgggcgggatcaagaagttcgcgggcggtggtctggtgtccggccccggcagcgccacctcggattcgattccggcgcggctgtcggcaggcgaatacgtggtgcgggcggccgccgtgcgccaggtcggtgtggccttcctcgattcgctcaacggcttgtcggcaggcccacgtttcaagggtggcgaattggccttcgcagcgggcgggctggtaccggaggtgaaagtgccgcccgcgcagccgcagatgaatcaggcggtgcgcatcgtcaacgcggtcgacccgggcgtgacccacgaccacctgcagtcgcctgccggagagaaagtcatcgtcaacatcatcgggcgcaatgcacgggctatccgtgcggcgctgcaaggctga

SEQ ID NO: 504992 - DNA, 648 bp, Stenotrophomonas maltophilia
atgaagattgatctggttgccgagggcctgctggatcggcggcgcttcaacgtttggcaagccgatacccacaaggccatccacgctgctgttgcccgtgcaatgcgcgacagcggcaaagacatggccacacaggtgcgcggagagatgcgcgccagcttccgcgccgccagccccaagttcctgcgctcgatgcacgccaaggtgttcgaccgcaaagccaatgcgtttccggccctttacctcggctcgaaggtgccgtggctggggcttcatgagcgtggcggaacgattcagggatggatgctgatcccgctgttgccgcaacaccagcgcatcgggcgcaaggccttcgcccgggtcatcaatgcgctgatgcgatccggcaacgcgtggtttatcgagaaaaacggccagaagattttgatggccgagaacatcagcgaaaacgcccgctcgctggcccggtttcggcgtgccgagcgcgagcgcagtggcacaaagcgccttcggcgtggccaggagattcccgttgccgtgctggtgcagcgcgtgaacctgaaaaaacgcttcgacctcaaccgtgcggtgcgggtcgagcttccccgcctgacggcggccatccgcaaggcaatgtccaaggtttga

SEQ ID NO: 504993 - DNA, 414 bp, Stenotrophomonas maltophilia
atggatgacttcaaaacctttccactggcaccggtggtcgtgacgctctccggtaccgcgctggagttgacgccgatccggctgggcgaattgccacggctgctggccgtggtgcgcccgctggccgaagacatcggcaccgacccggactggatggcgctgctgggtcggcacggtgacgccgtgctcgatttgctggccatcaccacccggcgcgaacgcgcatgggtcaacgacctgtcgttggaggatgcggtgcaactggtcgctgccgtgttcgaggtgaatgcggattttttcgtggcgcaggtcgtgccgagcattcagggcgcagccgagcgactcgcgccgacgctgcgcacactgacgaacgcggttggcagtcctcctgggatagcgccgtcgcccgcctga

SEQ ID NO: 504994 - DNA, 198 bp, Stenotrophomonas maltophilia
atgcacatcgaactgctcaaaccccacacccacgcaggccagcgccgcgacatgggcgaacgcctcgaccttgctgatgccagagcccgctggctgatcgcgcagggcgtggccaaggcgacaacgcccgccaccgacctcaaacccagccgccgtgaggccacgtccggcagcgcccatatttctcaaggagactga

SEQ ID NO: 504995 - DNA, 378 bp, Stenotrophomonas maltophilia
atgaccgccattgcacaaccgcagacgctgggcgacctgctcaagtacgaagcgccgaatctctactcgcgcgaaaccgataccgtggccgccgggcaaaagctcgcgctgggcaccgtgctcgggcgcgataccaccagcagcaaactcaaagccttcgatccggatgccaccgacggcagcgaaatcgccatcggcatcctggtgggcgatgtggacgccacgctgatcgaccgcgacgacgcactggtgatcgcgcgccacgccatcgtcgcgcgcggcgcactggtctggccgaccggcatcaccactgcgcagaaggccgccgccatcgcccagctcaccttcttgggcgtgctggtgcgcgacagcgcctga

SEQ ID NO: 504996 - DNA, 1335 bp, Stenotrophomonas maltophilia
atgcccctcatccatctggcgtcccgcatcatcgggacgccgctgctcattgcgcgcccgaaactcgacgtgatcctctccgtgctgggttcacgcatcggcttgcccgaccgggacatggcctttcccatcccagaacccaagcaggcgcgggcgtttgcgcagtcgggcatcgccgtcattccggtgttcggcactttggtcaaacgctcgctgggcctcgatgccgcttcgggcctgatggcctacgacgaactggaatcccggctggagactgcgctggccgatccgcaggtggcgggcatcctgctcgatctggattctcccggcggcgaagcgggcggcgtgttcgagttggccgagcgcatccgcgccgccagccggatcaagccgatctgggcacacgccaacgatgccgcgtactcggccgcctacgccattgccgctgcctgccagcgtttgacgctgtcgcaaaccgccggtgtgggctccgtcggcgtgatcgcgctgcacgtcgatcaggccgtcaaggatgccaaggacgggctgcactacaccgctgtttttgccggtggccacaagaacgatctctcgccgcacgaacccttgagcccgcaggcggcgggtacgctgcaaagcgaagtcgaccggctctacggaatcttcacgacgcaggttgcccagatgcgccaactggatgtggatgccgtgcgcgccaccgaagctgccgtgtacttcggcgagaacgcagtggccgcagggctggccgacgcggtgctgcccttcgatcaggtgctggccgaatttgccgaggcgttggccgcccagcgtccgcagaccacgccacaagcccggtcgtctgccttgccgcgcgcttcgccccccacgcttcaccacgcccctcgacccacctctttcaccttggagaacaccatgaccgaacacccggacgaacacgccgccctcgacgatcttcacgatccgcacgaaccacacgatccgaccgaccccgcccagcaaaccgatccgccgcaagacgaaggcgatccgcaaccgacacctgtcgccagcgccgcactggcgcagtctttcgccagtgggcgtggtcaggcgcaggccattgccgagatgtgcctgatcgcgggccagtcgcaacgcacggcggaattcctcgccgccgggttttccgaagcgcaagtgcgtcgggccttgctcgatgcccgtgctgaccagcccgaaatcgcctcgcgcatcaccgccgatgccagcaccagccagcgcccggaaaacagtcccgtggtcgctgccgtcaagaaactcaccgccaaggagtaa

SEQ ID NO: 504997 - DNA, 1509 bp, Stenotrophomonas maltophilia
atgcaatggtttgaccgtatgcgcagacgtgtcggcatcagcctgctgggtggcacgccgttctacgacggcatcggcggtggccgccgtgcgctggcgtggcaggtcggcaaccccggtgcggtcgcggcgctggcctatacccagaacgaactgcgcgccaagagccgtgatctggtgcggcgcaatgcgtgggcagcagcaggcgtcgaggccttcgtctcgaacgccattggtaccggcatcaagccgcagtcgatggtggcggacaacacgctgcgcgaagccatccacagcctgtggtgggactggtgcgcggacgccgatgccgccggactgactgatttctacggcctgcaggcgctggcctgtcgcgccatgctcgaaggcggcgagtgtctggtgcggctgcgctaccgccgtcccgaggatggtttggcggtcggcctgcaattgcagttgctcgaacccgaacacctaccggccacgctgaacagcgaacggcccggcggcaacgtcatccgcgcgggcatcgagttcgacaagatcggtcgacgcgtggcctaccacctgtacaacgcgcacccgggcgacggttcgctggccccgatgtccggcaacggtggagtcggcagcagcatcgacacggtgcgcgtgcctgccgccgaaatcgtccatctgttccggcccctgcgtcccggccagatccggggcgaaccgtggctggcccgggcgctggtcaagctcaacgaacttgaccagtacgacgatgccgagctggtgcgcaagaagacggcggcgatgttcgcgggcttcatcacgcgcctctcacctgaagacaacctgatgggcgaagggctaccggatgccaatggcgcggcgatggccggactcgaacccggcacgatgcaaattctggagcccggcgaagacgtgaagttcagccagcctgccgatgtgggcgcgagttacgccgagttcctgcgtatgcagtttagggcggtggccgccgcgatgggtatcacctacgagatgctgaccggcgatctgacgcaggtgaactactcgtcgatccgcgccgggttgctggagtttcgccgccgctgcgaggccatccagcacaacgtgatcgtccatcaactgtgccgcccgatttggcgcgcgtggatggagcaggcagcactggaaggcgcattgccgctgaccggattcagtcaaaaacggcgcgactacttggccgccaaatggattccgcaaggttggcagtgggtcgatccgaagaaggaattcgacgcgatgctgaccgccattcgtgccggactgttgtcgcgctcggaagccatctcggccttcggctacgacgccgaggacatcgaccgcgagatcgccttggataaccagcgtgccgacgaactgggtctggtcttcgattccgacccgcgccacgacaagccgccttttgctgccgtagccccggtgccgccgcagcctgacctacaggacaactga

SEQ ID NO: 504998 - DNA, 393 bp, Stenotrophomonas maltophilia
atgagcctcgcatcgcgcatcacggcgctggccagccgcatcggcctggaggtcaagaccaagatcgatgccacccatcccggcttggcccgggcatgggtgtgcttcggctacgtcggcagccagatcgtcgtgcgctcctcgcacaacgtggccagcgtcacccgccttggcaccgggcgctaccgcgtgaccttcgtcaatgcgatggccgatgccgattactgctgggtggcttccgtggtcaagaactcaaccattctgggtttgcagcgtgtggccctggtgcgagccagtggtgacaccaaaaccgcgcagcaactcgatgtcagctgtgcgtcctccacgttggcgaccgacgccgacgaaatcaacctcacggtgtaccgctga

SEQ ID NO: 504999 - DNA, 567 bp, Stenotrophomonas maltophilia
atgggactctcgattcgcgcctacgcgcgccaccgtggcgtgtcgcacgtggccgtgaagaaggccatcgacaccgggcggatcaccgcactgccagacggcacgcttgatccggatgcggcggacgcgcagtgggcacaaaacacattgcagccacgccgggccgctgcgcaggagcaggccagcagtccgaaaccccggcgcgcgcccgcgactgccgatgcaacgccgcaacgtgaggcacccgaaccgggtacgccgccgttgtcagcgggcggcacatcgctgcttcaagcgcgcacagtcaacgaagtgctcaaggcccagctcaacaaggtggagctggcgcaccgcaagaaggaactggtggatcgggcgcaggccgtggcacacgttttcaagctggcgcgcatcgagcgcgatgcgtggctcaactggcccgcgcgcatctccgggcagatggcctctgcgctcggcgtcgatgcgcaccagatgcacgtcgcgctggaggccgccgtgcgtgagcacctgattgaactgggcgaactgcgccccagagtcgattga

SEQ ID NO: 505000 - DNA, 207 bp, Stenotrophomonas maltophilia
atgagccagatcgacaccatcctcaccctgatcgcccagaagcatctgggcctcgacaccctggaaacccgccacgccgacagcctggacttccacgacacggccgtctggtgcatccgggacgcgctggaagcggccttcaaggcgggcatcgaggtcggcatttctttgcccgagcccacggaagcagagatcgccaaggactga

SEQ ID NO: 505001 - DNA, 603 bp, Stenotrophomonas maltophilia
atgaccaccacccaactcaccccggcccagcacgccatcctcgccaaagccatcaacaccagcggcggtaagatcgaatggttccccgacaacatcaaaggcggcgcgcgcaagaaggtgctcgacggcctgttcaatcgcgccctgatcacgcccgatggtgagggctggtgcgtcgccgccgagggctacgacgccttgggcatgaagcgcccgcacatcaacccctcgacattcgaggccaagctcgacgcgatcattgccaacgccgaagcggcgcaggacgcgcccgacgccaccgcagcaccgcagaccaccgacgccgagttggaggccgacgtggccgcgtgtgaggccgtgtgggccaagaacgccgcaacggcacaggccaaaccgcgcacccgcgacaacagcaagcaggccgaagtgatccggatgctgcaacgccccgagggcgcaaccatcggccagatctgcaccgccaccggctggcaggcgcacacggtgcgcggcaccttcgccggagccttcaagaaaaaactcggcctgaccatcacgtcggacaagccccagggcggcgaacgggtctaccgcatcgcctga

SEQ ID NO: 505002 - DNA, 339 bp, Stenotrophomonas maltophilia
atgaaatcccacgccgattacgagatcgaatacgccacccgcagtggccacgatgcactggataacgcccgcgccacgctggagcgcgcactggccgaacttgatcgctacatcacccgatacgaggacgcggaggacatcaaggacaaagccaacgtgctcaactgggcgcttgggcaccttgccacctacgtcccgaacaacgtgcgtctggacatcatcgccaccgcgcaggcagagctgatgcgcgccccgcgccacccaatgaacgccatcaagcaggaggccaggaatagcttggcttcctgcttgaacagcgcgttcatgctggtgtcgtga

SEQ ID NO: 505003 - DNA, 360 bp, Stenotrophomonas maltophilia; identical to SEQ ID NO: 361470

SEQ ID NO: 505004 - DNA, 366 bp, Stenotrophomonas maltophilia; identical to SEQ ID NO: 361471

SEQ ID NO: 505005 - DNA, 225 bp, Stenotrophomonas maltophilia; identical to SEQ ID NO: 361472

SEQ ID NO: 505006 - DNA, 1422 bp, Stenotrophomonas maltophilia
ttgaacacgctcaacgtcgagtaccgcaaggtcgaggcgctgattccctacgcccgcaatccgcgcacgcacgccgaaggccagatcgccaagatcgcggccagcatcgtcgagtacggctggacgaacccgatcctggtcgatggcgacaacggcatcatcgccgggcacgggcgtctggccgctgctcgcaagctggagctggatcaagtgcctgtgatcgaactggcgcacctgagcgtcgcgcagaaacgggcgctggtgatcgccgacaaccggctggcgctcgatgccggttgggacgaggagatgctggcgctggaactggccgacctgtccgaggccgggtacgaccttgcgctgaccggcttcgaggatgccgagatcgaggcactgctcgccggtgatgtgcttgacgccgatcctgataccgaggcggaaccagacgctgacgagccggacgctgcggacgatgtgccggatgcacccgtcgtggcggtgtcccgccccggcgatgtctgggccatcggccagcaccgtctgatctgtggcgatgcgaccgaccgggccgtggtctccgcgctgatgggcggtgataccgcgcggctgtgcttcacctcgccaccctacggcaaccagcgcgactacacctcgggcggcatcaccgattgggatggcctgatgcgcggcgtgttcgagcacctgccgatggcggacgacggccaggcgctggtcaaccttggcctgatccaccgcgacaacgaggtgatcccgtattgggatgcgtggctcggctggatgcgccagcagggctggcggcgcttcgcgtggtacgtctgggatcaggggccggggatgcccggcgactggcagggccgactggctccgagcttcgagttcgtttttcacttcaatcgcgagagccgcaagcccaacaagatcgttccctgcaagcacgccggccaggaatcgcacctgcgcgccgatggctcgtccacggcgatgcgcggcaaggacggagaagtcggcggctggacgcacaagggccagcccacgcaagacacccgaattcccgacagcgtgatccgcgtgatgcgccacaagggcaagatcggtcaggacatcgaccatcctgccgtattcccggtggcgctgccggagttcgtgatcgaggcctacaccgacgcgggcgacctcgtgtttgaacccttcggcggcagcggcacgacgatgctggctgcggaacgcacgggccgcatctgccgcagcatcgagatcgcaccggagtacgtggacgtcgccctcaagcgcttccagcagaaccatcccggtgtgccgatcacgctggtcgccaccggccaatccttcgagcaggtcgtcgccgagcgcaccagcactgttgatgccgaggtggcggcatga

SEQ ID NO: 505007 - DNA, 399 bp, Stenotrophomonas maltophilia; identical to SEQ ID NO: 361473

SEQ ID NO: 505008 - DNA, 210 bp, Stenotrophomonas maltophilia
atgaagattccgacacctcaataccgctgcccgctcggacggctccagcctgatgtccaggatgtggacgccatcaagcaacgcggctggcgcgaccagcacatcctggtcgtgtcgcccgacgatgaacgactcgactggatggagcgcgaactggtacgccagatcggcgagcgcctctacggggcaggagggcggcgtcatggttga

SEQ ID NO: 505009 - DNA, 477 bp, Stenotrophomonas maltophilia
atgaccaccaccattcttgccctcgatctgggcaccaccaccggctgggcgctacgcggcagcgatggccacatcaccagcggctccgagagcttccggccacagcgatttgaaggcggcggcatgcgctttctgcgcttcaagcgctggctcaccgagatcaagcagtcctgcgacggcatcgacgcgctgcacttcgaggaagtgcgccgccacgtctcgaccgacgcggcacacgcctacggcggattcctcgccacgctcaccgcgtggtgcgagcaccaccagattccgtatcaaggcgtgccggttggcacgatcaagaagcacgctaccggcaagggcaacgcgggcaaaggggatgtgatcgcatccgtcaccgcacgtggccacgccccggtcgatgacaacgaagccgatgcgctggcactgctgcactgggctatcgagcagcatgcactggaacgggaggtgtga

SEQ ID NO: 505010 - DNA, 2286 bp, Stenotrophomonas maltophilia
atgcttgatttcaacgacacaccgcctcctgttcctcgtgatctcgacgccgaacgcgaagcgattcgcgctgaactgctggcgcgggtggaatccgttctggccgcgttgctcccggcaggccgcaagcgtggtggcaagttcctcattggcgacgtgctcggcagcccgggcgacagcctggagatcgtgctcgatggcgagaaagcgggcctgtggacggatcgtgccacgggcgacggtggcgacatcttcgcgctgatcgccgcacacctcggcatcggcgtgctgcacgatttcccgcgcgtgctcgacgcagccgccgatctgctcggtcgtgccagagaaaagcctgtgcgcaaggccagcaagaaggatgcacccgtcgacgaactcggccccgccaccgccaagtgggactacctcgacgaggcaggccatctgatcgccgtcgtctaccgctacgacccaccggggcagaagaagcagttccgcccttgggacgccaagcgccgcaagatgacaccgcccgacccgcgcccgctctacaaccagccggggatggccagcgccgcgcaggcggtgctggtcgaaggcgagaaatgcgcgcaggcattgatcgacgtgggcatcgtcgccaccacggcgatgcacggcgcgaatgccccggtggacaaaaccgactggtcgccgctgtccggcaaggccgtgctgatctggcccgaccgcgacaagccgggctgggagtacgcgacgctggcggcgcaggccattctgtcggcgggcgcgaagtcatgccacatcctgtatccgcccgaggaagctgctgagggctgggatgcggccgacgccatcgccgagggtttcgatgtcgccaccttcctcacccacggcccacgcctgcagatgcacgacgttgctgacgacatcgatccggtggtcagcagcgacgaatccgtttggggcaccgaggatgcgctggcgctgtctttcacccgccgctatcaccgcgactggcgctacgtggcagcctggggccgctggctggtgtgggacgggcaacgctggcgcaccgaggaaacgctcgccgctaccgatctgatccgcagcgtctgtcgccagaccgccgtgcgcgccgacaaccccaaagtcgccgcgaagctcgccagcgccagcacggtcggtggcgtggaacggttggcgcgcgccgaccgcaggcacgcggccaccaccgacgagtgggacgccgatccgtggctgctcaacacccccggtggcgtggttgatctcaagacaggccggatgcgcccgcacgagcgtgccgaccggatgaccaagatcaccacggccacgcccagcggcgattgcccgacgtggaagcagttcatcgacgaggtcaccggcggcgacaaggaacttcaggcttatctgcaacggatggtcggctacgcgctgaccggctcgacgcaggagcacgcactgttcttcctgtacggcacgggcgcgaacggcaagtcggtgttcgtgaacacgctggccaccatcctcggtgactacgcgaccaacgcgccgatggacactttcatggaaacgcgcaccgaccgccacccgacggacatggcgggcctgcgcggcgcgcgcttcgtcgcggccatcgaaaccgaacagggcaagcgctgggccgagtccaagctcaagaacctgaccggtggcgacaagatcgccgcgcgcttcatgcgccaggacttcttcgagttcttcccgcagttcaagttgttcgtggcgggcaaccacaagcccgctatccgcaacatcgacgaggcgatgaagcggcgtctgcacctgatcccattcacgatcaccgtgccacccgagcgccgcgacaagaacctgcagcacaagctgctcgccgaacgcgacggcatcctcgcgtgggccgtgcagggatgtttgaactggcagcgtcacggtcggctcgatccgccgcaacgggtggtggacgccaccgaggagtatttcgaggccgaggacgcgctgggtcgctggctcgacgagcgctgcgtgcgtaccgccaacgccaagtcgctgactgccgaactgttctccgactggaaggtgtgggccgaggcagcgggtgaattcaccggttcgcagaagcgctttgccgacctgctgctcaaccggggcttggacaaatggcgcaacggcatgggcttgcgcgggtttcagggcattggcctcaagtacccgccagcaccagcctacaccccctacgccgatgactga

SEQ ID NO: 505011 - DNA, 228 bp, Stenotrophomonas maltophilia; identical to SEQ ID NO: 361474

SEQ ID NO: 505012 - DNA, 738 bp, Stenotrophomonas maltophilia
atgctggatttcaattcatcttcaagcctatctgatcgtgtcacgacgctgatccacatcggcatgcagcacgttcgtgggcagcaggccgcacgcgactatctcggcgcgtcgcgtctgggcgtggcctgcgagcgtgcgctgcagttcgagtacgccaaagcgccggtcgaccacgggcgcgacacccaaggccggatgctgcgcatcttcgagcgtggccatgtcatggaggactgcatggtggcgtggctgtgcgacgcgggtttcgatctgcgcacgcagaaacccgacggcggtcagttcggcttctccgacgcgcacggtcgcctgcgcggtcacgtcgatggcgtgatcgtcggcgggcctgacggctttggctatcccgcgctgtgggaaaacaagtgcctcggcgcgaaatcgtggcgtgaactggaagccaaaggcctcgctgtcgccaagccggtgtacgccgcgcaggtggcgctctatcaggcccacctgcaactgcacgagcacccggcgctgttcaccgcgatcaacgccgactcgatggacatctacgtcgagctggtgcccttcgatggcgcgctggcacagcggatgacggatcgggcggtgaaggtcatctccgcgaccgaggccggtgaactgctgccgcgcagctttcaagaccccactcacttcgaatgccgcatgtgtgcgtggcaagaacgctgctggaggaaaacagcatga

SEQ ID NO: 505013 - DNA, 477 bp, Stenotrophomonas maltophilia
atgaaatgctgggtctgcaaacgacaggcacgcggctacggccacacggatggtcgcttcaagaccgccgatccgcgtcgctacgtactcgactgggtgttctgctcgcgccgctgtcaggacgcgtttcacgcgctgtacggcaactggcagcgcgccaaggacggtcgcatcgaccggacggaggtcgccatgatcgatccgtctgatgtcgaactggccgcgatgcgccagtgccttaaggccttcggagaggcggcgggcgagatcggcttcggcaaaccgctcggcgactactccgaagcggaagcgctgcgcgttatcgacgccatcgtcacctgctggtcggaggcgatggtcgcgcaccacgaaaaaaccaagttcccacccgtgcgcggcatgccgccaacacccgacccgttggctcccgatgcggcgaatccgttcgcggatttcaacgatgacattccattctga

SEQ ID NO: 505014 - DNA, 633 bp, Stenotrophomonas maltophilia
atgtcgtccaactatttcgattttcaggatgctgacccccaacagcccggctttgatctgatccccaagggcaccactgtcccggtgcgcatgaccatcaagcccggtggctatgacgattcctcgcaaggctggagcggcggctatgccaccgagtccttcgagactggctccatctacctcgctgccgagttcgtggtcactgcgggcgaccacgccaaacgcaagatgtggtcgaacatcggcttgcactccaagaagggcccgacctggggccagatggggcgcagcttcatccgcgccgcgctcaacagcgcccgcaatgtccacccgcaggacaactccccgcaggccgccgccgcgcgccgcatccagggctttcatgagctggatggcatcgagttcctcgcccgcgtcgacatcgagaaggacggtaagggccaggatcgcaacgtggtcaaggtcgcggtcgaacccgatcaccccgactacgccccgttgatgggtgtgccgcccaagacctcgggcggcggcacgtccggcgctccggcgcaggcagcgcccgcatctacgtatcaggcaccggctgcgcaacgcgcacccgtgacgggaaaaccgtcgtgggcgcagtga

SEQ ID NO: 505015 - DNA, 846 bp, Stenotrophomonas maltophilia
atgagccttcccatcatctccgcgcaacagcgcatggccgagcgcaagggagtgaagttgctgatgctcggcaagtccggcatcggcaagacctcccggctcaaagacctcgatcccaccaccacgctgttcctcgacatcgaagccggtgatctggccgtggccgactggccgggcgacaccatccgtccggcatcgtggccggagagccgcgacttcttcgtgttcctcgcggggccggacaagtcgctgccgccggaggccgcgttctcgcaggcgcactacgaccacgtcatcgagaagttcggtgacccggcgcaactgggccgctaccagaccttcttcctcgactcgatcacgcagctgtcgcgccagtgcttcgcgtggtgcaagacgcagccgggtgccgtcagtgaccgttccggcaagcccgatctgcgtgcggcctacggtctgctcgggcaggaaatgatcagcgcattgacccacctgcagcacgcacgcggcaagaacgtggtgttcgtggcgatcctcgacgaacgcctcgatgactacaaccgcaaggtgttcgtgccgcagatcgaaggcagcaagaccagcttggagctgcccggcatcgtcgatgaggtcgtgacgctggccgagatcaaggccgaggacggtagcgcctaccgcgccttcgttacccaaacgctcaatccctacggcttcccggccaaagaccgcagcggtcgccttgacctgctggagccgccgcatctcggcgcgctgatcgccaagtgcgcgggcacatccgtcatgcccaccagcgccgccaccccgaacaccaccgaatccaaggagtaa

SEQ ID NO: 505016 - DNA, 762 bp, Stenotrophomonas maltophilia
atgagcgcaatcattcctttccagtttgaagcgcacgccgtgcgcgttcaggtcgatggcgctggcctgccgtggttcaacgccagcgatatctgctccatcctggagttcggcaattcgcgtcaggccctcgaatcccacgtcgatgccgatgatgtccagaaactggacgccatcgacaacctcggccgcacccagcgcgccaaccacgtcaacgagtcgggtctctacgccctgatcctcggcagcaccaaggatgccgccaagcgcttcaagcgctgggtcaccagcgaggtgctgcccgcgatccgcaagaccggcagctactccacgtccggcgcgctggcaaccctgcctgcaccgacccacgaccgcgtgtccgcgatcctgctgatcggcgaggccgtggcgaaggtgccgggcgtgaaaccgggcatcgcggcagcggcgaccctgacctgcattcaggagaacaccggcatcaccaccgaggtgctgcgccgcgcgctgccgtcggccaacgagccaatctgtgccttgaacgccacgcagttgggcaagctgctgaaccgctcggccaaggccacaaaccagatgctggcggccagtggcttccagatccgcaacgaccgcgacgaatgggagctgaccgaggccggtgaagcctgggccgaggccatgccgtactcacgcaatggccacagcggctaccagattctctggaatcccgccgtcgccgacgagctgaaggaggccgcgtga

SEQ ID NO: 505017 - DNA, 282 bp, Stenotrophomonas maltophilia; identical to SEQ ID NO: 361530

SEQ ID NO: 505018 - DNA, 477 bp, Stenotrophomonas maltophilia
atgaacgacatcaccctctttcccgccgacatcgccgcgatgtccgtcagccagttggccgcactgcccgccgcgcagaaggccgaaatcgataagaacctcgacgaagccctcgactggctcaagaaggcgcgcagcaagttcgacgcggcactcgacgccgcctacggcgagcaggcgcgcacggcgctgcgcgattcaggccgcgacttcggcaccgctcatctcgacgacggcccgctgcacatcaagttcgaactgcccaagaaggtcagctggaaccagcagcaactggccgaaatcgccgaacgcatcgtggcatccggcgagaaggtcgagggctacctcgacatcaagttgtccgtctccgaatcccgctacacgaactggcctccggcgctgcaacagcaattcgccgcagcccgcaccgtggattccggcaagccgtctttcaccctttccatcgattcggagtaa

SEQ ID NO: 505019 - DNA, 264 bp, Stenotrophomonas maltophilia; identical to SEQ ID NO: 361529

SEQ ID NO: 505020 - DNA, 468 bp, Stenotrophomonas maltophilia
atgacgggagcgaccgacaacccgcgcaagcgcgccgtccgaatcgaagtcggtgccgatgcgcgcaactatgtcagcggcggccagcgcgtgacactggtgccgttgaccatcaaacgccgccagaaccgcaagttgctgatcccgcccacgcccgatgcctatggcgcggtgggcggcttggatgcgccgatgatcaagacgctcggcaaggcgttccactggaagcggctgctcgacgacggcgagtacccgacgatggtagatatggcgcgcgcgcggaaactggaaccgggctgggtatccgaagtgctgcgcctgaccatgcttgcaccggacatcgtcgaagcgattgtcgaaggccgccagccccggcatctgaacctgcatgtgctgcgcggtcgtccggaactgctgccgcgtgactgggcagagcagcgccggttcttgggctttactgacgcctga

SEQ ID NO: 505021 - DNA, 1404 bp, Stenotrophomonas maltophilia; identical to SEQ ID NO: 361527

SEQ ID NO: 505022 - DNA, 471 bp, Stenotrophomonas maltophilia; identical to SEQ ID NO: 361526

SEQ ID NO: 505023 - DNA, 216 bp, Stenotrophomonas maltophilia; identical to SEQ ID NO: 361525

SEQ ID NO: 505024 - DNA, 855 bp, Stenotrophomonas maltophilia
atgacgacattgcctgccgatgatgcattgacagcgcagcaacgtgaggttcagcgatttctgggccgctgcttgctgcgtctgcagcagtacgaaaagttgatgaaggccatcgtggcccaccacgaaatctctgccactggattaccgctggcgtcgaatcaggagcagcgcatcgcggatgctgccagcaagacactgggcaccttggtgggtgcgctcttcggttcctatgtcactaccgacgagagcgatggggctacttccgagtcagatgagcgcgacgacgtcatttcgttcaaattcaagatgaacctgcgcatgtctgtcgaggactacgacaggacgcagagcgatctcaaggagctggtgctgctacggaacaacctggtgcaccacttcattgaccagcacgacctgtggagcttggacggatgccgctgtgcgcaggacaccctgacggcagcctacagccgcattgatcagcacttcgaacaactgcggggttgggcagaacacatggatcaggcccggcgactggcagcagagtttgcccagtccgatgccttccgcgatctggtgatccacggcatcgctccggatggctcagtggattggccttccgcagggattgtgcgcgcactgcgggacgcagctgccgaactggccatcgacggctggacgccggtcgcttcggcgggacgctggatcgcagaacggctccccgaacatctgcccgccaagtacggctgcagcagttggcggcaggtcgtacacgagtcgcgcctgtttgagcttcgataccgtgatgtgggcggccagcgtgcggcttggtatcgggccaagcagaactga

SEQ ID NO: 505025 - DNA, 849 bp, Stenotrophomonas maltophilia
atgcccgacgccatcgacctcgagatcgtgcggcagatgctgccgagcacgccctacggcagcggcgttcgggagatcaaacagccggtgcagttcaacgacgatgctttcgaggggatgctggcgcgcgaccccaatgaccacgaggtgtggggcatcgcttacaacggcaaatcgcgcccggaacgccaacgcttcaccatcgctcacgagctgggtcacttcattctgcatcgcggtcaacagcagaacttcaactgcgacaagcagagcgttcacaccggcatcgagacgctccgcgacatcgagcgggaagccgacgacttcgccagcaacttgctgatgcctggcgatctgctgcgcgcatggatttccaaccagcgcatcgacttccgcgtcctcggtgacatcgccgagcgtttcaacgtctcgctggaggcgctgtgcatccgctacatcaagttcacgacggaacgcgccatcctcgtgtattgggacaacggctacatgaagtacgagtggcgcagcggcagcgcgagacggacgcgggcgcgcattcggcgcaacggcgagccggtggaacccatgccgggcacgctggccgctgacgccagcatcgcgcaggagtgggacggtacggagatgtccgccgcgatctggtgcccggaagaagcgccgcacatgaggctgcgcgagctcaagcacaccttcgccgggcgtgaccgtgtcctcacgctgcttctgctcgaaagcgccgaaccgcgttcgtgggatcggtcgtggcacgatgaagatgccgaagactgcgccgacagattcgcatccagcggtcagttcccggttcgatga

SEQ ID NO: 505026 - DNA, 342 bp, Stenotrophomonas maltophilia; identical to SEQ ID NO: 361522

SEQ ID NO: 505027 - DNA, 1236 bp, Stenotrophomonas maltophilia
atgaagaaaacctttgtcgacgtgatgctcgagctgccggtggatgccacgctgcgcgacttcctgacctcacatggcctgcccgtgccgaacgggttcgcgtgggacgatacgccagagaccagccagttcctggtggaggcaatcaaggtttggccggatgctgatgcccgtgaccgcatggcagccaacctcaatgccagcgtccagttgggtgatgcggcaggcaagcaggcgatgtttgaggcggccgtcgatgatgcggccgccttgtccggtctggccttgtgctccagtgatctgcaccgttcgttctggctctatgctcaccacccggcgctgttcgagcgcgcctgcgatttcgaccattgggaacaccacggttcacaagcgcaacactatgacatggggttgaagcgcaagcccatcggtagcgacactgcgctggccggattgcgccacagcatctcggccttttacaagcgcgagctgcaatgcggggacggcagcgtggcctatctggtgacgcgcacgcccggcatccacttgctgatcgttcacgtcaaggattcggccatgttgcggctggagttcgaaggcgtgacgctgacgcgccgcatcggcaatcccaacatcccgctggcgctggaatattccgagaccaccggcgtcgtgcgcgcgctggtgcgtggtggggcgaagtaccagcagatgctgatcgatgccttcgccgagcatgtgctgggtgtcaaagcccatgcccagaaaatcaaaccgccgaccctggatttgtcgatgttgcgcaccggcttcgacgtgccggaggtgttcgaggatgggttttcgctggtgcaactcaaggcgctcactctcctcagcccgggcggtgatctgaaaatcgagtgcaccgcgatgcaggccagtcagcagcgttcggtgcatgagttgctgaaggaacaactgcccggcccgttggaaggcaactgggcggtgacggcggcgcaggtcaatctgtactacccgccagagccaggacgcacacggcccaaggtggtcagcatcgaagtgaccagcaaagggcggctgaacctcaacaaattcgacgccaagatgcaggcgcaactggaaggctatctggtcgcggtcggcatcttgcagaagggccaaaccctgagcgcgcacgaaatgccgccggaaacggatgccgttggttcaaccccagtgatcgaggactga

SEQ ID NO: 505028 - DNA, 963 bp, Stenotrophomonas maltophilia
atggcgacgcacgacgcttgggccttgatctgccgcctgttcgcgggtggcacgcctgtactgcgcgccatgttgtcgccgcgcgaggcagtggcgctgtccatactcggcaaggcggtcaagccgacggtcatggatcagtccttcgtgctgtgcccgcactgccaacagcatcgggcgcaggtgtggagcgatggtcgtggcggacggatgtgccgttgcccggactgcgggccagtgaccgtcgaggccgccgatggtgcggcgctggtcttggatgaggattggctgcgccagaagatgcgcctcgcgctcggtattgaaagtcgcgatggcatcgatgacctcggcggcggagcgtggcggctgggcgatgcccggcgttcgccggtgctgctggcgcgcgatctgacgcgggtgctgcacgaacctgcgctgctggagcgggtgcgcgtggcgggcggtgacatccgggtgatcacgccgaggccgagcacgacgcgcggagcgcccttcggcgcgggcgtcgagtggttggcgctggaggagcgcttcgcgttctatggcggcgggatcacgttcatcgccacgccgtcacccgtggcgcaagcagtcgccgatccggccacgccagtgaacgggccgttctcggcggacttcaggtgggcgacgctgccggatgttcaggccacgccgatccagttcaccaaaggtcaggccagcgtgttcaaagctctctgggaactcaagggcgtcgaggtggatggcgaaagggtcatgcagcgcgccggccagaagagcgacaagcccatcgacctgttcaagatcaaagcgaaagacaagggcaatcctctgcatgcggcacggcttgcggcctacggcgcactcgtggtcacgcagcaacgcgcggggctatatgcgatgccgtgtgcggcagcgagaaaggaggttgtcatgacgtga

SEQ ID NO: 505029 - DNA, 231 bp, Stenotrophomonas maltophilia; identical to SEQ ID NO: 361519

SEQ ID NO: 505030 - DNA, 195 bp, Stenotrophomonas maltophilia
atgaagcgccccaatgagccgatgaccgcctacccggtcagtactgaggtcatctctgtctcgcgctacctgaagcttagcgaggctgagaagtcctccattcgatccactgaaatcgcgccgccaaagctcggaagtaacgactttggtcggatcatcgtccactacaagaccccaatctacaaagtgggctga

SEQ ID NO: 505031 - DNA, 420 bp, Stenotrophomonas maltophilia
atgaaccacccaattcctgcagggaagccggagcctgaggggcagcaagggaagcctatccaagagatgcagctgcttgagcagatcttggagaatcaggtccgggagtttgagctcaagtcacgcgaacttgagatcgagaagcagaaggacgcaaacgcgttccagttcagtcgggaagccttgtctgcgcaagagcgtgaccggaagcatgagcgtgaatgcaagcgcggcgaacgccgcgatcgatattggcttattgcaggcatgggtctcatcctctccgggctgatcggtgctgccctggcaatggggcataaggacgtggcgattgaactcgtgaaagccatcattctgatctccgccggcgctgcgggcggatacggcttggctaagaagaagcaagacgacccagaataa

SEQ ID NO: 505032 - DNA, 654 bp, Stenotrophomonas maltophilia
atggctgacgcacagcgcgatcgcgtgatgcacctggagatcggaatggatctcgcagagcgtgtcgttctcgacctgctggaaagcggctggtcccgccagtcgctgcggaagcacgaggcggccgggcctaccccgtgcggcaccgccttctacctcgtgcgtgagggaggcatcgccgttgcctacttcccgattgccgagttcaccgacgcgaacggccgcgggctattcttcgccattcgcgacttcttccccccgatccacaagtctgcgcacggcaatgtcgagagcctgaagcctttcgaggtgggcgaccaggttatctcgatggaccgcaatctggatggatcgtggcactacgacgatgaagtgcgggccagcgactggaaccgtctgattcccgttttcacggtcgtctcagttcgaccgcatcccgggcaccacacacagttcggtggcagagactactaccaggtgaagatcaaggaccgcgtgggcggtggtggtggcttccacgaccttgtgcccatcgccggcagaccgtggcagatgcgtggcgagggagagtgcctgatccgcgtaaggccatcgcacttggccgcgacagcctctcagccggtgctgccggcccaactggacctgttcgcatga

SEQ ID NO: 505033 - DNA, 228 bp, Stenotrophomonas maltophilia
atgccagagagcgggagatggtacgaggactatgtcttcgcaatcaggggcaggacggtgacggtcagggtttcggtggagagtccgggccgtggtgagatcgtggcggttcacgtggtgtacggaccgagtctcactggtctggcgattccggtggtatcgcagcaggatgcgaaggagaagacagagactcttctttgcgacctgatggggagagcttggtgttga

SEQ ID NO: 505034 - DNA, 1257 bp, Stenotrophomonas maltophilia
atgagcaacgacatcaaaaccctggctgacgcgcagcccggtgggagggtgaggctgggggatcaggccgagcgggcgcggtttgaggcgtgggccgaaggtgctggatatgcgttgacgcgggaggatgggcggtatgagttcgccgctactcggtgcgcatggactgcgtggagagctgccgcagaaagccgccagattggagcgcatgaacctgcggcatgggttccgccgaacttcttcaacaagggtgttgtcgccgccacggcccgacgcaatccgccatctgaaacggcggtcgagcttcgcggcgagtacgtcccgctctacctctccgcccagccctccccgggtggtcagggggatgcgttggcgatgatccagcgctacgacgacgcctgcattgcgttcacactgagcgtgacggacgagcgctgtgacgataccaagcgtcgagaactgcgccgggcagtgactgccgcacgcaacgaagtggtgttcgccctcgccgcccgccagccggtgggggaggactggcagcgcatcgccaacgagtgggccgacgccaccgccaacggtgtgcagtggctgcgcaacatccgcgacggcgcctcaacggtggccgacgcgctggcgtgcatggagagcaacgtcgagcgcatccagcagatcaagccgcagccggtgggagtaccaacggcgtggatgcacactcacaaagcaacaggccgcgtcgaattcggcttgtcgcccatgtacgactgcgattccaacgcagagaaatgggactcagtggcactctacactgccccccccgcgcaggccgtggacctggccccgcgtccgatggataccgcgcccaccgacggcacactggtgcgcctgctggtggacttcaccagcaacgccaccgaggacaccgccggcccggcgtggactatcggagcgtgcaacgacgagaacgtgatgcacgatgagcgtgtcggctggcagttcgctggctggtgctggacgcacgaccacttcaccgaaggcaaaggcacgccggttggctggctgccgctggtcggcaagccctcgcaggccgtggacctgggtgcagttcgttacgctctggatgctgcggaaggtttggcagtggcttgcgcatctgtcgatggattctcacgagaggaaatagcttccgctggaagaaagatgaggaagcaatttgccgatgcccgcgccctgatcgacggaaaggcggtgggcaaatga

SEQ ID NO: 505035 - DNA, 240 bp, Stenotrophomonas maltophilia
atggaccccacgctaagcgagcgacaccaccggtaccgcgctcgggccggcagggcaaaggcagcgctgtacgcacgcgtggtcgaaggcaagagctacaccatgcgccagatctccgacgagctgggcgtgtctatgacgaccgccgacacgcgggtgaagcgcggcccctaccccctcacttgggaatcactgcgcatggcgcgccttcccgccaacagcaaggaaccgcaggcatga

SEQ ID NO: 505036 - DNA, 708 bp, Stenotrophomonas maltophilia
atgcgctggatccttccccctagcggcttcttcattgaagccaatgtcccaaaactgcagttcattcccatccttatcgaggaggacggcagctaccccattgaagccaaccgctatctcgttgagcgatcatgtggagaatgggcgcctgcgatggaaagcgggaaacagccacacgttctaactcttcgttcacgcaagaacagcgcacagcgcatggttgccttcttgcgttggtgtcgaaattgcaatctagattggagggacctggactacatagatcacattcgaggtggctaccagctagatctcttgaaaggcacaaagagtgctgccacgagagccttgaagcgcggaaccgtcaaccagtatgtagatgaggcttgcggctttctaacttgggcgcacgagcgcgggtaccgcgtgccagtgcgaatccccgttagaggacaagctgtcttgtccagcaacggtacccacagtcgagggcatcttccaaaagaagttaaggttcgagcagacaaacttagcttgcccgaagtctcgcttgattatcttccaagcgcggagagtgtctataaatggcttgcttcggtagctgataggcaccctgtgaaggctcttgtttttgagctcatcataactacaggatgccgcatagacgaggctcaccaacttcgagtgactgaatcgcccagggttttctag

SEQ ID NO: 505037 - DNA, 135 bp, Stenotrophomonas maltophilia
atgccggtcgtcctgaccggcacccttcgggccgtcgcaagcgacgttggcagcggctcctgccgctaccttcggctctacaacaacgtcgctcaggcgatctgcaccacgcgcgcgttctggcacagcgggtag

SEQ ID NO: 505038 - DNA, 714 bp, Stenotrophomonas maltophilia
atgcgctgctgcgcaacctgccgtgggcgccgttcactgcactggcaccgatctaggtttccagccaacggccgcagcccctcgtggcgggcggcgtttgaaggcagaagccctggggttggccggacgggatgggtttgcgggggacgccgtgaatccgtccgtggaggcttggccgcggcatccatgccgcggacacccccgcaaatccatcccgcccgaccacggacagtttccgtgtgcgtccaccacggaaaagaaagagaagatcaaaagcggaagcggatcgcttcgctctgtatccacgcatggcgtggatcgaccgtgtcgaccaaggtcgacacccaccggcagtcgcggttgacccaccgtcaccgggaaactgtcgggggtggggcggtgtggggcagcaggaccgttggcgccatggatggcgccatcgagcccccagggacgggtttacggcgtgtcctgcagccccacaccgccccgcccaaccctcagcaatccagagccgctttggctctggcattggctttggcctctgcaggtgcagggctgcaagccctgcaaaacaactacgtcacccagcctgcaatcaccagcagggcgaggaccgccagccacagcagcagcatccgccacaccaggctcatcgcatcacgcaggtccggcaaccgctgccacaccggcagcaaccctgcctcggcgtaa

SEQ ID NO: 505039 - DNA, 354 bp, Stenotrophomonas maltophilia
gtgatcgaccgcgacgtgctggatgaactgcacaccgtgatcggcgacgctgccacccagatcgtcatggtctttcttgaagatgcgccggtgatggtgcagcagttgcagctggccgcgcagaacggcgatgagctgcgcttgcaggccacagcgcacagcctgaagtcatcgagtgcaaacgtcggcgcattgtcgctgtcggcgatcgcgcagcggatcgagcacgaagcccgtagtggcagcctgcagcgccccgcagtggcggtggcgctgctggttgcggaattcgcccgggcgcgcgttgcactgacgggctacctggcacagcaccgcgccggccagggcagctga

SEQ ID NO: 505040 - DNA, 480 bp, Stenotrophomonas maltophilia; identical to SEQ ID NO: 497561

SEQ ID NO: 505041 - DNA, 276 bp, Stenotrophomonas maltophilia
atgcccaccaaggtgggcatctaccagagccacatgcccaccaaggtgggcatctaccagagccacatgcccaccaaggtgggcatctaccagagccacatgcccaccaaggtgggcatctaccagagccacatgcccaccaaggtgggcatctaccagagccacatgcccaccaaggtgggcatctaccagagccacatgcccaccaaggtgggcatctaccacagccacatgcccaccaaggtgggcatctaccacagccacatgccccggtag

SEQ ID NO: 505042 - DNA, 1200 bp, Stenotrophomonas maltophilia
atgtcgaccctggcttctcccgcaacgacctcacgcccggtggctcccggcgtgctggccgccatctccacctcgcatgtcgtcaacgacatgatgcagtccctgatcctggccatctatccggtgatcaagggcggcttcaacctcagcttcacccagatcggcctgatcacgctgacctaccagctcaccgcgtcgatcttccagccgttgatcggcatggccaccgaccgccgcccggcaccgtactcgctgccgatcggcatggcctcgaccctgtgcggcatgctgctgctcggctttgcgccgaactacgcggtggtgctgatggctgcggcgatggtcggcattggttcggccatcttccacccggaggcctcacgcatcgcccggctggcctcgggcggtcgccatggcttcgcgcagtcggtgttccaggtgggtggcaacttcggtaccgcgctggggccgttgatcgctgcggccgtgatcgtgccgtatggccagcgtgccgcatcatggtttgccggcgccgcgctgatcggcatcgcgctgctgacctatgttggccgctggtatgcactgcacctgggcacaccgcgtccggccagcaccgcgtctatggccccgcggcattcgtcgcgcaccgtggccaaggtgctggcgatcctgctggtgctgatcttcagcaagtacttctacatggccagcatcggcagctacttcaccttctacctgatccaccacttcggcattccggtggcacaggcgcaactgcatctgttcgcgttcctggtggcgtctgccgccggtggtttcctcggcggcccgctgggtgaccgcatcggccgcaagccgatcatctggacctcgatcctcggcgtggccccgttcgcgctgatgctgccgcacgccgatctgctatggaccacagtgctggcagtgctgatcggcttcgtgctctcctcggcgttctcggccatcgtggtgtacgcgcaggagatgatgccgcaccgcatcggcatggtgtccggcctgttcttcggctttgcattcggcatgggcgggcttggcgcggccgtgctgggcatgctggcagacaggaccagcattgaattcgtctatcagctgaccgcgttcctgccactgctgggcatcgtcgcggcgtggctgccgccatcgcggcctgctgctcactga

SEQ ID NO: 505043 - DNA, 204 bp, Stenotrophomonas maltophilia
atggcagcgcgccgtccgcttgtgctggatgcgagcaatcggaccagggagctgccggtcgacgacatgttgatcggcgttccgctgcaggtcgcggtcgggctccgggctggtggggcgttcaacgtcgccctgacctcgacctacgcaatgaccatcgggctgcgcacgggcggcacgttcaacgtacaagcgacggcctaa

SEQ ID NO: 505044 - DNA, 681 bp, Stenotrophomonas maltophilia
atgagctgttggacattggccatcgactggccggtagtcacgcaaggattcggtgcactcgcgcagggagccggcgcactcgtcctggcctgggtagggctggctggcctttcgtcgtggcggaagcagctgaagggaacgcgcagccaggcgctggctgaagaggccctcagccttgtgtaccgcgtcgccgacggtatccgccacatgcgtcagccgtgggcttgggctggagaattgcggaaggtcgaaagggcggaaggcgaaagcgacgcggaattcgatcagcgcaaagaatacggggtggtagaagtacggtaccaagcccacgccgaggcggccgcacagctggcagcgatccgattcagagtccaagcggtactgggagagggcgcaaagacctcgatcgacgacgtcttgggactacttaccaaagtccggactgaagccggaaacgcagctcgccacaaaagagtagtgctgcatcagacggcgcttatgcttaggtttcccgccgatgcctcccgagatgcgtatgaggatgcagcacgccggttggctgactccgaacggtggattcaagagcagctgcctggtgaggacccagccgaagaggagctttcgcaggccctgagaagagctgaacgcgcgctcgcggatgcggcttccctaaagcagtaa

SEQ ID NO: 505045 - DNA, 498 bp, Stenotrophomonas maltophilia
atggttgagacagtttggggaatgacggaccttcagctgcgactgttcaccgcaatcggccaactggttctggcgggagcggtcttctacgtcgccctcaggcaatggcttaccgcccgagagcaggcgacgacggcgaggaagaagctcaaggcggacctcttcgacaagcggatggcagcgttgaacgatgtggaaagcccaatcatcgagatcctgaagggcctggtgcccgactacaccaaggcagtaaaggtaagaaccggcgcccgccggttccgctacctcttcgcaaacgaggcctactcagcggcagtagagcttggggaaatggccactgagctagccggtctacagaatgagctgagcttgtcagacctcgatccgcaaaagcggcaggagatggctcgtcggtacaacatcttgagcggacttctcgaccctaaactgtcggtgctccacgacttctgcacagcagaattgaccctctctgagtaa

SEQ ID NO: 505046 - DNA, 312 bp, Stenotrophomonas maltophilia
atgcttgtgcagctgctcattgacagtcatcacgagccatcggcgttgcttgcctacgttcaggcgaccatccaagcaatgcgaacaagagacgtccccgccagcaagcgcgccgccttcgaccgggcgctggcgcgactggaggctgtcgagaggaaagttcgtgctgcgaaagaagacagagaccggcggcgccagaatgcggctgtagaattgcagcgccagcgggccgcacaggaggttcagcggcgcgaggctcaggcagcacgtgaccgggaagaagaggatcagtcccctggcatgggcatgtaa

SEQ ID NO: 505047 - DNA, 744 bp, Stenotrophomonas maltophilia
atgagcatcggccgcacgtcgttcaacagcaccctcaagcgctgctcatcgaggaattccagtaacgctgagcgtgtggtcccagaagatctcggcatcccgcagtacgttcaacagcgtctgagtgtaggtcccgccgtccgtggagatttccgccgtggatgtcatcaggatgctcggcgacgaaccgggctcaacgtagaaattgaagaagacggggacgtcgaggtccaagccagcaaagcccttgtgcttgagctgcagatgcttgcctgccaggcaaattgccccgcaagtccgcatggcgtcgttcaaacaaacccacttctgaaccttatctgcagtcgaaaggtcggcccccaccgcagccgaagcgttcgcaacgagcccgtccttttccagctggtagtgcaaccattccaccatgtgccaggccgttgcaatggcgttggcggaagcaaaaaggaaggctcgcggctcatacgtcggcccggtcttgagcgcgcctggtcggtcgcggtcctggtctcgaacaatcgtcgcttcccaagccagtttggcacgcatgtcccagatggacttgaggccgagcgtccatccacgctccaggtgggtcgtcattctgttcgctgccttgggctgcccctaccccgccagcatgctcacgccctgttcgtggcgcaaggcctgggcaaaacctacctggatcgcccttccgtccggcatgaggtcgagggcgcatga

SEQ ID NO: 505048 - DNA, 210 bp, Stenotrophomonas maltophilia
atgaccggcacccatcgccaacagccgctcacaaagaagtcgcaggtgctgctggttctgcgcgccggcggccgcatcgcccctggccatcggcccggcctgctgcagctgctcgacgccgatgacagcccagtgcctgcctggcaaaccgccctgaaggctgcccagccctcgcccgcaaagcccggagatacccatgaaccgcagtga

SEQ ID NO: 505049 - DNA, 648 bp, Stenotrophomonas maltophilia
atgcgtgagcgtcccatcctattcaacggtgccatggtgcgcgcgatcctggccggcaagaagacgcagacgcgccgcctgtgcaagcctgcggaagcacatgctctgtcgtacgtcgtagagctcccagatccgaaagagcgcggacagatctacaacgggtcgaccttcggcgatgaggaaggcggcgtgcggttcgccagtccattcggccagcgtggcgaccggctgtgggtacgcgaaacgacagtggacgtggaaaggcacggctacctcggccccgtccatctggaatccgtagagggctacgccacgctgcagggcggattggcacctgggccggacgacgtgatcgatgtcgagccgcacgagatcacactgcggccgtccattcacatgccgcgttccatgtgccgcctattcctcgaaatcactgacgtgcgcgtggaacggctgcaggccatcagcccagccgatgcccttgccgagggctccatggagtgggccggcgagcaggacacccccattcgcgacctgggcacaggggacgagcgcatcgccttcagcgcgctctgggacagcacaggcggcgactggaacagcaacccctgggtgtgggtcatcaccttcaagaggatcgaagcatga

SEQ ID NO: 505050 - DNA, 573 bp, Stenotrophomonas maltophilia
atgaacgacgaatcgaaaggtacggatgccggctccgcctcccagacagacgccgatgcggacagggatacgctattcatccgttccccggaggacttcacctccgacttcttgtcaggttggatcgtagacggtcgtagcggcggcttggttcgcggccgccttcacgaagaggggcatgtatctatgattgagcatgtcggtcccctcggaacgttcgaattccgaggggtgatggagggtggggagtacatcatgagcaccgacgcgacagcggctcattttgatcgccttgtggagatcaacagcgacaagaccccttgcgacatcccgctaccggatgcgccgccagggcgcgtgattgacgtggccgcggaaccacacgacaagctgttgttgatccaacgacaattcatcatcaaccgcgtttccactcgcaggcacctcagcgagctcgtcgctcttaacgcctcccacacctattaccgtggccagttctttagtgacgatgtggttacctatctgaacgaccatcctgagctcggggatggtccagcggttgacggcgactga

SEQ ID NO: 505051 - DNA, 393 bp, Stenotrophomonas maltophilia
atgagaaccgaatcgcacgcagctgccgtcacggagcccggcaggcccggtagcacctattccgacggcccggcttggcatgcattcggcgtcagccgcgccgcctaccacgtagtgccgcgacgcaccctgcagtcgatgccggtcgagtggcaggcgcgctttgtcgcgctgatgcaggaggcacgtcaggcgctgcctgatgaagcgttccctgagtaccaggtgattcgactcaaggacggcaagtacgccaacgaccccaactgccggtaccgccgcacgcctccgtttccctgtcgccccgccgacgaagcgcatgccgtctgcaatgcaccgctcgccggcgccttcgtcaacaccctcacccaattcgatcaggcacgccgatga

SEQ ID NO: 505052 - DNA, 489 bp, Stenotrophomonas maltophilia
atgagcgcccgtccacagcagaccggccgtgccgccgaagtgcgcaacgtcctcgccatgtttccgcagggcgccacggtcgagcagatcaagaccgctggccgcatcaactgcacgcaccaggctatcggctacacgctgaaggggttggcgcgaagcggtcaggccatatgccaccgctccggcgtgcgcgggatctggcgcctcaccagccacacgcaacatgcaatcgccccgctgcgcgcgacacctgcccgggtgcagcgggcctgcgcgccgggtccgcttacaggcgtcagtgacgcggcgaccacgatccgacaccgagaactggaccggcagcagctggccgacgacctggacgcattcctcgcagcgggcgggcacatcgaggtgcttgggcacacctcacttcgcccgctgatgagccgtcacgccgccaaccacggcagctatgcggagcgcatggcagcccatgacatcgactga

SEQ ID NO: 505053 - DNA, 249 bp, Stenotrophomonas maltophilia
atgagcgcgcttgcagcgaagaatcaccaactgtggtgcttcaactgcgatgagaacagcccgggcgccgcgtctgcggacgactgcgaggacctcgcagggcgcaagggctgggtgcttgggatcgatatcgatggcggcggcggagcgcagtacgcgtgcgccgactgcgccgaacttctggatgaagcacatccggtcaaaagcctacgagcaatgcggcaagagaccggcggcggtgctgcatga

SEQ ID NO: 505054 - DNA, 531 bp, Stenotrophomonas maltophilia
atgagaacgatgggttttctcctggtcgccatcggctttgtgatgctgcttgtctcttgcaacatggatgtcagtgttgcgaccgacttcggcacaagggtcaacaacatcggactcatgcaccagcagacgatgctggtgacaatcagcttggggctgatgctcgtcggcacgatcatgtggattgcagggcgtcgccgcccggcagccattcaatctggcgaggcagttgtacgcgcttacacgccagaagagatgcgggatctcgacgtgctattagctgacatggggtggactgggatctccctccgtgccgacgacccgaaggtggttcactcggtcgcagacggctccgctgcagcagatgccgggatcattgcgggtgatcgcgtggtccaaattgacgggcagttcactggcaacgatctccgagagaacataattcggctatcaggggagcatggcgcccccaccaacctcaccatccgacgcggtagcgccagcctaaagttcgaagttgatagacgatga

SEQ ID NO: 505055 - DNA, 735 bp, Stenotrophomonas maltophilia
atgttgattgaccgcaccatgcccattcgggaacatcaacaaatggttgatgaacccgtaaaaacgcccttccagcaacggtttgacgccgtactccaggcaatggacgtccccaaccgtgcggcgtggggtcgaaagattggcattgcgtcgggccagacgctctataactggtacgagcgcgatcagaagattccggagaaggagcgcaagcgcctcgccgggtttggcatatccatcgactgggtaaacgacggcgaaggccagatgcacattgctcccccatcgttctcgacccctgcgacagccggcagctatgttcgcgtccagcaactggacgcggaggcaggtatggggggcgagaccgtcaatgatgatttccctgaagtgatcagggcgatggatttcacccctgcctacatcaggtccatcgtcgggttcgttccagcacctggtcgactggtcctggtgacggggcgcggtgactcaatgattcccgtcatccagccaggcgaaagcctgatggtcgatactggaatcaccaacttcgacggtgatgggatctacctgatcaacaccggcaacggtcaacagatcaaggggcttcaagatcgcggcgatgccatctatgtggtgagcgccaacacggcactctatccggccttcccacttccgatcagcacgatcattggcggcaaggtctatctccgcaaccgtattgatcggctcaactga

SEQ ID NO: 505056 - DNA, 255 bp, Stenotrophomonas maltophilia
atgcatgccatgagcgagatcattggctttcccgttcgcatgcacttcactgcattccgcgcattcgacattcgcagcgggctcggcggcgtcatcgcggtgttctggggaccagagcaacgcgtgtgcggctatggtcattgcggcgatcagcaagacgatcaccccgcaattgcggagctgaaggcggcggcgagccagccgatagcggcggtgcccggctgcccagccgtgctgggcaatcgcgagggttag

SEQ ID NO: 505057 - DNA, 531 bp, Stenotrophomonas maltophilia
atgacctgccgccgctccgacgtctactggctcgatgcgctgtacaccgctgtatcgcttgcgcctgggagtgtgcaggcggcggccgcgtacttgaccgagcgcaggggcgccgcgatcgctggagagacgctacgtaagaaactgcgtggcctgccaggcgagtcgctgtcgatggaaatggcggagatgctcactgagtaccttcagcagttcgtaggcaccaccacacaagcaacggattggatcgtctcattgggacgacagttcgacctggtcgtggactacgttccacctgcacccgagggtggatggccttgcgagttcactgcgctgcgcgagaagttgcttgaactgcatgagctgaccggaggccttgcgggtacggggagagaagcaatggctgatggggcgatatcgctcgcggaagcagacgctatgcaggatctgacgcgcgagattcgaacgctttgcttccgaatcgaacgcaacgccgtccgcgctcatcagaaggcgaggggccgtgcgtaa

SEQ ID NO: 505058 - DNA, 240 bp, Stenotrophomonas maltophilia
gtgcgtaacgtggccatctaccgcgctcccaagcagcagctacggaggcgcgggccgatcggcgattccgcgcggcgcgccatggagcaggccgcactggcgttgaccgattcggtgccggccctgcttggcgaggaggcactggcggagcgggaccggctgaggcgaacgcagcacggagcggacgatgcacaggcatctctgcttttgaggctgctaccagacgacgaccgccgatga

SEQ ID NO: 505059 - DNA, 2415 bp, Stenotrophomonas maltophilia
atgtcagtgaattacgacgacgtgctgggccagctgcaatcagctggactgcaagtcacggaactggataccaccgggcgcatggtccgctgccgcgtcgagggctcgcgcgagcgtcgcggctggtacgcgctccacgagctgaatacctcggccggcgaagtgctggtcgtcggcacctacggcgtctggcacggaaacgaaaacggtgcgaccaaggttgatctgcgcaagcgcgataagaccttctcagatgaacagcgcgaagcgctgcgcaaccggctggccgaggatcgtcgcagggccgagtctgctcgccagtcccaagcgaagcgggcggccgagcgtgcatcgtcggcctgggccaaggcgaatgcagccggcgaggccgactacctggtcagcaagggcgtgcagggattcggcctgcgctatggcaccacgggcgccgctctcgtgccgctgcttgacgtcaacggccaggtgcacggcctgcaggtgctgcgcagcgccaagcttgccgcagcagggcgcaaaccggccaaggagtattggccggcaggcatggtcaagaagggtcacttccatctgatcggcggaagtcctcagtggatactgctggtggccgagggttatgccactgcggccacgttgcacatggcgacgggctacccggtggcagtggcgttcgacgccggcaacatgctggccgtcgcctcggcactggcgaagcgctatcgcggcatcaagatgctgctgtgcgccgatgacgacgtgctgcagaagtgtcgacactgcaagagccgcttggtgctcgccgaccatccgcagttctgcccatcgtgcgcgcagcctcatggagcatcgaatgcgggtctgcttggtgccgaggccgctgcgcttgatgtgggcggagcggtgctgcacccggtcttcgccgatgagccggccaggcgtgagcgctacatcgacggcgggcgcaaaatctccgacttcaatgacctgcacgcccaagatggcctgcacgtcgtacggtcgcaggtcgaagctcgcctcacggagctgtcatggcgggtgcctgccgaaaaacgcgcgccttccatcaccagcaacgggggcgaggggaatgatcgcctggcaccgatccactcgctgaacgagttgcttgagcgcttcgcgctggtgtatgggcagggcggcacggtgttcgaccacaaagaacacatgctggtcgcactgggcgacatgcgcgatgcctgcgtgcgcaaggaattgcaccgggcgtggatggagcattcggatcggtccatcgtacgggtacgcgaagtggacttcgacccctcgtgcgagaagccaggggtgacatgcaacctctttgctggttggccgaccgtaccgcaagagggcaactgcgaccggctattgcagctgctctggcacatgtgcggtaacgaggccaatcagaaggcgctgtacgactgggtcgtgaagtggcttgcctacccgttgcagcacccgggtgcaaagatgaagtcgaccatcgtcattcatggtccgcagggcaccggcaagaacatgttcttcgatgagtacatgaagctctacggtgactatggtcgcgtgcttgaccaggcggcgctggaagacaagttcaatgactgggcaagccgaaaactgttcttgctggctgatgaggtggtcgcacgcaccgaggtgtaccacctgaagaacaagctcaaggcgctgatcacaggcgaccgcatccgcatcaacccgaagaacatccaggcctacgaggaagacaaccacgcgaacctggtgttcctctccaacgaggcaatgcctgtcgtgctggaggaggatgaccggcgccacgcggtgatctggacgccggacaagctcagtcaagagttctacaccgaggttctggtcgatatccgcaatggcgccactgcggcgctgcaccactaccttctccaggtggatctgaccggcttcaccaatggcaccaacccgccgatgacacaggcgaaagaggagctgattggcctgagccaggatagcccgcagcggttcttggacgagctttacggcgacgacatccccggactcaagcccatgccggcgctgtcgaaggagtggtacgaggtctacaaagcctggtgtgcgcgagagggcctaccgcgcccagcaccttcgcccaaattcatcaatgcgctggtgcgcaagcgccagatcacccatcccgatcgggcgcgcaagcgctaccagatcgagcagagcgtgaacggacctcacggcttcctgatgctcggcaactgcaccgtgcctgacgggaagacagaggcagcatggctgggagaccaggtcgtgtccttccgtcgcatgttctccgactacaaggggcgtgcgtga

SEQ ID NO: 505060 - DNA, 315 bp, Stenotrophomonas maltophilia
gtgagcttcgatgacgacttcgcacggagcgccctgcgcacgctgtacgcaaccttcggggtggatgcactggtcacacgcgggacggaggccggcgtgccggtacgcatcatcgtgactcgtggcgaggttcgggtcggggagtacggtcaagcggtgggtctggtggactcggtctctttcctgtccgagcagtggaagccgagacagggcgatgccgttacctggtcagatcggcttggagaccactccaaacgcgtcgagcgcccccgccgggacgatgggcttgaggtagaggtgacgctcaatggctga

SEQ ID NO: 505061 - DNA, 429 bp, Stenotrophomonas maltophilia
atggctgacctcgcgattcccgccaccgaacgaatcgtgcaagcggttgtggctcggctgcgcctgatcgctggcgctggctatcacaccaacatcggtaagcacgtccacgacgagcccacctggtacatccctgagggcgagccctgtgttgttgtctttgatgcgagcaaggtcaagagtggcgatcgcggggtgcgcagcgagcgcgagtacgtaggcctgattgaggccaccatcccctgcggcatggagaacgccgcgcgcacgcgtcgtttggccgatgcggacattgagcaggtgttggatggctggatctgggacacgggtgcgctacctctccaggtggaggagagcgtgttcctggacaagcctgatggactgcaggtcatcgcgctgcaggtcacgttcagtacgaggtatcgctga

SEQ ID NO: 505062 - DNA, 618 bp, Stenotrophomonas maltophilia
atggctggctacagtggctacgggcgattggctcttgcctttgagatgcagggcgccttggaaccagggcgaaatctcactgcgctggggaatcgcgtgccgtggctgcaggagcggacaatcgcgacggttcgtcgacgcgtcgctgttgaagcgcgacgggacatccagcgtgaatacaacattcccgctgctcggattcgacgggacctgagtgcccggaacaccgagaacggagtgcgcatcaccggacattttcgtggcgtaggcctgcgcaacttcgatggacgttccaacaccaagggagtgagtgctcgcgtcttcaggggagggcctcgctcgcagcaggctggtgctttccaggcgaccttgctgggtggaaatccccaattcgttgagcgctacggccccaaggtcgagatgaccaaggggcgatacaagggccagaagcggcagcgggtggaggttctgtatggaccaaccgttgctcagatgctcggcaaggggcgtcgtgcagaccgccttgcagattttgcgcgtcggaccgcgcgttctgaaatggagcgccagatcgacatctaccttcgcaatcccgctgctgctggcgacgggtcttga

SEQ ID NO: 505063 - DNA, 756 bp, Stenotrophomonas maltophilia
atgaaagacttcagcttccagggaaaaatctacctgggtgaacgtgcagcccccggtcggccgggcaagttgacgtgggtaggggatcaatccagctgccagttgcagctgtccacggatagcgaggaccgcacggagacgcatagcgggaagcggctgcagtccgcccgcctgacgacctccatcacggcgaccctcaatctgaccctgcgctacttcagcacggacaacgtaaagctcggtctctacgctcgtacgaataacgtggcgggcgccacggttccgacagaaccgttcccagccgatctggcagtcggtgaccaggtactgctggcgcgctcggtcggggtgagtgacttggtgatcaaggacagcgcggcatccaccccgaagactctggttgaaggtactgactacagattcgacccggagtccgcgatcgtcacgttgctgaaggtctccgggctgacacagccgctgacggctgcgtacaagcacctggacttcaccagcatgccgttgttcaccgctgaccctccggagcgctacctgttcctggacggcgtgaatacgctggatggcacccgcatccgcatgcacctgtaccgcctgcgtttcgatccggtcgcacagctcgacttgatcaacgattcgttcggcgagctcgccctgacggcgggcgttctgttcgacagtgaggctgctgcggactctacgctgggtggcttcggccgcttcgaaacgccgagcgcctga

SEQ ID NO: 505064 - DNA, 534 bp, Stenotrophomonas maltophilia
atggccgagcgcgttccaaaggccggcgcggtcgcggcacagggtagccaatcgccagccgcgcaagcggctggcgaggcagacctcgcgatcctgttcccggacaacgtcattgaaatcgcggggcggcgggtagttatacgtgagtaccgcttcggcgagtcgatggacgttttgcgcatcgccgccccgctgatccaggacatcgctgcgagtgctgaagatgtgccgccgacatgggcatcggttaggccgcacctgcatcaacacaaggacatagtgcttcaggtatccgcactggccggcgatgtggagccagagtggctggcagatcttgcacgcgcagagggcgagctgtaccagcaggtgtggttctcggtgaactgtcgtttttttatgcaggaggtggcactgctcatggtcgagcggcaacgccagctcaagttgtccggtggtcggacatcttcatcgcccttgccggcgccgggctcggagacgctgcccggctcgcccagtacaccgaacgccagctag

SEQ ID NO: 505065 - DNA, 3315 bp, Stenotrophomonas maltophilia
gtgtccaaccgtgactacaccattgatatgcgtctgcgcgccgacttcgcgcgggcgcagcgtgaggtggatgttacggccgccgcactgtctgagatgggcgacgccggtaaggacgctggcaaggccctcaacgaggtcgcatcaggtgcggagacctctagccgggcgatgtccgggttcgcgcgtgcatccacggcggtaagggatgctgtgcaacaggagatccgactcattgccgagctgcaggagcgcttagagcggggggcatcgagctgggaggagctggcggatactgaggcaatgctcgatcgcgcaatggcgaagagccttgtcacagcggatgagtacaacgatgcactcaagcgcctggacaagtctcaagcgtcgctggcgcgttcctcccaggctgagcagaaggcgctcaatgggaccgtttcccgttatgaccaggcagcgtcaaagctggcgcgactggcgtccgacgagcggaagctgaagtcggccgtcgatgcgggcaccatctcgcgggaccagtacaaccgcgcgatggacaacatcggagtgcagcgccgtgcccttcagaatctcaatgaccaggagcgtgcgacgcgccgactggccatctcgcagcaggagctgcggggcgatgtcgcttctgcggcatcgcaggcactgcggggcgacttcggcggtgctggcaccacgctgctcgggctgaccacaaagggggctgctgggttcggcgccctaagccttgcagttgccggtagcacggctgtgctgggggcgttccttgttgcggcctaccaggggcaggacagcctcaacagcatcgaacgatcattgctttcagctggcaacgcggcgggcacgacggcgggcagcattcaggtaatggcgggtcagctcggtgaggcggacggccgtatcggggacgcgcagaaggcgttgcaggcgatggcggcttccggccttgtcgtaggcgacaacctccgtctcgcgggccaaggtgcgctggacttgagccgcctgacaggtgagagcatcgaggctacctcgcagaaagtgcttaccttggtgaaggcgcctactgagggcatggtggagctgaataagcaataccgcttccttacggttgaggttgctcagcacgtccgggcgctggaagaacaaggccgcaccaccgaggccgtaacagcaatcctggagcagtttggggcagtccatcgtgagcgggcagagcaagctgaggcgcaggctggcagcttggtacgcgcttgggcccgcgtcaggggcgcgattgcaagcgcgtgggcggtgatgaaatcgttcgggtcgaacgacgtggctgtgcagctggcgacactgcagaaggacctgcagatcagcctgtggtcgtcggataaccgtgagaccgatcggacgcgcaggctgcggcaggagatcggaaagctgcagggtgagctgaggggggtgcaggagctggcatcaggcgatgctttcgtagctagcatcacgcaagaggccgttgacgcggccaatgccacatcggtcgctctggagaaggcagcggggaaatccgagaagcttgctgatgccctggcagacgtggcgaagcgctaccgcatcctgcgtgacgactcggagcgaaccaatacggacaatccgctgctgaccggtgttgttttcaaagcggacgggtctatcagcggcggcggatatgacaaagaagttgctgcgctcaagaagcagttctcggagaaagctggatccaggactcgggggcgcagtgcggggcaggtcgcgcaggacgctgcgaagcaggagttgcaggatctggctcgaagaatcgctctgctggatcaggttgccgaaggcgaggacaaggtctccgaggcctctcgcgttgcatatgagatcgagagcggaaagtacaaatccgcaagtgaagcaatgaagtcacagctgctcgatgccgcgcagctctacgacagccagaagatgctggttgacgtatcgaggcaggtggcgacctggcagggcgagatctaccggcttcgcggccagcccgtgccacccgagctggaggaagcgacgcgcaagttgcaggcccagaagaaggcgctggaggacattggtcgaaccgacgaagcgtcgaaaatcggtgagctgcttggtttgcgtgaggctagtcagcagctcactgaagtgcgccgtcaatacgaccagatcatggcgcagattggctggcagtcccagcagattcaggccgagcagcaggctggtctcatcacgcaggcagcggcacaaaataagatcgtggagctctacggctcccagctgggtacgctgcggcagctggtcccgcagatgcgcgaggctgcgtctgcgcttggcagtccggaggcgctcgccaacgtctcgcagatcgaagcaaagctgagggaaatgtcggcgacgaccagccttcttcagcagacctttacgaacagcttcgagaacggcatcaccgccagcatcaacagccttgtcgatggaacggcgagcctctccgaagcagtgggcacgttcttccagaccatcgccaaggggatgatcaactacttcgcgcaggattgggctcagcaggcaagtggttgggtcaagggcctgatgggcaaggctgatggcgcgtccactgtcgctgcggcgacctctgccgcgacgatcacgaccggtgccgctaccgcagctgccggaaccataaccgctggggcagcggcagctgccgcgacccttggatctgggattgctgccgccgcagcgagcttggtgaccgccgccgcgacagcagctgcgatcttggccgcgcagagaacggcgagccaagtgcagggcattgtgtccgtgggttcggcaacgcccgtcgctcgcgctgctggcggaccggtgtggggaccgggaagcagcaccagcgacagcattcctgcctggctctcaaacggcgagttcgtcacgcgcgcgatggtcatgcagcagcctggggcgctcgccttcatgcacgacttcaacagccgaggtatggcggctgtgcggaactgggggcggtttgccgccggggggcaggtgtcgctggccggcagctcggtagccgtgcctgataacgctgcggcgctccggggggctggcaaatcccagatcggtctgcgtgtcgtgaatcaagtagatccgcgcctctttgatcagtacctggacgatccctccagcgatcgcatgttccttaacaagatcggtggcaatgccgccgctattaagcaacttctggagatgtaa

SEQ ID NO: 505066 - DNA, 1701 bp, Stenotrophomonas maltophilia
atgggcgtcattctttccacccagagcagcacgggaccgaactggcgcagcgccaacctgagtctcccgcgcaccaggatcccgctgcagttccgcgctgcgctggcaggcgttggtttctacgtggggccaggccatgaggccacggtggtggaacccgagcagcggtcagctggtccgaacctccgcagctcgttcgatgactggtactacaagatccacgtcctgcctctgcgcatcgacctgggcaacctggtcaccaaccaggtgcgctacgtccaggtctggaactcatacctccagcagcagaccctggcgtcggtgactcttgagaacggcgaaggcgtcgagctggtaggtcctggcgccccgccgttggcattctcggccctgcagctgcgccgttggcagctgtcggtcacgacagaaggtccgccggtaatcgcggcgtcgctgtcctacgacttcgtggccctggggcgccgcaccgtcacgattaccggcaatcgcatgtcggcgtggatgctgccgccggattgggagcggcctgtcaccgaaacgctggcctgggcgaccgacgtccagcagtcgatcggcggcggcgaagcccgattcccattgcgtggctcgccgaggcgctcttgggagttcagcgtgctggccgaccggcgcgagcgccaggtgcttgaacacgcgctgttcgactggtcggcgcgtacctgggcgctgccggtctggaacgacgtgtcgtggctgagtgcgcgcctggcgctgggtgtgcagtccatcccggtacaggccgccacgcagcgcgactaccgccccggcggcctggccatgctttggaaggacgtcaccacctacgagctggtggaagtggccgacattgccgccgacagtctgcagctggcccgccccacggccaacgcctgggcacctggcacacgggtgcttccctgcaggacagctcgcattgccgagacccccagcctggaacgcgtgacggaccaggtcatgcggtcgaccgtgcgcctggctgcggtggagacctgcgactggccagcagcggcgccggcggcggtctatcgcggtcgacctgtgctggagcagcgccccgacctcgaccaggcgcagacggccgagttcggccggcagctggtcgtgatcgatggcgatatcggccctgttgccgtcgatgacatcaccggcaaggcatggccactgcagtcgcacgcctggcaaacctgggggcgcaccgagcaggccaatctgcgcagcctgctgtactggttgcagggccgcgcggctgcgctgtgggtgccgtcttgggccgatgacctggagctggtcgagccagccctaaccacctccagcggcatcgtggtggcgtgggcaggcgtggcccgcttcgggcgcgcccaggcaggtcgtcgtcacctacgcatcgagctgttcagtggccaggtgctgtaccggcagctgattgaggccacggagctggatccacagcgggagttcctgcagctggacgcgccgcacggcatcgccctgcagccgagtgccatccgcttgatcagctggatggtgctggcccgcctcagttccgacaccgtggagctgtcccatgaaaccgatggtgagggcgtcgcgcgttgccgcgtgtccttcgccggcattggcgctgaggagagcgaaccgtga

SEQ ID NO: 505067 - DNA, 231 bp, Stenotrophomonas maltophilia
atgtggttccaaattgtgatgctggtggtctcgctgatcgtcagctacgtgatgcggccgaagcccacggtacccaagccagctgctctggaggacttcaatgtccccaccgctgaggacggccgcgaatgcgcgatgaccttcggcacggtctggatcgatgatcccaacgtgctgttttacggcgatctacgcaccacaccgatcaaggtcaagggtggaaagaagtga

SEQ ID NO: 505068 - DNA, 2259 bp, Stenotrophomonas maltophilia
gtgggtagtggcaagaaacagaccgtaggctatcgctactacatgggcctctatatgggcgaatgccttggcccggtcgacgcgctgcgggagatccgcgtgggcgatcgcaaggtctgggacggcagcgcgcaaacggcgtggaccaaggtactcgggatgaacatccccaggacggtgccagccaccggcccgattacagcatctcgatcgatcaccattctggcgccggagatcttcggcggcgacaagggcgaaggcggcatcgtcggcacactggaggtgcgcatgggcgagcccgcccagatgccaagcacctatctgcagtcgctggtgcccggcccgtggccagctgcccgtggcctgttcacgacggttttcaatggccaggtgtcggccatgaacccgtacatcaagaactggacgaagaaggtctcgcgctggcgccaaggctggaagaaggggctttggcagggcgacctggtgcagatcgatgaagggatgaacccggcccacatcatctaccaggtgcgcactgagggcatgggccatccgatcgacgtgatcaacgacgagagcttccgcaaggcggcacagacgttgaagaacgaagggttcggcctgtgcctgaagtggtcccgatcagttcctgcaggtgagttcatggacatggtgtgcgaccacattggtggcatgcgcatcgaggatccggtgacggggctgaccgagctggtgctggtgcggccggactatgacccagccaccctggaagagatcggcccggcgaacatcatcgagctgctggagtggcagcagccgatgctggaaggcagcgtcaacgagatcacggtcgtctaccgggatatcgccaccaacaaggacgcagctgtcacctaccagaatctggccagcgttcaggcgcagggccgtgtcgtcagcagtcgcaagaactaccccggcctgtggaacgctgcgctcgcgggccgggttgcggcgcgcgaagtggcggcagtgagcagcttgccctgcagggtgaagatccgggtacgccaggatgccggccccttcaagcgcgggcaggtgcgtgccctgtcgtggccacggcgcggcgttgcccgcatgccagtgcgcatcttggacgtcgacgacggcacacagaccgagacagccgtggtgctgaccgtcgtccaggacgtcgccggcatggccgctgccagctacatccagccttccgagaacgcctgggtggagccggataccaagcccaagccggtcaccgtgcagcgcctgcaggaggccagctaccgcgacctggccacgacgcttggggcgtcggagctggctgcggtgtcgcctgacgtcggctacctgacctcgatcggtgtacggccgacctcggtggcgttcggctacacgctgcagacccggctgggaagtgcgccgttcgccgaggcgggcgcagccgacttcgcccccactggcctgctgatcaccgcaatgacggccaccacaacggcgatcgcgctgtccgccggcgtcagcctggacatgatcgaggtcggcaccgaggcgctggtcgatgacgagctggtccgcgtggtctcgatcgacccggtggccgcgacgctgaccgtggcccgtggttgcgtggacacggtgccgatgccgcatgccgtgggtacgcgggtgtggttcaccgacgaatacgtcggcttcgacgggcgcgagtacctggccaacgaatcgccccaggcgaagctgatcacccgcaccagtcagggcgagctgaatccggatctggctacgacgatcgggctgacgctgcagcgtcgccagatccggccctatccacccggccgcttgcgcgtgcagggcgaggcctatccgccggagctgtggacgttcggcaccgaactgacggtgcagtgggcgcaccgcgatcgcatcctgcaggccgaccagctggtcgacaccacgcagggcaacatcggaccggagcctggcaccacctacaccgttcgctggtacctcgccggggcattggtgcggacgcaggccgccatcagcggcacgaccgacacctacacgccacccgccggcagtggtgggaagcagatccgtgtcgaagttgaagccatccgtgatggctaccgcagctggcagatccagcagcacaccttcctgtaccgcgcgcagttggtgaccgaggcaggcgatcgccttgtcaccgaagcgggcgcccccctgattctggagtaa

SEQ ID NO: 505069 - DNA, 1653 bp, Stenotrophomonas maltophilia
atggtcgacgtaaagatctctggccttcccaacgccgctgcgctcaccggtaatgaggcgattcctgctgtccaagggggcagcaacgtgaaggtgctgatcagtgcgattcgggctggaatgctcgcagctggacaaatgggcttggctgcggagtccatccaggttgccaacaacatttccacgttgaacaacgcaacgctgtctggcttctaccgtgcagcggcgggctccgagggtaacccgacaccgaccggcgcattcctatgcattcacttgccctcgggaggcacggctacctatggtgcgcagcttggtatctcggaggctgatgggcgaatctatcagcgcctgaagaccaacggagcttggggttcttggatccccaatgcctttgatacacaggtggtgcactccaccggcgccgagaacatcggcggcgcaaagacgttcactgctcggtcggtccatacccttggcgcgcgcataggcgtagaccaggttcttgaaatgggcggggccggcgcgacttttcgcggtaacggcactggtagcctggtcatcggttcagctggccccagcacgggcggtctcatcttgctgcggccgcagggcgaccaggttgctaccaaccaggtgaccatctacaccaacggcgcaatggatttcagcggcgatgcggcatccaagactcagacccgcaccagccttggcgcggtcggtctagcaggggccgagcaggtgtccggtgtgaagacgttctcgtctgaagtccggatccagaacgtggcaccaggcttctggctcgacgagtcggacggcgcaaacggattctttgccgttgtggattcgggcgtcatgcagcttcaagtgagaggcccgaatttcggcggctatgtccgtcaaatgctgcaggtcagcgcatccggcggcacctttgcaatgggcggtgatctggttcgaccgctggcggataacgcccaggccttgggagcgtccaactatcgattcacttctctttggtcggtgaacggcgcggtccagacttctgatgcccgcctgaagacgccgttggagcatatgacggatgtggaggaggcggcgtttctggaaatcggcgctctcccggcgaaatggaagtggaaggctcgtgttgaggaagagggcgatgccgcccgttggcacgcgggcccgtcagtgcaagccgcgatcgccgtcatggagaagcatgggctgagtgcgtttgcctacagcgctttctgctacgactcgtggcctgcagaggacgaggtgtggcgggagtggcccgcacaagaggccgaggttgttgagtggccggcagtgccggagacatgggccgacatcccggcagaagttgatgaggctggcgagattgtcgttcctgcgcgacgcgagttggttcatgaagccatgcctgccggtcgcgtagtactgaaagaagcggtcgaggctggtcgcgagctcatccaatcggcggtcgaggccggcgatcgatacagcttccgcgtatctgagctgcaggcctggatcctggcggccactgcccgccgtgatcgccgcgagcgagaggcggccgagcagcgcctggccagcatcgaggagcgcttggctgtgcttgaatcgaggaagtaa

SEQ ID NO: 505070 - DNA, 738 bp, Stenotrophomonas maltophilia
atgcgaagtgcgctgcgcgcgcttcgccccaaacgttgctgcgcaacgttcgggcccctccccttgccggcctctccccgcccctgtcggggcagcccctcaacagaggggcttgttgctccagatccatcaatgggtttccgccgtgcggggatgcctgatcggctgtacctcgcagaagccactggcgggggatgcgaagtgcgctgcgcgcgcttcgccccagacgttgctgcgcaacgttcgggcccctccccttgccggcctctccccgcccctgtcggggcagcccctcaacagaggggcttgttgctccagatccatcaatgggtttccgccgtgcggggatgcctgatcggctgtacctcgcagaagccactggcgggggatgcgaagtgcgctgcgcgcgcttcgccccagacgttgctgcgcaacgttcgggcccctccccttgccggcctctccccgcccctgtcggggcagcccctcaacagaggggcttgttgctccagatccatcaatgggtttccgtcgtgcggggatgcctggtcgaccgtcccgcttccacgttcgatggccgtccaacgacaggatctgccccacgtcgtggcaccccgcgcttcctgtccacgccctgaccaccggccgtgccgtggcgatgcaacgacacgctggcactcactgcctgttgctatgctcgggccacaggggattgatgcccgctatcgggccggatga

SEQ ID NO: 505071 - DNA, 282 bp, Stenotrophomonas maltophilia
atgtatgcgattgcttttgatttggaccaaagagcgcttcaggctaactaccatgttgcctcataccagaatgcgtatgccgatattggtcgcgtgttggtagcaaggggcttcaacaggcagcaaggaagtgtgtattttggtggtcctactgtgacggctgtcagctgtgttctggctgcgcaagctcttagtgcggccttcccttggtttaagccctctgtcaccgacattcggatgcttcgcatcgaagagttcaacgatctcttccccgcgctgtaa

SEQ ID NO: 505072 - DNA, 339 bp, Stenotrophomonas maltophilia
atgagcgtccctccccctcttcttgaccagccgttgcccgcccggcgcaagctcatgacgccacgggaccgatttttctggtggtattcgggaaccctgcttttcctcggacctttcgggttcgtcgtcgggccgcttatggcccgacgcgtaaaccggaaggcggctcggctctacccggcagaggcccgcgtggcccaggctcgggataaggggttcgcctggtggcagtggtgggccatgaccatcctgaccttgatgggcgcggtgggagcgatgaccatcattagcggcctcccgatgttcctctttgtcatgtatgcccagctgactcagtag

SEQ ID NO: 505073 - DNA, 774 bp, Stenotrophomonas maltophilia
atgaagaagaaccaaaggatggccaccgccctggcggccgcatttcttttgacctcccagagcgcaggcgcacaaacccacccggagcaggaggagatccccagcaaaccggggttcttccgacagttgggcagcagcctgaaggacgctgggcaacagatgatgggggtgaagccggctgcgggcagcaagacgaccaccggcagcaatggggctatctatgcccctgtcaccggcgcagggaagctgcccgggctcttcaaatccgataaccaccagcttgcccagcaaggccgactggactggccccgggttgccctgacgttccaagaatggggcaccaccctgccgtgctggaccgtggaggcccggatctggaccagcgctaccgcctccacgacagagaccttccggacctgcgccaatgctgcgctgacggtggtcgatgacctgggggacatggccgagctcaacacggcggcactttggaaagggcgcgacagcctcacgggcgttcgagtgccggcaggcaaaccgaacaccggggccacccggtccgccggtcctaacccgccgagccagccgttcgtcctcaacgtgagccgtccaggtgtgtccgaccgggccgtcgacgttgccctgagggtggcttgggtcagcggcttcatccaaacatcggatctgcacccgggggccagcggcctgctgacgcccttcaaagattcgcggatgtggatcgccggcttccgggcggaaggcaaccgagaccggtaa

SEQ ID NO: 505074 - DNA, 1011 bp, Stenotrophomonas maltophilia
atgacagtagacggatctgaaaatggcgccctgagcttttctgttattccggaatccgtaccaccaacaaacgttcatgcagtaataggaaggaatggagtaggaaagacgaggctgatacagaacattgtcttttcagtactcaacgcaggcgacggctctacacaactgataaagggccacgaaaactggggattcaccgggatagtttccgtttcatttagtgcatttgatgaaatcgaatttcctgcagcattaaactccggcatgccggtgaattttgtgggactacgcattcgcggcaacgacggacagataaagaccaaaaatccagcgcagttgagcgaagaatttgttgagtgcattaaaagatgctttgaaggagtaaagcgggagcgctggcgcgtgacaacacacggcctgtacggcgacccagtgtttgcggacaccaaccctcttcaattgcttgaaattaattccagtgacctgggtgctgccgcatccgattatttcaaacgcttaagctcgggccacaagatcgttctgctaacagtaaccaagttggtcgaccttgtcgcagagaagaccctcatatttcttgatgaaccggaagggcaccttcatcccccccttctttcagctctcgtacgaagtgtatccaaactgttgtcaagccgaaatggcgttgcgattattgcgacacactccccagttgtacttcaggaagtgccgcgcgattgcacttggataattcatagatccggccgctattctaatgccgagcgtcccgaaattgaaacctttgcagagaacgtctccgtcctgacaagacaagttttcggactcgaagttacccacactggatttatgaaaatgatccaggatgcggtcagcgtcagtcattcctatgagcagctcatccaacactttggcggaaaactgggaacggaaggccgccttattgctaggggccttatcgctgctcgcgataattcggagtcagtgacatga

SEQ ID NO: 505075 - DNA, 867 bp, Stenotrophomonas maltophilia
atgagaagagtgagagagccgagctatagtgtctcccaggttctagctgtatgtcttcgtcatacggaagaccatagcctcgtagcccgagcaaacgccgcgctaagtaactttaccgaagctgagattgattaccgaacaaaggcagacacgagggagctctataaaattgctgagtcaccagctgtcggagccctattgtcgaaggatgaaatatccttcctatacaacaaactttcaagctcgactcctgaaactcggatcctttacgatcacatcaaaggtctcgcgaggggaatgatatgccctctgtgcaatcaacgcacagtatcgacccttgatcattatctagcaaagtcattgcatggagcattggtgattacgcctataaatctcgtgcccgcttgcaaggattgcaacaccgactctggaactcgacgatcaacttctccgggggatcaaacattccacccatatttcgacaatggcgacactgagacctggattgtcgccaggataacccccgaatcaccacctgccgccattttctcgacgtcgaagcctgcaagctggagcgatgatttttatctctccgcggaggctcattttagagacttcagactagctaagctttattcagcccaggccggacaggagctggttaatatttacatggacataattaactcaccgaatagtgaagatccgcacgagcttcgccagcatttcttggaaactgcaagaagacgaagattccctgttcgaaacagctggcaagctgcactttatcaggctgccgcggattcagcatggctatgcgacggaggctacttggagatagcaaacagcgaacttcttcaagactag

SEQ ID NO: 505076 - DNA, 936 bp, Stenotrophomonas maltophilia
ttggttggcacgaaatccacagcgccgaccagggtcggcatctaccaaaaccggttgccggccagcggccggcactaccccctgcaacaaccgatgcatcgccctggtaggtgccaaccttggttggcacgaaatccacagcgccgaccaaggtcggcatctaccaaaaccggttaccggccagcggccggcgctaccccctgcaacaaccgccgcatcgccttggtaggtgccaaccttggttggcacgaacccacagcgccgaccgaggtcggcatctaccaaaaccggttgccggccagcggccggcactacccctgcaacaaccgatgcatcgccctggcaggtgccaaccttggttggcacgaaatccacagcgccgaccaagttcgacatctaccaaaaccggttgccggccagcggccggcactacccctgcaacaaccgatgcatcgccctggcaggtgccaaccttggttggcacgaaatccacagcgccgaccaagttcgacatctaccaaaaccggttgccggccagcggccggcactacccctgcaacaaccgatgcatcgccctggcaggtgccaaccttggttggcacgaaatccacagcgccgaccaagttcgacatctaccaaaaccggttgccggccagcggccggcactacccctgcaacaaccgatgcatcgccctggcaggtgccaaccttggttggcacgaaatccacagcgccgaccaagttcgacatctaccaaaaccggttgccggccagcggccggcactacccctgcaacaaccgatgcatcgccctggcaggtgccaaccttggttggcacgaaatccacagcgccgaccaagttcgacatctaccaaaaccggttgccggccagcggccggcactacccctgcaacaaccgatgcatcgccctggtag

SEQ ID NO: 505077 - DNA, 3333 bp, Stenotrophomonas maltophilia
ttggctgccctgcgcacccagcgtgcgcaggctcagggtggaaaggccacggatgtccagctccggcttgaccacgccgggcgccttcaccaggccgctgtcgtacagcaggcggttgtcgccccatacctggaactgcaggccgccggcgttgcggcaggcgtcgtcgatgccgaggtcggcacgcagcaggtgccagccgccctgcaggcgcaggtcgatgcggctgctggcgccgacccccaggccacggcggaactgcaggccgttcatgcgcatgccggcgtcgccacggaaggactggtcggtacgcagctggctggccagcgcggccggcaccggcagctcggagagatagcgctgccgggccggtcgctccggttcctggtgttcgagaatgtggaaggtggacagggcgatcgggccaacatcgcgcggctgcagtgcatcgaacgcgcgggcgctgccctgtgcggcggtgaccatcgggtcggtgctgctggcgccgtcgccttcggggttctgcacgctcagcacgcggaagcgcagcaggcggccggcgtgggccgggaagtcgatgcgctgcacgccttccttcaactgcaggcggccacgggcgatcggctcgccccactcaccgttgctgtcgcccaggtagacctcatagtcacgtacctgcccgtgcttccagttcttgtcattgcgtggcgcgatgtcgatgccatcgatcatcttccgctcgccgaagccgatcacccactcgtgggcgccggtgcgcacggcctggttgcgcacgctgcggaaccaggtggccggatcgtcgtcgaaagcattttccaacgcatggccaggctcttcggccgggcggttgaccaccagcaggctgtcggccggcagttcgcggcccagcaccggtgcggccggataggcatcatcggtggctgcggcagcgactgcgaagtccagctgcagctgcagtggctggcggatgtcctgggtggcagtgcgcacatgcactgtgccgcggcggtccttggcatcgaagtaccagccctcgttggcgctgttgaaggcggcagcatcggccagcgccggcagcgcgcggccaccggcctgcaccgcacgtggtgcctgccggctgagtacgcgcaggccgtagcggcgctgcgccagctggccgttgtactggccctgcacggcgtcgatctgcacctgcaccgggccactgccctgcgccggcgcctgcacgcggattacctgcgtgctcgactcgccctgctggtagcggcgcgtgttgccatcgtcttcgtacaacgtgtactgcgagtcgccctgcgggtacaggtcgaaggtcacttcatcgagcggtttttcgccatcgaacagcatcgacgggtacatcggcaggatcgcaccggcacgcacgaacaccggcagcgtggccaggtccacctggcggtcgagctggcggccatcggcggcggcctgcacgcgacggccatcccagtagtcgatccagccgccggccggcaggtggatgtcgcggcgccagccacggctggcggcctggctgcggtacaccggcgccaccagcaggtcgcggccgagcaggaactggtacttgtaggtttcatcctgcgcatgcgggtcgcgcgggttgtcccacatcaggccacgcaccggcggtgcaccggtctgcgcggcctcgtgcaccagcccatacatgtatggcgtcaggcgcatcttcaacttcaggtagtcgcggttgatgctgcggtagggctcgtcgtaccaccacgggtgcttgcgcgcgttcgacgaccagccgctcatgcccatcagcaccggcgtgaacgccttccactgcaggtcgcgggtgaaggtctcggcgcttccgccgaagatcgcatccacatcgccgctggcgtaggccatgccggacaggcccgaaccgaccagggtcggcacgtgccagcggatgtaatcccagctgctgctctggtcgccggtccatgccaccgcgtagcgctggatgccggcccagcccatcaccgtccacaggaacgggcgcgaatcggaattgtcgaggatgccgttgaatgcctggcggttggcgtccatcgcgaactggtagcccttgccggtccaggccacgtccagcttctgcacgcggctgccggccttgcccacttcccacgcgatcttgtcgacgccgttctcggtccacaggccggtgcggaagccgtacttggccaggccctgcacggtttccggcaactgcttgtagccgcagccgtagccatcgttgggcaggatccagccaccgggcatgtcgtgggcgcggtactgcttggccacgctgtcgatcacatcgggcgtggtgccggtcgggccgtcgctccagccttcgggcacggtgccgggcttcctgctgttgtcgccgtcgttgtagcaatcggcatcgccgtaggacagcgcccagcgcgcgaccatgttggggcggccggtcagctgggtgtagcgttcgatcagcttgggcaggtcggcgcccacgaagtagtacgcatcgaagcggtcttcgcgatgcagcagcgtggcctggtcgctctggcgcaggtcgtagctgccatcgctccatgtattgcgcagcatgccccagccacggctgctcagcagcatcggcgccgggctcggccgatcaccttcttcccagccaccggaataggacacctccagctcgcggcccttgaactggtaacggccgttctgctggccaccaccgaagtagccctcatcggcctgcgaggacagcacctgcacgctctgcgtggcatccaggtccagcggttgcagttcctgccacagcgcggtgggctggccattgtccagccgttccaggcgcaggcgcagcggctgccgctgtacatgcagtaccagtgcctcggtacgcacgcggatttcctgtgcgtcttcttccagctgcgcctgcacgctcgccttgggctgcggcagcacaatcggcgcggccttgtcgccggcgccggtcaacgtgccgttgcggccggcctgcacgcggatgatgtcggtcgccggcagttcaatgcggatgcgcgcgcccttgtcggtctgcaggtcccagccctgcacgccgtcgcggctggcgctggcgcggacggtacgcaggttgccgaccggctcggcgcgggccgtcatggacgccagcatcaaggccggcaccagggccagcatcagcggcgagcgacgaacgcagttttccacgcggactcccaacccgttcaccgggcgtttcgaaagcggttgggccgactctag

SEQ ID NO: 505078 - DNA, 285 bp, Stenotrophomonas maltophilia
atggccgctgcgcaggtagccaccgacgtcccggtgcagcagggcgaataccaccgccaccaccagcagcaggcacaacgtgcgcatctggtggtagagcagggccaggcctgcaccgagacaggccagcagccagggcaggatgcgctgcgccgggctggcgacatcctcggtgcccagcgccatccacagcaccaggacgaccagcacggcgggcagcacgaacaggtaatgcgcaggctggcggagcggatgcaggggcacgcggtaagtccagtgcggtga

SEQ ID NO: 505079 - DNA, 936 bp, Stenotrophomonas maltophilia
atgaagaaccactgggaagtgggtgtagtgttagcgctgcgcgacgcgcagtggcttcaagctaacgcgggcgcggagatccctcctctgaacatttccctagatggaaatgcggaatccaagatgggcgacggcgttcatcaggtcggcgaaaaattcgccctattagagatcaagtcggatcaatccggttgtcagagcgagtggacgggaagcaagggggaaaagcgtgcttacaagaagctcatggatctggcagcacgcgacgaagtcaacaatggtgcagccgtctcgagggagctactgagccagagcacgcgaggacacttttttgcatattgggggcagaccgaaagtgctcagagtcatttcgaccagcttttccttcagccgtatcttctgacttccttagaagccatacctgccaaagcaagccataaaagaccgggctcgtgctattcagggagaccaagctcacagtatgcgtttgcccttatacgctcactgacggttggattgacagacggatcgtctttcgctcctcgctggcctttaactctcgcagaacttttttccccccaccacacaccccgcttctgccagaaggatccgaccgctacatccgttaaagagacggaccttatggagttgggccttgacgtggacgaactccaaaactacgtcaacttcctatgcctcgaaaggcagtcggacggatgcgacagagacgctttaggagaagaacttaagttgatgcttatcgggagccaaggcttcgtcaggcatatatcccgcacgaatgagttgatgaacgtaatcgccgcttaccgcgacaataccttggtgcccaccccaggcctcacgccagaaatcagccagtaccctcagctttctgtgacccagccaaggtcgacgtttggcgtcaatggttcatga

SEQ ID NO: 505080 - DNA, 741 bp, Stenotrophomonas maltophilia
atgatgcaggactgggcagatcgcctcgacctgctcgaacagggccaggtcgaagcggccagcgcccacctcaccatccatatcgagggcgtgccagccatcgcaggggaggacaaccccgacgccatcgttgcaggcacttctgcggcttcggttccgcccgtggtggtcacccccattgtcgtgacgccaaacgacgcgggaatcaccttccagcggctgtcgcaggtgccaccgcccccgacgcatgcgccggcgccggaagtatccgccatccagcgcgagcgcgaggaaatgctcgccatctacgaatcgccgagcagtttgccggtcccgctgttcggcaagcttgccgggaagtccaaggaccagataaaccgcgagctgaaggcgggcaaactgctgtccatcagcttaggcaatcgcgggcaacgtgtgcccgactggcaactggtgccgctcaagcacaaactggcccaggtgcttatgaaccagtgtccgcacgcggattcgtgggacctgtaccggatgctgacccgcctacacccggatctgggtgatcgcgcggccatcgacatcgtgacacccggaaatttgggcatggtcgtgcgggtcatcatgggtacccagcagcagccacataggcccggacctgtttcgtctgcgcaaggtattccagtggaggctcggcagagcattcaacggttgataaatgacgctgcgatgctcgaatgtgcctga

SEQ ID NO: 505081 - DNA, 3120 bp, Stenotrophomonas maltophilia
atgatcgccaaactgattcgatggtcggtggccaatcgcttcctggtgctgctggccaccgccatgctcacggcatggggcgtgtggggcgttcgcagcacgcccgtggatgcgctgccggacttgtcagacgtgcaggtcatcattcgcaccaactaccctggacaggcgccgcagatcgtcgagaaccaggtgacctacccgttggccaccaccatgctgtcggtgccaggggccaagaccgtgcgcggcttctcgttctttggcgactcgttcgtctatgtcttgttcgaggacggaaccgacctgtactgggcccgctcacgggtaatcgaatacctgaaccaggtccagggccgattgcccgccacggcgaagccggccctgggtccggacgccacgggcgtcggctggatcttccagtacgcgctcgtggatcgcacgggcgagaacgatctggcgcaactgcgtgcgttgcaggactggttcctcaagttcgaactcaagagcctgcccaacgtggccgaagtagcatcggtggggggcatggtcaagcagtaccaggtcgtgctcgacccgatcaagctggcgtcctatgggctcagtcaggctcaagtccgcgatgccctgatgggggccaaccaggagaccggcggctcggtcctggaattgtcaggcgcggagtacatggtccgcgcgagcggttacctcaagaccctggacgagttccgggagatccccttgacggcacgcggcggtgtgccggtgcggctgggggatgtggctacgctccagataggcccggagatgcgacgtggcattgccgaactcgacggagaaggcgaggtcgccggcggcgtggtggtgctgcgctccggcaagaatgcccaggagacgatcgctgccgtcaaggccaagctggcggagctgcagggcagcctgccgccgggcgtcgagatcgtcaccacctacgaccgcagcgcgctgatcgagcgggccattcgcaatctcacgaccaagctgggcgaagagtttctggtggtggcgctggtctgcgcactgttcctttggcatcttcgttctgcgctggtggccatcatctcgctacctctgggcgtgatgacggcgttcctggtcatgcgctaccagggcatcaacgccaacatcatgtcgctgggagggattgccattgccgtgggggcgatggtggatgcagcggtggtgatgatcgagaacgcccataagaagctggaagcttggcagcacgcgcacctggatcaacggctgcagggcaaggaacggtgggacgtgatcacacaggccgcggaggaagtcggtcctgcgctcttcttctcgctgctcatcatcacgctctcgttcatcccggtcttcaccctagaagcgcaggaaggccggctgttcggcccgctggcgttcaccaagacctacgcgatggccgcggccgcagggctgtcggtgacgctgattcccgtactcatgggctactggattcgcgggcgtatcccggatgagcagaagaaccccatcacccgcatcctgattgcagcctaccggccagccctggagtgggtactgcgccggcccaaggcgacgctgctgatcgccgtgctggccttggcgaccacggcctggcccttggcgcggcttggcggtgagtttctgccgaggttggacgaaggggacctgctctacatgccctcggccctgccgggactctcggcgcagcgcgccacggagttgctgcagctgagcaaccgcatgatcaagaccgtacctgaagtggacaaggtgttcggcaaggcaggacgggccgaaactgcgaccgatccggcgcccctggagatgttcgagaccacggtgaagctcaagcccagggaacaatggcgtccaggcatgacgcccgagaagctcgtggaagagctggatcgtgccgtgaagatcccgggcctgtccaatatctggattccccctatccgcaatcgcatcgacatgctggctaccggcatcaagagcccgatcggggtgaaggtgaccggcaacgacctgggcgtgatcgatcgcatcgctgcagaggtcgagcaggtcgccaagggcattcccggcgtgacgtcatcactcgcggagcgcttgacgggcgggcgctacgtggatgttcagatcgaccgcgtagccgccggtcgttacggcctgaacatcgccgatgtccaggcggtcatcgccggcgcggtgggtggcgaaaacgtctcggaaacggtcgaggggcttgcccgctttccgatcaatctgcgctacgcgcgagaatggcgtgattcaccacaacggctggcagaactccccatcttcacgccgatgggtcagcagatcacgttggggaccgtggcacgcatcgcgatcaccgatgggccgcccatgctcaagagcgagaacgcacggccctccggttgggtctatgtcgatgtgcgcggccgtgatctagcctcggtggccaacgaactgcgcgatgcaatcgggcagcaggtcaagctggagccaggtgtgagcatcacctactccgggcagttcgaatacatggagcgggccaatgcacgcctgaaggttgtagtgcctgccaccctgttgatcatcttcgttctgttgtacctgaccttcgcgcgtgtggacgaagcgggcttgatcatggcgactttgcccttcgcgctcacggggggcatctggttcctgtacctgctgaattacaacctgtccatcgccaccggcgtgggattcatcgcgctggcaggtgtggcggcggagttcggcgtagtgatgctcatttatctgaagcaggccttggcggaacgttgccccgatagacgcgaaccgacgcgagaagaactgctcgatgcgatccgggaaggggcggtgctgcgcgtgcgcccaaaagcgatgaccgttgcggtcatcctggcgggcctggtacccattgtttggagcagcggcacgggctctgaagtcatgagccgcatagcagccccgatgctcggcgggatggtgaccgcaccgttgctgtcgctgttcgtgattccggctgcctacctgctgatgcgtaagccacgctaa

SEQ ID NO: 505082 - DNA, 1518 bp, Stenotrophomonas maltophilia
atgaatacctcttcgagaaacatccttgccggcttgacgctggttgctgccggtattgccgttggatgggccgtcgcccaatggcgcgccggccacctcagcggctcccccgctgccaacgtcaccgttgcaagcgctccgaccgagcgcaaggtgctgtattggtacgacccgatggtgccgacccagaagttcgacaagcccggcaagtcgccctacatggacatgccgttgatgccgaagtacgcggatgaagacacgcaagacagcacgggcctcagcgtgtcggcgcaagcggtgcaagccctagggctgcgtacagccgaagtcctgcaaggcaagatcggcgcagatgtgaacgtcgtgggcaccgtgctgctcaacgaccgcgacgtcagcatcgtgcaggcgcggaccgctggcttcgtcgagcgtgtctacgcgcgggctgcaggcgacgtgatcgcagcaggggcaccgctggctgaccttttgctgccggagtggatcgccgcacagcgcgagtttctctcggttcgcgcgatgggtgacgcacctttgaccgcagctgcccgccaacggctgctgctgctcggcatgccgcaagccctgatcgcccaagtggagcgcacaggcgagcccaaggggctgtacacggtcacaacacctcaaggcggcctggtggccgaactgatggtgcgccagggcatgacggtttccgccggggaaagcctggcccgggtgaatggcttggccacggtgtggatcgaagcggccgtccccgaagcacaaagcgggccattgcaggtcggccaaacggcgcaggtccggctggcggcgtttcccggtgaagtgctccaggcgcgcatcgtgagcatcctgcccgaagccaaccgcgacacccgtacggtgcgagtgcggcttgaaatggccaatcccgaccagcgcctaaaagccggcatgtccggccagatcgcgctcaaaggcaacgaacagcccgcgctgcttgttcccagcgaggcggtcatccgcaccggcaagcgcgcactggcctatgtggtcgatggacccggcaagttccatcccgtggaggtccaggtgggcgcggaggtaggcgatcagctggtggtcaacggcgggctcgcggcgggacagcaggtcgtggcctcggcgcagttcctgatcgactcggaagccagcctgcggggcgtgctgcctgcaggtgccgcggcgtccgcgtctgcatcggcgcacaacgggcacggcacctcgtcgccaccggccgcggcaaacaacgctttcgtggtgcgcggcgtgatcgaggagatgtcgcccaccgaactgacgctggcgcacgaggccgtgccggccctccaatggccggccatgaccatgggcttcgagctgagcagcccgcacctcgccgcgggtctttcggttcggcagcaggtgcgattcaccttctctaagcaaggtgaagactacgtgatcaccgccattgaaaaggtgcagccatga

SEQ ID NO: 505083 - DNA, 1308 bp, Stenotrophomonas maltophilia
atgtttactcccttttttggcgcccccgaggggcgcccgtcggcgtacggccgaggcacaacgccggcctcgatgcgattgcatcgtctgaaagctatcagcatcgcgttggcgggcagtgcgcttgtttcgcctgtagcctacgccctcgattttgctgaggcacgccttatcgccgagcagcagagcccgcgcataagcgcgcagcagttgcaggtcaacgtcgccgaatccgtgcagaaggcagcaggctcgctgcccgaccccaagctttcgctcggcatcgaaaactaccccatcagcggcatggatcgctggagcatgacgcgcgaatccatgacgatgcagcgcctggcgctcatgcaggaagtgcctaatagggccaagcgcgacgcccaggtcgccagcgcacaggcgcgtgtggatcgagagcgcgcggcgctggttttgcagcgattgcagatccgtcaggaactcagcctggcgtggatcgccgcgcaggcggtggagcaacgggagatactgctgacggaactgctcgcggagaaccagcgcctgcaagacagtctccccgctcgcgtcgccggcggcaccgcccaggctggcgacttgttggtcgcgcaacaggaggcgctgacactcacggaccgccgtgacgatctacagcgggaccgggtcaaggctagggccgcgttgcggcgctgggtgggctccagggccgaggaagcactgcaaggcgatccaggcccgctcactcgccccgtcgcgcaactgcgcgcagaactggcgaatcacgcggagcttgaactctatccggcgatgcaaagcatggcccgggccgagtcccgcgaagcccaatcagaaacccgcggcgattgggcctgggagattgcctatagccggcgtgatcgccgatggggcgacatggtgtcattccaggtgacattcgatctgccatggcagaaggatcggcgccaagtgcccatgatcgaggcgaaacggcacgagttggaacgtctggacgccgaacgcgaagacgtggcgcggcggcatttgcaggagctcgacgacagcgccgccgaactccaagcgttgaacagccagatcgaccgcctgcagaccgccggcttgcaactagtacggaaccgagcggcgcttgcgttgagcaactaccgatccgccaagggggacctgagcgctgtgctcagcgcacgcgcacaggtgctggagacgcgcatgcgtctgatcgacctcggagcgcagcgcgacagcctcgtcgcccgactgaacagcctgatcgcggactga

SEQ ID NO: 505084 - DNA, 243 bp, Stenotrophomonas maltophilia; identical to SEQ ID NO: 324058

SEQ ID NO: 505085 - DNA, 891 bp, Stenotrophomonas maltophilia; identical to SEQ ID NO: 347323

SEQ ID NO: 505086 - DNA, 330 bp, Stenotrophomonas maltophilia
atgaaatcgcaaattgtcattgccgccctgttgagcgctctctccgtgccagccttcgccggtcatgcagcagcccaagcagccaaggaaatggttcccttggctgacgggggaacgctgtacatcttcaaggacggaaagatggcacaggaaagccgcttcgggcgcgccgtctatctcaatgtcggagcttcggtgtcgacgaaggatgggcgcaacatcgcgatcaccagcaatgaagtcgctcgcctcgggtcgctgctacaaaaaagagcacggcggatgacgccgcgggtgtgcggtgcttttcaaagcttctgcacagtgtga

SEQ ID NO: 505087 - DNA, 927 bp, Stenotrophomonas maltophilia
atggccggggattggttgaccatcgtcctgcgcctggcgctgtatctggacctggcggcggcgtttggcgtcgccatgttcggtctctatgctttgggcaacgacgagcgatcctcgacgatctcgcgccgctatcgcgtcctcattggcgcatccgctgccatcggcattgccctgtcgatgtggggcatgacggtcatggccaaggccatgtccggtgcccagagctacgcggagctgtcaacgcacgtcttcgacatgctcattacgggcacgcacatgggcatcgcctggtgcattcgcatcctcgcgctgttggtgtgtgtgctcgtcgcaatgttgaaattgaacgctaccttgcgatttgcagtgatggcgctctccaccggcgtggcgctggcgacccttgcgtgggcaggccacggcgcgatggacgacggcgttcgcggctacatccatcttgcgtcggatatcacgcacctctgggcagcgggcgcttgggtgggcgcattggtggcgttcttgatgctggcatcccacaagcaggatgtcgcgcaagacccggtagcggtcctcagtcggacgtcgaatggctttgctcgcataggtacagcgatcgtggctgcactcgtcgtgagtggaattctcaattacctgttgatcgccggaccatcgtttgatccgctcatctcgacgctgtatggccggctgctgatggtaaagctcttgcttttcgcaggcatgctggcgttggctgctgccaatcggtatcggttgagcccgagcctggaggctgctttgaaggcaggcaatcgcgcacaggcagtcatcaagcttagacagagtctgttcacggaggcgaccttggccgttttggttctggcgagcgttgcatggcttggcatcttgtctcccactggaacctag

SEQ ID NO: 505088 - DNA, 387 bp, Stenotrophomonas maltophilia
atgacccgttcacatttcatcgccaagctcgtcgcgccgatcgctgctggtctgttcgccaccgccgcattcgcgcatccttcgctggtgtcttcaacgccggccgacaagtcgcaggtttctgcgccagccaccattgagctgaagttctccgagacgctggtgccgcagttctccgccgcgagccttgtcatgactggcatgccgggaatggcgagccatggcccgatgaagatcaacgccagcgtcgcggctgccggcgacggcaagaccatggtcatcacgccggcacaggcgctccagcccggtgactatcgcgtcgaatggcgtgccgtctcctcggacacgcatccgatcacgggtaacgtcaccttcaaggtgaagtaa

SEQ ID NO: 505089 - DNA, 2439 bp, Stenotrophomonas maltophilia
atggcggcgggtgccacaacgtccggcccgcataagcaccaccatcacgccagccatgccggcagtgacgacgcgggcgggtcctcaagccactcgcagcccgatgccgcgacgcgcgatccggtgtgtggcatggcggtcacggcggcgtcggagcaccgctccacgcacttggggaacacgtacttgttttgcagcaccggatgcaaggccaaattcgacaccgatccggcgcgatatgccagcggtggcgcgggcataggcacaggcagcggccatgcgccgcatcaccatgccagcaccgcagtttcaccggccccggcggcatcgccaaccgcacccggaacgatctacacctgcccgatgcacccggagatccgccaggatcatccgggaacctgccccaagtgcgggatgacgctggagcccctgctgcccgacctcgacgacgacaacccggagttgcgtgacttctcgcgtcgcttctggtggaccttgccgttgacgctcgtggttctggcgctggcgatgctgggtgagcggctgcacctgatggacatggccacgcagagctgggtcgagttggtgctgtcgttgccgatcgtgctgtgggccggctggcccttcttctcccgcggctggctgtccgtggtcaaccgcagcccgaacatgtggacgctgatcggcctgggaacaggtgcggcattcatctacagcgtcgtggcaaccgttgcgccagaagtgtttccggcatccttcatgtccatgggacgggtcggcgtgtatttcgaggccgccgccgtcatcatctcgctgacactgctcggccaggtgctggaactcaaggcccgctcccagacttcggcagccatcaagtcgctgctggggctggcacccaagacggcgcggcgcatcaatgcggacggcagcgaggaagacgtgccactcagccatgtgcacgtcggcgacctgctgcgcatccgacccggcgagaaggtgccggtggatggcatcgtgcacgagggcagcagctcgattgacgaatccatgctgaccggcgaaccgctgcccgtcagcaagcgcgtgggcgacaaggtcatcggggccacactcaacaccagcggcgcgctgatcatgcgttcggagcggatcggctcggacaccgttctatcgcagatcgtccagatggtcgcccaggcgcagcgttccaaggcaccgatgcaacgcatggccgatgtcgttgccggctacttcgtgatggccgtcgtcgccattgcggtaacgacgctccttgtatggggattcttcgggccacagcccacctgggtctatggactgatcaatgcggtggccgtcctgatcatcgcctgcccgtgcgcgctgggtctggccacgccgatgtcgatcatggtcgcaacgggccgtggcgccacgcagggggtgctgttccgcgatgccgcggcgatcgagaatcttcgcaaggtcgataccctcgtcatcgacaagacaggaaccctgaccgaaggccgacctgctttcgatcaggtcgtcgcagcgcccggctttacgaacgatgaggtgctgcgtcttgcggccagcctggaccagggcagtgaacaccccctggccgacgccatcgtgcaggccgcgcgtgcccagggcctccaactcgtgaagcctcagacctttgaatcgggaacgggcatcggcgtgcgcgggaaagttgagcaccggaaactggcgttgggcaatacggtgctgatggagcagtctggcgtgtcggttgagccgctcgtaccccaggcagaagccctgcgcggcgaaggggccagtgtcatgtatctggctgtggacgggcagctcgcgggcttgctcgccgtatccgatccggtcaagggcagcacccccgaggccctggccgcgctgaaggctgcgggcctgcgggtcatcatggccaccggggacgggcagaccaccgccaaagccgtcggtgcacgcctgggcatcgacgaggtgcatggtgaggtcaagccggcggacaagctcatgttgatcgagcggctgcagaatgaaggtcgcatcgtcgccatggccggagacggtatcaacgacgcgccggccttggcaaaggcaaacgtgggcatcgccatgggaacgggaaccgacgtggcgatgaacagcgcgcaggtcacgctggtcaagggcgacctgcgtggcatcgctgtcgctcgcacgctctcggtgagtaccgtgcgcaacatgaagcagaacctcatgttcgccttcctctacaacgcgctgggcatccccatcgccgccggggttctctatcccctgacgggctggctgctgtcgccgctgatcgcagcattggcgatgagcctgagttcggcgtcggtcgttggcaacgccttgcgcctcagagcgagccgactgtga

SEQ ID NO: 505090 - DNA, 273 bp, Stenotrophomonas maltophilia; identical to SEQ ID NO: 451662

SEQ ID NO: 505091 - DNA, 486 bp, Stenotrophomonas maltophilia
atgaacatgcactacgacagaagccagggcaaagtgccgagacgccaagcattgatcgctggcttgttggtgatggcactcgcaggaccgagcctggcgcagagccgaccgatcgccaaggtgtggaaggacccgagctgcggttgctgcaaggactgggtctcacacctgcaaggcgcaggcttcgatgtgcaggttcttgacaccgggaacacggcagcgcgcacgcggctgggcatcccgcagaagtacggttcgtgccacacggcgcagatcggcggctatgccatcgagggtcatgtgcctgcctcggacattcaacgcttgctgcgcgaagccccgcaggccatcggcctcgcggcgccgggcatgccggtcggttcgcccggcatggatggtccggcctatggtggacgcaaggacgcctacgacgtgctgctgatcgggaaaaacggtagtagcacggtctatcagtcgcatctctga

SEQ ID NO: 505092 - DNA, 981 bp, Stenotrophomonas maltophilia
atgtccaaagcactccccactcgcgcactggccacgacgctcctggccctggtaagcgtcgccgcccaggcacaagcacagaacgaccatgcagcgcacggccagaccgacgctcaaacggccgcgccatccactcagaccgtgcctcctgccgccgatccgcacgcgggtcacgcggcgccggcgagcggctccaccgcagccccggccatggatcacggcaacatgcagatgcagggcgggtcggcgcctcctgacgcccgcgatccgcatggctactccaatggcctgacattgggatcgggcgactacgccgtacccggtgtgccgcggctgatgctggccgacgaacacaggttcttctcgttgcgcggcgaaaccctggaacgccgcttcacgcgcaaaggggacgattccacggcctacgacctccaggcttggtatgggacgacctacaacaaggccgtcgtgaaggccgaaggcgatatcgccaaaggaaagctcgaagaatcgcgtaccgagcttctctgggggcacgccgtcgcaccgtactgggacacccagctcggcgttcgggtggataacggagaaggcccgagccgtcaatggttggctttcggcatccagggcctcgccccctactggttcgagctggaggcgacgggctacgtgggaagtggcggacgtacggcgctgcgtgtcgaaggcagctacgagctgctgctgacccagcgactgattctggagcctcgtgccgaattgcagttctatggcaaggacgacccggaacgcggtatcggcaagggcttggccgaagcgtctgctggcttgcgcctgcgctatgaattcagtcgccagttcgccccctacatcggcgtggaacgggcgggcagcttcggacgcacagcggactatgtgcgtgccgaaggtggccgcgcgcagcagacgcgctgggtggctggcgtgcgattctggttctag

SEQ ID NO: 505093 - DNA, 1920 bp, Stenotrophomonas maltophilia
atgccgcctcgttcacccttttttatcgtgcccacacagggcctttctcgtcggcgtttcgtccaagggttagccgccggcggcgttctcgctgggctgtccacgccggcgttcaaggcatttgcccagcaaggctccgcgacgcgcggtgccgcccctgtgctgaagggcaccgagttcgacttggtgatcgccgaatcgcccgtgaacttcacgggcaagccaggcgtggctacgaccatcaacggctcgctgccggcaccgacattgcgttggcgcgagggtgacaccgtcacaatccgtgtaaccaacaagctgcgtgaagccacatccattcactggcacgggatcatcctgccgtatcagatggatggcgtgccgggcatcagcttcaatggcatcgctcccggcgagaccttcacgtaccgcttcaaggttcagcagagcggctcctactggtaccactcgcactccggcttccaggaactcacgggcatgtacggggcgatcatcatcgaccccgctggcgccgagaccatccacgccgaccgtgaccacgtgctgctgttctcggattggaccgacgaagacccgatgcgggtgttcaccaagctcaagtcccaaagcgactattacaactacaaccaacctaccgtcttcgacttcttccgggacgcctcgcgcgaaggcacggccgctgcgatcgacaagcgcaagatgtggaacgagatgcggatgaatccgacggatctcgcagatctgtctgccgccacgctgacctatctggccaacggcgtcacccccgccggcaattggacggcgctgttccgaccgggtgagcgcgtgcggctgcgcatggtcaacggtgcgggcaacaccttctacgacgtacgcattccaggactgaaactcacggtggtgcacgtcgatggtgttgacgtggagccggtgaccgtcgatgagttccgattcggtcctggcgaaaccgtcgatgtgatcgtccagccacgggatgacgcttacacgatcttcgcccaggcgatggaccggacaggctacgcgcgtgccacgctggccgtgcgtgaaggtcttcaagctcccgtgcctgccctcgatccggtcgaatggctgaccatgaacgacatgatgggcggcatgatggggggcatggaccatggcgggtccggccaggccatggagatgaccgggatgaccgggatgaccgggatgacgggcatgacgggcatgaccgggatgaccgggatgggctcgggttcgatgtccgggatggatcatggggcgatggcaggcatgaatcacggcgccatgaaccacggtggcatggcgatggatcacagccaacacgccgcggcggcggggggactggccgtgcccagcactactgctcgccacgctcgcaccgagtatggttccagcacggacatgcgcgttgacatggcgcgcaccaacctcgatgaccccggcatcggactgcgcaacaacggtcggcgcgtgttgaccctcgcggatctgcataccccgtcggggccgttggacaagagaggccctggtcgggaggtcgaactgcacctcacgggcaacatggaacgctacgcatggtccctggacggactggagttcggaaagtccacgccggtgcacttcaaacacggtgagcggctgcgggtcattctgcacaacgacaccatgatgacccatcccatgcacttgcacggcatgtggagcgagctggaaagccccgacggtcgcttcctggcgcgccgccacaccctgccggtgcaaccggcacaacgcatcagtttcctggtgacagccgacgcgctcggccgctgggcttggcactgccacctgatgttccacatggatgccggcatgttccgcgaagtcgtggtgtcttga

SEQ ID NO: 505094 - DNA, 693 bp, Stenotrophomonas maltophilia
atgaaactgctggtcgttgaagacgagaacaagacggcggattacgtccgccaaggtctcatggaggcgggattcgtcgtggatctggcgcgcaacggattggacggacaccacctggccatgggcgagacatacgatctggtggtcttggatgtcatgctgccggatgtcgatggctggcgcatcgtgcgtgcccttcgagatgccggtaaacaggtccctgtgctctttctgacggcgcgtggcggtgtagacgaccgtgtcaagggattggaactgggagcggacgactacctcgtcaagccattcgcgttctctgagttgctggcgcgggtgcggacgctgctgcgacgcggaagcgctccgagccagcctgatcgcatccaggttgccgatttggtgctggacttggcgcgccggcgcgcaacgcgcgctggccaacgcatcaatctcaccagcaaggagttcgcgttgcttgagctcctggcccgtcgccagggggaggtccttccacggtctctgatcgcgtcgcaggtatgggacatgaatttcgacagcgacagcaacgtcatcgatgtagccatccgccgtctacgcgcgaagatagacgatgcgttcaatccgaagctcatccacaccgtgcgtggaatgggatacacgctcgatgcgcccgatgatgcccctgcgccataa

SEQ ID NO: 505095 - DNA, 1155 bp, Stenotrophomonas maltophilia
atgacgtacggcgtctacgatggggctggcaatagcatctatgccacgcccggtcctgacctgtctaaacttgccagtagcaaaaagttggtcaaccgcatcaccgctgacgatttgatcgtgtggcaggaggatcagaggtcatatcgaggtgtggtgctgcaactgcctgctgacgattcagcggcgcccggctaccgcatcgtcgctgccatggacatcggctttcatctcgacttcctggcggagttcaagcgcatgctctggtgggcaaccggcttggtcatgtgcctggcgctcggtgtggcttggctggcggtgcagtggggccacctgccgattcgcaaggtcaatgaagagattcgggcgattcgctcttcaaagctggatgtgaggctggatcctcgggatgtgccgatcgaactggcggaactggtattcgccttcaacgatatgttggcgagaatcgaggaaggcttcacccggctatcacacttttccgcagacatcgcgcacgagttgcgcacgcccgtcaccaacctggtcacgcagactcacgtggcgcttggccagccgcgcagcaacgaggaatacagagaaatcctctattcaaatttggaagagtttgatcggatgggacgcatgattggtgacatgctgtttcttgcccaaacggaaaatgatccccgcaacttgcgtctgtctaccattgatctgtccgaattggtgcggagtctgttcgactatttcgaggcgctggcagaagatagcggcattacgcttggtgttaaaggggcgatcggcagcatagcggcggatcgggaaatgctcacccgggcgctgaacaatcttctctcgaatgcaattcgacacacgcctcgcggcaagagcatcacggtcttgctttcgcaggacgagcagtggacaacgatcagtgtggtcaatcccggtgagagaattcctgagcgcgatctaccaaagctcttcaaccgcttctaccgagttgatccggcacggcaacgaaatacggcgggcgccggtcttggccttgccatcgtgaaatcgattgcggaggcacatggtggctccgttgccgtgacctccagtgagcttgtcaccaggtttgacttggtattgccccatctgcggcagtag

SEQ ID NO: 505096 - DNA, 423 bp, Stenotrophomonas maltophilia; identical to SEQ ID NO: 330212

SEQ ID NO: 505097 - DNA, 531 bp, Stenotrophomonas maltophilia; identical to SEQ ID NO: 330215

SEQ ID NO: 505098 - DNA, 1482 bp, Stenotrophomonas maltophilia
ttgctgtgtcccttcgccgacgaccacgccgcgcaggaagccacgttctatggtgcgccggaatggcagcgcagcccgtccaagctgcgcgagcgcctgaccgagcgcgaaatcgacgccgcgcacgcgctggtgcgcttcgtcgggctggacgcctaccggcaggcaggcggcggcatccgccgcgacctgttcgcggaaggcgatgccggaacctacctcaccgataccgcagtgctggaaacgctcgtgcgcgacaagctggcaacgctggccgaggacgtgcgcgccgagggctgggcatgggtggaggccgtgccgcatctggcctacgaggaacggcaggcgttccagaacgccccgcgccaccgccgcgagccgaccacccgcgaggcccgccgcatcgcctcgctggaaacccgcctcgaaaagatcgacgccgaactggaagaagcctgcgacgccgaggacgaggccaaggccgagaagctggaacagcggcgcgatcaggtggtcggagaactgcaagacgcggagaatgccttgcaaggctacgcccccgaagtgcgcgaggtggccggtgccatcgtcaccatcgaccgcaacggcgaggctgttattcatcgcggcctgctgcgcgaagccgaggccaaggcgctgcgcacgctggaaaagctgcggcgcggcttcggcagcaccgaaggcgaagccgccaacgaggagcacgaggacgccgacgacccgcccaaggccgcgagcctgtccgaccagctggcgcagcggttgagcgcccaccgcacggcggcgctgcaaatcgaagtggcccggcatccgcacgtcgcgctggccgcgctggtgcatggcatggtgcagaaggttttgcaggacagctaccacggccacgacctgccgctgggcgtgagcctgaaagtgcaagaccggctggaaggcatggccccggactggccggagtcgcccgccgctgtggcgctgcgcgaactgcaacaggtagccggggaagccttgccggaggacagcgccgaactgttcgccgcgctgctggcgaagtcgcaagacgaactggtgcggctgctggccgtgtgcgtggcttccacggtggacgtggtgacgccccgtgccacgccgcaccagcccggcgcagaactggcgcaggccgtgggcctcgacatggccgcatggtggaagccgaccgcagaaggctacttcaagcacgtttccaaggccgtgattctggatgccgtgggcgcgtttgcaccggaattcgtcacccggctggcgaagctcaagaaggccgacattgccagcgaggccgagcggctggccgatggcaccggctggatgcccgccatcttcaaggccgaaggcccgcaggaggccgcgcaggaagaaggcccggagcaggacgccccggaggataccgaggcaatggcggatgaacccgccgaggcactggccgcttga

SEQ ID NO: 505099 - DNA, 402 bp, Stenotrophomonas maltophilia; identical to SEQ ID NO: 330056

SEQ ID NO: 505100 - DNA, 969 bp, Stenotrophomonas maltophilia
gtgtctggctacgtcgagcgggtcgcctatcgcgaaggagacgaggtcaagaagggcgatgtgctcttcatgatcgatgcccgaagctaccgcgcggaactggcccgggcccaggcgcaattgacccgggcgcgcagcgaagccggccgcagcagaagcgaggcgcaacgtgccaaggtgctggtcgagcagcaggctgtctccaccgaggcctgggagcagcgccgcgccgctgacgagtccgcgcaggctgaggtgcaggccgcgcaggctgcggtggagacggcgcagttgaacctggagaggacccaagtgcgctcgcccatcaacgggcgcgccagccgtgcccgctttaccgcaggcaacctggtggccgccagcgatgcagccagtgtgctaaccaccatcgtgttccaggacagggtctatacctactttgaggccgatgagaaggcgttcctgcgctactcgcgcatggcgcgcaagggagagcgccccagcgagcgaggcggccagctgccggtccagatcgccctggcggacaaggcggacttctctcacaccggcacggtggacttcctcgacaaccaggtggaccggggcagcggcacgatcgccgtgcgcgcggtgctggacaacaaggatcgcgttttcacgccgggcctctatacccgcgtgcgactggtcggcagcggcgaattctcggccgtgttgatcgacgacaaggcggtgctgaccgaccacgaccgtaactacgtctacatcgtagacaaggatggactggcgcagcgacgtgatgtgaaactgggtggcagttcccattggctgcgcatcgtgcgaggggggctggcggcgggcgaccgcgtgatcgtcaacggcgcgcagaaggtgttcttgccgggcatgcctgtgcaggccacggcggtgcccatggtggctgctgcggcgcccgcgtccgccaccaaatga

SEQ ID NO: 505101 - DNA, 1848 bp, Stenotrophomonas maltophilia; identical to SEQ ID NO: 330054

SEQ ID NO: 505102 - DNA, 627 bp, Stenotrophomonas maltophilia; identical to SEQ ID NO: 337263

SEQ ID NO: 505103 - DNA, 633 bp, Stenotrophomonas maltophilia; identical to SEQ ID NO: 337262

SEQ ID NO: 505104 - DNA, 366 bp, Stenotrophomonas maltophilia; identical to SEQ ID NO: 441868

SEQ ID NO: 505105 - DNA, 1521 bp, Stenotrophomonas maltophilia; identical to SEQ ID NO: 324106

SEQ ID NO: 505106 - DNA, 360 bp, Stenotrophomonas maltophilia; identical to SEQ ID NO: 324107

SEQ ID NO: 505107 - DNA, 1395 bp, Stenotrophomonas maltophilia
atgaagcgtcctgaatcgatgaacctttccgccaaggcgtgccgcctgctgcgcccgaaggcgctggccggcccgctcgctctggtctgcggcctggcgtgggcgcaggtcggataccagaacagcggccccgtcctcggcgatgacgtcatgtactcgatcggcggtggcagtgcggtgtccatgggccgcgcggccggcatgcgctccatcggggtcggcgtggggtggaacagcaacctgatctgcggcgacatgagcatccagaccacgctgcgcaatcagctcaacggcatcacgaacggctttcagcagatcatgagcaacgtgatccagagcgcgaccagcgcggttgcatcgctgccggcgctgatcattcagcgcgccgatccgggcctgtacaacctgctgaccaacggcgtgctgcaggcgcggctggacttcgaccgctccaagctgacgtgccgcgccatggcggagaagatggccgagactgcgggtggccagcttggctggagccagatggccgaaggcatggccttgcgtgacgcggttggcagcaacgatgccgtgtcggccgtcgagcaggccgagacgcgccgcggcaacgacggccttccctgggtgggcggcagcaatgccggtggcgcaggccagtccgccatccgcgtggtcggcgacgtcacccgcgcgggctacaacctggtcaacgggcgcggcgtgacggacacatcctccatcgcgtccaccagttgcgcgagcctgtcctgccagacctggacgtcgccgcagcaggcgaccgaatgggccacccgggtcctcggggaacaggtgcagcgcacgtgcgattcctgcaccaagaccgagacggtgcccggcgtcgggctgacgccgctgatccaggaggagtacgaagccaagctggaagtcttgcaggaactggtttccggcgtgcgcaacaccaccttcgagaacttgcgcgaggccggcagcacgtcgctgccgatcacgcgcggcgtcatcgaggcgctgcgcgacgagccggaccaggacctgctggcgcggcgcctcgcgtccgaggtggcgctttcgtcggtgctggagaaggcactgctgctccagcgcacgctgctcaccggcaagaaagagcccaacgtggcagccaacgagttggcagtcgaggccgtgaaccacgagagcgacacgctcgaccgggagatccgcaacctcaagaccgaacttgaactgcggcgcgagctggcgaacaactcgccgatggccatcatccagcgccatggcacgcgcgcggcaggctcgcgcggcatctatgagggcgatccggtgcccgaccgcctcgaccagttgcagaagggcaatccgggaggccggccatga

SEQ ID NO: 505108 - DNA, 951 bp, Stenotrophomonas maltophilia; identical to SEQ ID NO: 363916

SEQ ID NO: 505109 - DNA, 447 bp, Stenotrophomonas maltophilia; identical to SEQ ID NO: 441866

SEQ ID NO: 505110 - DNA, 495 bp, Stenotrophomonas maltophilia; identical to SEQ ID NO: 441865

SEQ ID NO: 505111 - DNA, 768 bp, Stenotrophomonas maltophilia; identical to SEQ ID NO: 324112

SEQ ID NO: 505112 - DNA, 2892 bp, Stenotrophomonas maltophilia; identical to SEQ ID NO: 324113

SEQ ID NO: 505113 - DNA, 450 bp, Stenotrophomonas maltophilia
atgcccttgaacttgactaacctggcccgtggcctagcactggccctcgccgtcgcggtgctcgccggctgcgccaccagcaaggaaaagctgttgacccacggtgaccgcacgatgatggacatctggcagcaggaggccggcgacggcggtggcgcagccggacggaacgccggccgccagttgctcgatgcgcgccagagcctgcgtcggcccctgaccgacgccgacgtgcaggccgcacctgtcgagcagatgcgctacacgcgcaccgcgcgcaatgaggttcaccgccagttccagcgtctgcccaatcccgatctcgtgatgtacgtgtacccgcacctggccggcaccgaccccgttcccgtgccgggctacacgacggttttccccttgtaccagcgcgtgcagtacgcgatgcctggcgagaggacggaggactactga

SEQ ID NO: 505114 - DNA, 1419 bp, Stenotrophomonas maltophilia
atgcgcagtaacggcctgctcaagtggctgatgatccctgtcgccatcctggtgctgttcgccggtatccggctgttctcgggtggaggcggcacggcgccacccgcggcggacaacggcgcccagctcacgcccgaggaaatgaaggcgctgggcatcgaaggcgacaccccgcgcgacaccgtggcgacgctcgttgcccaagtgaagcagttgcgcaccgagcttcagaccgcgctctcggacaacaagtcgcagcgtgaagagaaccagcggctgcgccagcgcgagaactccatcgaccagcgcatcaactcggcgctcgaatccgagcggtccaacctgcgccgcgaccaagagcaggcggccagcgcgcgccagcagaccgaagggctgctcgccgacctgcagcggcgcctggacagcatcggcgggcgcggcggcggccatgcggacctgcccgtgggcctggggctgcagggcggcgacgaggccggcatggagggcggcgtgcggtgggtcgagccggacgacgcaaagcccgccgaggggcgcaacggggggcgtggcgcgagcggcggcatgagcttccccacgagcttcggcccggcgcagagcacgctcgaaaccaccgctgaaaccgtggccaacgcgggcgcccgcgccgccggggtcaagaatgccaagccggtctataccgtgccgaccaactcgacgctaatgggatcggtggcgatgacggccctgatcggccgcgtgccgatcgacggcacggtcaacgatccctatccgttcaaagttctggtcgggccggacaacctgaccgccaatggcatcgacattcccgacgtggccggcgccgtgttcagcggcaccgcctcgggcgactggacgctctcgtgcgtgcgaggtcaggtgcgcagcatcacgttcgtcttcaacgacggcacgattcgcacgatccccgaagaccgcgagggcaaccagcagaacaaccaacagcgcgacggcttgggctggatcagcgatccccacggcattccttgcgtcagcggcgagcggcgcagcaacgcccagcaatacctcggctcgcaggccctaatcaccgcggccggtgccggtgtggcctcgctcatcgagagtggcagcggccgcatgtcctatgtcggctcggacggctccatcggcaccgtgggcatcaccggccaagaagcggtcggccagattctcgcgggcggtgtccgggacatgtcggcctgggtcaacaagctctacggccaagccttcgccgccgtctatgtccaacccggcgccaaggttgccgtccacctcgaaaagccgctcgccatcgacttcgatcccgaaggccgcaaggtcgatcaccgcgcaggagaaagccatgcccttgaacttgactaa

SEQ ID NO: 505115 - DNA, 912 bp, Stenotrophomonas maltophilia; identical to SEQ ID NO: 333151

SEQ ID NO: 505116 - DNA, 693 bp, Stenotrophomonas maltophilia
atgagccgcttcaagaacgagatcgcccacctgcaggcgcacatcaagaccttgcgcctgggcgcgggcgcgctggtcattgtcgccctggtcatgggcggcggctggtggagcgcgccgcgcgacctgaccatccacgtcccgcccgacctgcgctctggcagtacccgcaagcggtgggaagtgccgcccgaatcggtctatgcgttcacgttctacgtgttccagacgctgaaccgctggccgaccaatggcgaagaagactactcgcgcaacctccatacgctctcgccgtacctcaccccgtcctgccaggccttcctgcgggcggactatgactaccgccgctccacgggcgagctgcgtcagcgcgtgcgcggcatctacgagattcccggccgcggctatggcgacgaccccacggcgcgcgtgcgcaccgtatccgatcgcgactgggtggtgacgctggacatcacggcggacgagtactacggcgccgagcaggtcaaacgcgccctggtgcgctatccgatcaaggtcacgcgggtggacgtcgatcccgcccgcaacccgttcggcctggcgctggactgctacgaaggcgcgccccagcgcatcagtgcaccggagccggcgcgcccggcgccgagtgacctgaatccgcaagcgcctcaaggaggaaacaccccatga

SEQ ID NO: 505117 - DNA, 399 bp, Stenotrophomonas maltophilia
atgtccgagcagcagcacgtccgtgcggacgggacggtcacgttccttccgcaccggctcaaccgccatcccgtggtcgtgcgcggcctcaccgccgacgagctgtggatctgctgcggcctgtccggcgcggccggcctgctggtcggcgcgccgctttcgtgggtgttccgcacgatcgccatcgcaccgacgttcgttgtcctgggcgtggccttgggcgtgttcatcggcggcggcatcctgcgccgcctcaagcgtgggcgccccgacacctggctgtatcgacagttgcagtggcgcatcgcaacgcgccatccgctgatggccggctgggtgggcggccacgtgctgatctcgcgctcgggcttctggtccacccgcaggagcatgcgatga

SEQ ID NO: 505118 - DNA, 360 bp, Stenotrophomonas maltophilia
atgcacaaccgcaacctcacttcccgttttgcccagcgcgccgccgtggccctgggcgccgccgcgctgcccgcactgtcgttcgcgcaaggtctgccgcagttggagaacccgacgcgcggcaccggcaacggcatcatggagaccatccgcaactacggctacgacatcatcatgctcgtggccctgctggtggtggcgtcgatgttcatcggcgtctgctaccacgcctacggcacctacgcggagatccacaccggccgcaagacgtggggccaattcggcctcacggtcgccatcggcgccgtgctgctcgtgatcggcatctggctgctcaccgaagccaccggcatcctgtaa

SEQ ID NO: 505119 - DNA, 234 bp, Stenotrophomonas maltophilia
atgaacggcgcccaggtctcggcatttcaagccaacagcggtatcgcgccttccgcgatggcgaccgtcctggtcggcgtcgtgttcgcggtcctgctcgtgtggggcgtctgggccatccgaacggcctatgtggggtggtccgagagccgcctcaaccagcgccagttcctcggcgtctgcatccgcttcgtcgcgatgtacctcgtcctgagtttcttcctcctgtcctga

SEQ ID NO: 505120 - DNA, 384 bp, Stenotrophomonas maltophilia
atggtggcttcgatctggctgcgcgccgcgcatcgcggcgtgcccacttgtttcgtgacggccctcgtgctgggccagtccccgatggcattggccgagtccccggcgcagcgccaggagttggtcgccgcgctgcgccagctcgacgcgctggaacgcaccgtcgcggacagcgccgcgcatgcccccatccagccgggcgagcgctaccacttcgattacccacggctgctggctgacctggcgcgcgtgcgcgccggcatccagttccacctgacgccatcacgcgctcagccgcgcgacccctccgaactggccggcgactaccgcaccgagcgggccgcttcgccatcgccgaagacgactgcggagggcgagcaatga

SEQ ID NO: 505121 - DNA, 471 bp, Stenotrophomonas maltophilia
atgaccaccgccactgcccaatccaagatgacccttcccgccgcgggagaggtgaaggcagccgtccagggtcaacgtgccttggcggcttacctcgcaacccagttcgagacgcagcacatccagatctttgatgaccacaaacaggctcatcaggtggaactgcctacctcggctttacgcctgctggtcgacatcctggccgagttggccgatggcaatgcagtaaaggtggtgcccgtccatgcagagctgacgacccaagaggcggcggacttgctcaacgtgtcccgtccccatttcgtcaagctgctcgaagatggggtgttggcatttcatcgcaccggcaagcaccgcagggtgaggttcgccgatctgatgcagtacaaggaagcgcgcgagcgcgccagtgagcaggcgatggccgaactcgctcagcagtcgcaagagttgggaatgggatacgaatga

SEQ ID NO: 505122 - DNA, 576 bp, Stenotrophomonas maltophilia
atgaggcattccccattcaccgccgtctacgacgcgtgcgttctatatcccgcgccactgcgggatttcctgatgtggctcggcctgtctggccgcttccgggcgcggtggagccaagccattcatgaggagtggaaacgcaacctgttgatcaaccgccccgatctcacccgggttcaggtcgacaggacgtcggatctcatggaccgggcaattccggacggcttggtggagggctacgaagcgctcgtggcaggcctgacattgcccgatccggacgaccggcacgtcctggctgcggcgattcgctgcggtgcgagcgtgattgtgacgttcaacgaacgggatttcccgaacgatctgctggctccgtacggcatcgaatcgcagcaccccgatgagtttgtggacaacctactggatctggacgcggccgccgtggtgtcggctgcgcagcgccagcgtgcccaactcaagcatccgccgatcgaggtggaccgctatctcgaaatcctgctgcgccagggccttgtgcaaacgaccaaggtgctggcgacctatcgcaccattctctga

SEQ ID NO: 505123 - DNA, 915 bp, Stenotrophomonas maltophilia
atgaccaagaatccttcatcagacgccactttgccgaaaggcatccatcgaagctggaagctgccggacacgtcgctgggcgccctgtgggattccatcgtcatggacgaagctctcaagaagcagttgctgtcacaggcgatcgtcaacttcacggtgcgccccaaggtggagcgcacggtactccccctgcacggcgtgatcttgttggtcggcccgccggggactgggaagacctccttggcacggggcttggcgcatcgtgtggccgaatctttttcttctgcgaagtttcgattgctggaagtagagcctcacacgctgacgagctctgcaatgggaaagactcaacgcgccgtggcagacctgttctcgcaatcgatcgcagaatccgcagcggcgggcccgacgatcgtccttctggacgaggtcgaaacgcttgcggctgatcgagccaagctcagcctggaagccaacccggttgatgtgcaccgggccaccgacgcggtgttggtgcagttggacatgttggccgaacgcaacccgcatctgctgttcgtggccaccagcaacttcccacaggccgtcgacagtgccttcctatctcgttgcgacatggtgatggaggtgccactgcccggcaaggatgcctgcaagcagatcctggtggactgcctgaatggcctggcaaagacatttccggggattggcaagctttcctcggctcaccagttcgacgcgtgcgctggcgagtgcgtcggattggatggtcgggccattcgcaaggtcgtagccaacgccctcgcggccgacccgcaagtggctatcgatccgaacaagctttccgtagagcacctgcgcagtgcgatacgacaggcaacgcaaatgcgccttcaaggagggaagcaaaaatga

SEQ ID NO: 505124 - DNA, 471 bp, Stenotrophomonas maltophilia
atgaccaccgttgtcagccggacgtttcgcagctcgccgcaccgcgatgcgttgcagacgtgggatgccattgtcgaactgctcactcagggcaaggacggcacggctcgctctgaactcagggccgtggcgggcgtggccgccagcttgatcgccgaccaggcacccaagagcgcgcccatcgttgcgacatgcgatggaccacggaccaggatctactgcctcttcgacgaagacgcgatcgatggtgatgatgccaacgaagaagtcttggggttcgagccgttgaagggagactggggagtctcgctgccgtgtccgaaggagcagctcggctgggtgcaaaccgcgctcaaaaagcacagttctcgcatcattgcacgggacttgagccaaggaattgccacgcaggcgcaggccgatgctggacaagcgctgtcgctcgacctcggaggtttcctcaagtcatga

SEQ ID NO: 505125 - DNA, 501 bp, Stenotrophomonas maltophilia
atgagcaccgtcgccacctactcgtacacgcactcggttacctatgtgaccgacaacatcctcaagagcttgaaagacatcatcctgctcagtgggctggaccccgagcacttcgcggatcgctgggagagcaatacccgagccatcaagacgtggctcgggaccggtgatctgcgcaaggtgattctggagatctacaacccggcaaccgacaaactcgtgacccgatgggatatcgacatcgtgtatgggtggtccgatggcgacggcagcttctggacagataccgagcagttgaagtacgcgatcaagaaagctgggctgctgccatcgcaggccaagtacaagttaatgctcgatacaaagccagggcggcctgatgtggaggggtggagcaaaggaagttatcgctcgacggatggaatggtcaagcagagcctaggctcgactgtcgaacacagcggcctggcgggtcaggccggatattggaggcaacgctga

SEQ ID NO: 505126 - DNA, 903 bp, Stenotrophomonas maltophilia
atgctgtcgatcgatgaagcttttcgcaagttcaagtcgcgtctggaactcaacgaacgcgaacagaagaatgcctcgcaacgccagaacgaagtgcgggactacctgcagaccaagttcggcattgcgcgcagcttcctgaccgggtcctatgctcgatacacgaagacgaagccgctcaaggatatcgacatcttcttcgtgctgaaggactcggagaagcattaccacggcaaggccgcatcggtagtgctggatgatttccactctgcattggtggagaaatacggttcggcggccgtgcgcaaacaggcgcgctcgatcaacgtggatttcggtgttcacatcgacgcggaggacaacacggactaccgggtggtcagcgtggatgcggtgcccgcattcgacaccggcgaccagtatgagatccccgatacggcgtccggaaagtggatcaagacggacccggagatccataaggacaaggcgaccgcagcgcaccaagcctatggcaatgagtggaaaggtctcgtgcgcatggtgaagtactggaacaacaatcccaagcacggcgatcagaagccggtgaagccctcgttcctgatcgaggtaatggcccttgagtgtctttacggcggctggggaggatcgttcgatcgcgagatccagtcgttctttgccacgcttgccgatcgtgttcatgacgagtggccggatcccgccggacttggcccggcgatcagcaacgatatggatgccgcgcgcaagcagcgcgcgcagcagctgctgttccaggcgagccaggacgcaagcatcgccatcgaccacgcgcgtcgtggtcgcaatatcgaagcgcttcgcgcctggcgcgcactgtttggccccaagttcccactgtcctga

SEQ ID NO: 505127 - DNA, 726 bp, Stenotrophomonas maltophilia
atgtcccagtggtcgctttcccagctcctgtcgtccctgcatgaagacatccagcagcgcttgtccgtagtacgcaagaccttcggtcacccgggtacgaagggggatgcgagcgagaacgtctggatcgacatgctggatacctatctgcccaaacggtaccaggcggcgaaggcgcatgtggtggacagcctggggaacttcagccagcagatcgatgtggtggtgtttgatcggcaatattcgccttttatcttcacctacgagaacgagacgatcattccagccgaaagcgtgtacgccgtgttcgaggccaagcagacggctgacgcggggcttgtggcctatgcccaggagaaggtcgccagtgtgcgcaggctgcaccgcacgagcctgccgatcccgcacgctggcgggacctacccagcgaagccgttgattccgattctgggtggcttgctcaccttcgagagcgaatggagtcctgcattgggcccatccatggacaaggcgctgaacgcaaacctcaccgaggggcgtctggacatcggatgcgttgccgcccacgggcactttttctatgaccaagccagcggcgcgtacagctacaccaacgaaaacaagccggcgaccgcgtttcttttcaagctgatcgcgcagcttcagttcagtggaacggtccccatgatcgatgtggaggcttacggtcagtggttgaccaagtga

SEQ ID NO: 505128 - DNA, 2625 bp, Stenotrophomonas maltophilia
gtggcaagcatacgttcggagtaccaccggttcctggcgcacttgacgcagcggcacgtgcacgacgacgtgcgccggctggcgcacctggtgctcgatcacctgcagccactggccgaggtcggtgctgcacgccgggggcgctccacgcgcttggcgccgctggccatcgcgcatctggcgcagatgcctgtcgcctacgacggggacgcgcgcggccccgaaaacgggccggcgctcgggcgactgcaccagctcgaagtcgggccgtttcgaggattcatgcggcaggagacgttcgacctcagccatgacatcaccttggtctacggtgccaacggcaccggcaagagcagcttctgcgaagccttggaagtggcgatgctcggttcgatcagcgaagcgcaggccaagcgggtcgaccagcggacgtactgcaacaacgctcgcctgcgccgccacatcgcgccagtcctgtcgtctacggcggcgggcgaggcgcaggccgtccagcccgacgaagctgagtatcgcttctgcttcatcgagaagaaccgcctcgacgatttcgcccgaatcgccgcgcggaccccgagcgatcagcgccagctcatcgccaccctgttcggcgtggaccagttcagcgagttcgtgcgcggcttcaacccctcgctcgatcaggacctgatgcttgccggcgtgcaggcggcgcagctggcgcagcgtcgcctgcagttggcgaactccgaacagaccatcgccgcctacccgcagaagatcgcagcggtcgagggcctggaacaagctttggcgcagcgcatgtcacctggcgcgacctatcaaacctgcgtggactggctgctgggtacgccgcagcagcaaggacggctaccgtatgtccaggctcagctggacgccaacccgcctgccattcacgaggtgacccaggcccgcctgcaagcgttgctggcagaggcctaccgcgtccagggactgtggcaagcgtcttccgcgcaactcgcggcccgcgccggcgaggtgtcgtacgcgaagctctacgaggccgtgcaagcgttggcggacggggcgaccgcgtgtccggcatgtggaaccgaactggccgccgtggcgcaggacccgttcgccagggcgcgaatgggcctggagcagctcgcgcaactggccgtcctgcagcagcaggaggccgggcatcggacacagttgagcgaggcggtccgagcgctgtgtgacgaaatgcgccgcgtggtggcggcggctggggtcgcttgtcctgccgaatcgcaggccgcgggcctgccactgctgcctcccacgtcggcgggcaattggctcggcggcggggtgaatggggaccagcgcgcctggcaagccctcttacggatcgcacagatcatcgaaggcttcgacgcgcaggcgcgcgacgtgaatgcccagcgcggcgcgatggcccaggagcgggaccgcctgcaacagcatcagctggagatcgaacggctgcggaccatgcgcacgactgcggatcaggagctggcggccgcccgccaaaccgtggcccaattcgacgacgcgaaccgcggcctgatccaggcggccacggacgaaatgccggtggtggtgcaccatcagcgggtcaaggccgcctacgacggcttcctgcccgagattcaggcatacctgaccgctctgccgggggttctgctacaggggctgggagaccaagcccgccatctctacaacgcattcaaccgggccgatccgcccggcgatctgctgcacgcgctgtggttgcccgtggccgagaacggcaagatcgaggtggagttcgccggcgagccgggcgcgcgctacgacgcgttgatcgtcttcagcgaagggcacatcaaatgcctgggcctggcgattctgcttgccaagaacctcgcgcagggctgccccgtggtcatattcgatgacgtcgtcaacgcgatcgacgacgaccatcgcgatggcatctggcgtaccttcttcgaggacggtttgctccacggcaagcaggttatcctcacctcgcacgcagaggagttcctgcaccgcatccagcaggagttgggcgtgcgccgcgccgcggccattaagcgctacaagtttctcccgcatcagggagagcacgaactgcgggtcgacagcgacccgccagcgaagaactatgttcttctggcccagcaggcgttggcggctgacgagaaacgcgaggcactgcgtcaggcccggccggcgctggagagtctgacggaccgcctgtggacgtggctgggtcggcgggcggacggccggatcgacatcaagctgagcgggccccgcgcgccttgggagctgaacaataaatgcaccaagttgcggtcggccgtcgagcgtatcgcggcgcaacatgcgggtgcgccggatgccgtaggggcgttggtccggctgctcaatgtcagcggtacgagtattgaatggggttacctcaatagcggtgtgcacgacgctcagcgcgatcatgagtttgatcgggcgacggtaagaacggtcgtcgaggcggttacggcgttggatgctgctcttgataccctgcagaaccgatga

SEQ ID NO: 505129 - DNA, 750 bp, Stenotrophomonas maltophilia
atgaaggatgccgcctcgaccgcgcagcgggagcagaaccatcgccaaggcttgatcgtcggcaccatcaccttaccgttccggctgctcggggtgctcattggctcgctgctgttctcgatcgtggtggagtgcgccggcatgcacctgttctggaaggaccagggctggcgccactcccagcagatgctgcggtacgaactcgggcacctgtccaaccacttcacgcgcagcgtggtggtacaggagcccgggcgcacggcgcacgagttggtggataccgggtacgagtgggtgttcgtgcgctcggggttgctggagcgcatgagccagaccgccgagcgcgtccgcgcgcccagccacgggcagagccgcaacttccgctactacatcagccaagtctatgtctgggccgaaagctacctgatcgctgcggccttcacgacgctcaccttcctggtgcgcctgctggtcctggtgctcacgctgccgctgatcctcacggcggcattcgtcggcctgattgacggcctggtgcgacgggatgtgcgccggttcggcgcgggccgcgaatccggcttcatctaccaccgcgcgaaggccagcctgatgccgttggccgtgctgccttgggtcacctatctcgctctgcccatatcggtgcatcctctggtcatcctgctgcccagcgcggcgttgctggggatggcagtcagcctgaccgcaggcagcttcaagaagtacttatga

SEQ ID NO: 505130 - DNA, 2193 bp, Stenotrophomonas maltophilia
atgtcgggcaaacagccggtcgaggttctgctacgcccagcggtggagctatacaccgtcgcggcgtgtgcaggcgccgcgtttctgtgcctggtggccccatggtcgctcgcgctgagcccggccatgggcatcggcagcgccttggcgttcggcgcctacggcgcgatccgctaccgcgatgcccgcatcatcctgcgctaccggcgcaacatccgccgtctgccgcgttacgtgatgaccagcaaggacgtgccggtcagccagcagcgcctattcgtggggcgcggctttctctgggagcagaagcacacgcatcggctgatgcagacgtaccggcccgagttccgccgctacgtcgagccgacgccggcctaccggctgaccaggcgcctggaggaacggctggagttcgcgccattgccgctctcgcgcctgccgaagctcaccggctgggacgcgcctttcaaccccgtgcgcccgttgccgcctgtcggcggcctgccaaggctgcacggcatcgagcccgacgaagtggacgtcagcctgccgctgggcgagcgcgtcgggcactcgctggtgctgggcaccacgcgggtgggcaagacgcgcctggccgagttgttcgtcacgcaggacatccgccgcaggaatgctgccggcgagcatgaggtcgtcatcgtcatcgaccccaagggggatgccgatctcttgaaacggatgtacgtcgaagcccagcgcgctggccgcgaaggcgagttctacatcttccacttgggctggccggaaatcagcgcccgctacaacgccgtgggccgcttcggtcggatctcggaagtggcgacacgcatcgcggggcagctctccggcgaaggcaacagcgcggcgttccgcgagttcgcatggcgcttcgtgaacatcatcgcccgcgccctggtggaactggggcagcgcccggactacatgctgatccagcgccacgtcatcaacatcgacgcgctgttcattgagtacgcccagcactactttgccaagacggagcccaaggcctgggaggtgatcgtccagatcgaggccaagctcaacgagaagaacatcccaaggaacatgatcgggcgcgagaagcgtgtggtggcgctggagcaatacctctcccaggcgcgcaactacgaccctgtgctcgatggcctgcgctcggcggtgcgctacgacaagacctacttcgacaagatcgttgcatcgctgctgccgctgctggaaaagctcacgagcggcaagatcgcccagctcctggcgccgaactactccgacctggccgacccgcgcccgatcttcgactggatgcaggtcatccgaaagcgggccatcgtctatgtgggtctggatgcgttgtctgacgccgaggtcgccgcagcggtcggcaattcgatgttctctgacctggtttcggtggccggacacatctacaagcacggaatcgacgatggcctgcccggcgcagtggctggcgctcgcgtgccgatcaacgtgcacgcggacgaattcaatgaactgatgggcgatgaattcatcccgctcatcaacaagggcggcggtgccggcctgcaagtcacggcgtacacgcagacgctctcggacatcgaggcccgcatcggaaatcgcgcgaaggccggccaagtgatcgggaatttcaacaatttattcatgttgcgcgtgcgcgagacggccaccgcggaactgctgacgaggcagttgccgaaggtcgaggtctatacaaccaccatcgtctcgggcgcgacggacagctcagacatccgcggcgcgacggatttcacgtcgaacacccaggaccgcatcagcatggccagcgtgccgatgatcgagccgtcacacgtcgtcggcctgcccaagggccagtgcttcgcgctgctgcagggcggccagctctggaaggtgcgtatgccgctgccggcgccggacccggatgaagtgatgccggcggacctgcagcaactggccgggtacatgcgccagagctacagcgaggccacgcagtggtgggagttcaccagctcgtcggccttgcaggatgcggccttgcccgacgacctgctggacgatgccgctgcggccgagcccggcgcggtggccaccggcgccgacgatggcgcgggcaacgaggccgtgccatga

SEQ ID NO: 505131 - DNA, 549 bp, Stenotrophomonas maltophilia; identical to SEQ ID NO: 422617

SEQ ID NO: 505132 - DNA, 570 bp, Stenotrophomonas maltophilia; identical to SEQ ID NO: 330052

SEQ ID NO: 505133 - DNA, 738 bp, Stenotrophomonas maltophilia; identical to SEQ ID NO: 422619

SEQ ID NO: 505134 - DNA, 645 bp, Stenotrophomonas maltophilia; identical to SEQ ID NO: 330051

SEQ ID NO: 505135 - DNA, 600 bp, Stenotrophomonas maltophilia; identical to SEQ ID NO: 330050

SEQ ID NO: 505136 - DNA, 1455 bp, Stenotrophomonas maltophilia
atgagaaaactagaaagcgtggacatgcagcgagaggcgcccggcggcatccgggaattgagagcaggcgctaagctcaagctggcagagctggcagagctggcgagcctacccatcgaggagctgaagctgatcgagcgcggactcgccccgctgccgcgcggcgcggcctcgcgactggcccggccgctcggcgtcaaggctgcggaggtatcacaagcgcacgccgccttcgtggaacttgctacgcccggcgagggctacacgacgagcagacgtggcaacctcgacctgaccccggcccaagccgagcttgcgggcaacgatgggcgctggcgagtgttagacctcttctgtggggctggaggcctgtcgtacgggttcgagcaagccggaggattcgtcacggttggcggaatcgacctgctgccggacagaatcgccacgttcaccgcaaaccacaggcacgcgaccggcctggcgggcgacatacgagagacgtcgcccgacgctgtcagagacgcaatcggcgaggtggacgtcattgtcggcggccctccctgtcaaggtttctcttccatccgtcccttccgcacgctgacggagtcagatcgccgcaacagcctggtcgagcattacgtgatgatgctcgcgggcctgcgcccccgttggttcgtctttgagaacgtcgtcgggctggtcagccacgagggcggcgcaaagctgcgcgcgatcctcgacgccttctccgaaatggggtactccgtcagctggcgcgtactcaacgcggcctcttacggcgtgccgcagaaccgtgagcgcgtcgtgatcgtgggcaacagggtcggcgtgcaattcgagtggccgcgcccgacccactacgtgaagcacaagagcatggccggcaggcgcagggagctggtggcctccctaccgatcgaacgtgaggcgctgaagcctgccgtcaccctcatggatgcgatcggcgacctgccttacgtggagtctggcggccaggtgatcgagtacgcgggcgcaggcgcaaccgagttccagcgtgcgatccgaggcggcgccgccgagctgacgtggcacagggcgaccaagcactcggacaagatgatggagatcatcaggcacgccggctcctccatcgcggatctcccgcccggcatggtgacgagcggattcagctcctgctacagccggctcgacgcggaccggccgagcaacaccatcacggtgaacttcgtccatccctcgtcgaaccggtgcatccacccgttccagcacagggcgctgacgccgcgcgagggcgctcggctgcagagctttcccgacacctaccagttcgtcggatcgacggcgcaggtggtcaagcagatcggcaacgccgtcccgccgatgctcgggcgcgtgctcgccgaggcgatacgcgcgcaggacgccacctag

SEQ ID NO: 505137 - DNA, 612 bp, Stenotrophomonas maltophilia
atgaggaatcctgcccaggaggcactgctccagcagcttgagctttatcgctacggactgactgcaaagatcgtcggggacgcggtggactacgtccacaacatcctcgactccatcgactcacagctgatgaccgcggcgggcacgcggctctcccagctggtcgagctggccaacctgtccgccatcatcggcaacctgttccgctcgggcatctgcaactcgtcggagggaatcttcctgccgaacgccccgcacacctacccggacatcctcgccaacaagaacttcgtcgatgcctgcgacgtcgagatcaaggtcgcgctggagaacaacaagccgaagggccacctggtgaagccgggcccgcacattgccgtgaggtacgtcctcgccgacgagcggggacagtacacccgaggcaaagagaaccgcgggccggtcccctacatttgggaggtgcggatcggcgagttggaagaggggcacttcaacttcagcaataccgagggcgactcaggcaagacggccgtcatcaacgccgcagggatgaacgccctaaaggttgtctacttcgacagggcacgctgccccctcgttcgcggaatctag

SEQ ID NO: 505138 - DNA, 393 bp, Stenotrophomonas maltophilia
atgagcagcgaatcacacgcagcgaccgtcaccgaacccggcaggcccggcagtacctattccgatggcccggtctggcacgccttcggcctcagtcgcgccgcctacttggtggtgccgcgccggaccctgcagtccatgcccattgactggcaggagcgcttcgtcgcgctgatcaaggaggcgcgcgaggcattgcctgatgaggcatttccccagtaccaggcggtgcggctcagagacgggaagtacgccgctgatcccaacggccggtaccgacacctgccgccgtttcctcgtcgcccgtccggggacacccacgccgcatgcaaagcgccgctcgctggcgcctttgtgaacactttcaccctattcgatcaggcccgccaatga

SEQ ID NO: 505139 - DNA, 486 bp, Stenotrophomonas maltophilia
atgagcgcccgcccgcaacagatcggccgagccgccgaagtgcgcaagatcctgtccatgttcccgcaaggcgcaacggtcgaacagatcaagaccgctggccgcatcaacagcacccaccaggctatcggctacacgctgaaggggttggcacgcagcggccaagccatctgccaccgctccggcgtgcgcgggatctggcgcctatccagccacacacaacatgcgatcgcaccgttgcgtgcggcaccggtgcgtgagcggacctgcgtggtaggtccgctcaccggcgtcagtgacgcggcgaccacgattcgacacagggaactcgaccggcagcagttggccgacgacctgaacgccttcctcgcagcgggcgggcaagtcgaagtgctggggcacaccccgctccgcccgctgatgagccgtctcgcggccaaccacggtagctatgcagagcgcatggcaacccacgacatcgactga

SEQ ID NO: 505140 - DNA, 240 bp, Stenotrophomonas maltophilia
atgaaccgttctgttgtcatctacgggccgcaacgctgcggcaagacctccaacgcacaggaactgcgcgcgcactttggcctgcgtgaggtactggacgactgggacggccacaccgcgtatcccctggaggacacgctcgtcctgaccaacaatccggatgccgttgctcacaactcatcgcgtgtcctgcaccacggctgggcaatgcgcgaactgctcgcggaggcccgcgcatga

SEQ ID NO: 505141 - DNA, 327 bp, Stenotrophomonas maltophilia
atgagcgcgcagccaacgctgcccgtcgagcagcagttcgccaccggccaccagggcgagtcgctggtgctgatggtgtgccaaggctggctatgggccggcctctacaccgccgccccgcgcgagtcgcttctgaaggtcgccgccagcgccagccggagcgtgggggtatcgcaccactcgctcaccctcggcggcgtttcgttttccctcaaccgacttgccgcacaggccgcgcaccgctggctggaccgccaaggcgtgcgcgttcgttcgatctcccccaacaaccgcgctacgcgccgcacgcgaggaatcgccgcatga

SEQ ID NO: 505142 - DNA, 273 bp, Stenotrophomonas maltophilia
atgtccgctccactcaagccgaaggaaaaagccgcgttgctcgcagcgcatggcgcttcggatcactccctccaccgcactgccaaggggtttgcaccccgcaaccgccccgagaagctgttcacgcgtcgcgtcatgaactggttggatgagcgcgtactgatcaggtacgacgacccgcagctgccgcgcatggcgaccttgaccgccatcggcatcgccgccgccgaggccgagatcgccaaggcccgtgacctggcgctgtcggcatga

SEQ ID NO: 505143 - DNA, 321 bp, Stenotrophomonas maltophilia
atgcgccagacctctcgcccgctccccgattccgtgccgctgtgtcggcccggccatcgacctcacatcgtggtgaccgaaggcgccccgaccggccaccgcctgggcgctccttgcccgccgcttctgcacatcgaatgccatcggtgtggcctcgccacccgcccggtaccgatggaaaaagccgcgttggcagagctgcgctggactgacgcaagcctcgcgcaccttcgcataccgatctccctgctcgcccgccatcgcggcgaggtgctggccgagatcgccgccgactccccttccacgcctatcgctgcctga

SEQ ID NO: 505144 - DNA, 321 bp, Stenotrophomonas maltophilia
atgagcgctaccgaaaccgccctggcaaccttggaacgcattgcaggggtaaacgccgagtttggcgccgtcgcagcagcaacgccggatttcatgattcgcgtgggcgaatcaatgctgaagaagcaggccgtcgatctgcgcgctgcccacgccgcgctctctgagctgatcgaccagggcgaccgcctcactgtggcgttccgtgcccttggtcaatccaatggcatgcaggctcagatcaacgcgcaccgcgagtgcgaagcatcgatgctggcattcgccgctgccctcgcccgtgccaaaggcggtgccgcatga

SEQ ID NO: 505145 - DNA, 540 bp, Stenotrophomonas maltophilia
atgtggagcaggttggtggtgctaggggttgcgcttgcggtcgcgccgtgggcttcggccgaggtgttcaagtgcaaaggggtaagtggggagacggtctactcgcaggccccatgttccgcaggcgcagcgccgatgaagctgcgctccaaccgagctgccacggagagttcgggggaagcggccaatcgcgcggcggtgtatcaaacgacagagcttgcggatgcaggcatagccgaacggaattgcctgtcgtctgagcaaagcaggatctacggcccggtcaacgcgcgggggcaggatgtgtcgcgccagatcgccgccctaaaccgcgagctggccaccgcaaggaacaatcttgcaggagccacgtatgcgtctgggataaggtctcagattgcgagcctgcagcaggcccagacagcggacaggatttcggccgacagccagatggccgaagccagaagacgatgcggtgaaactcgcagtgagcgtgaacgcgctacacgggaaaaatactcaggcgccggtacgccatag

SEQ ID NO: 505146 - DNA, 531 bp, Stenotrophomonas maltophilia
atgacctgcctccgctctgacctgtactggcgggatgcgctgcacaatgcagtggcgcgcgcccctggcggtctgcaggacgcggccgcgcacatcagcaagcgccgaggcaagtcgatatcggcggagacgctgcggaagaagctgaggggaatcgacggtgagtcggtctctatggagatggccgagatcctgacggactaccttctgctgttcgtcggcacgcaggacatcgccactgactgggtgtgctcgctcgcaggccagtacggcctgatggtcgattacgtaccgccgccgcctcgcggcggttggcccgatgagctggctgcgatccaggcaaagcttctggagttgcacaagctgacgggggcattggccggtgcgggaatcgacgcgttggccgaccagcgtctgaccgtcccggaggcggatcgaatccaagatctgtcgcgtgaggtacgcaagctctgctaccgactcgagcgcaacgcatgccgcgctgccggtcagcagggagctgaggactga

SEQ ID NO: 505147 - DNA, 417 bp, Stenotrophomonas maltophilia
atgacacggatcattctgggcagtatcgaccttcctgccgatctccaatggtccgatgagttcacggcctggcgtgtcggccagcaagcgcgtacgagcctgaccggcgccctgatcgttcaggagtcagcgcgacaggccggccgccccattacgctgaaaacgtcccgcgacggtaccgcctacgtcggggtggtgtctctgcccactgtccgggccctgcaggagagcgagagtgaagcgcgcctggcgcccatcaatctcatcatgcccgcgcacaacggcggggaccgacagtttcaggtgcgctggcgccgaaccgatggcccggcgatcgaagttgagccgactcgcttcgcagtaccggcattggatgccgatctcttctctatcactcttcgccttatgacggtgtaa

SEQ ID NO: 505148 - DNA, 318 bp, Stenotrophomonas maltophilia
atgatcgttggcaccttctatcgcagttggggcccgcgaggcggggatggcttcctcggagggactgcgcctgacggggataacgacggccgcgcgaagatcatgaatgtaccgcgtcgtgtgtacatccaggtctatgtgatgcgcgacgctgtagacgtccagtacgtcgcttcagtgctgagcggtcaagacggtgtgtggcgccttcagggcatcgaccgaacgcggaagtaccgcgtgattggtacggacttggctgcgggggtcaactcggccatccaagactgggtagtgccggcaaagatggagccgtga

SEQ ID NO: 505149 - DNA, 1806 bp, Stenotrophomonas maltophilia
atgtcagggggcggtgcattcgttcggctcaaccttggcccgcgattcggtggtgcgggtgggttcacgccactaaatctcggtgtcgactgggatgagaatcctgttgagcccgtagtgcggggcctgtcgctcgccgtctctatcgcctggcgggaggctggtcgggcgaggtgttccactagggtgggatggggcacgtcgagttcgctgcgttgttcgtgcttagtgccatgggagggcactaagcgggtggatggttccacgtcagttgcgtggggcgtcgccccccccatggctggcgaagcggggtttcggtggcggaacgcggctctcgttggcgagagcgttgggttgccgtggggtgggttgccgcaggcgtcgcgattcctgctggctggttggcgaggcaggctcgacgttaccgggatcactgctcgtatcgcgtggatgcgaggcttgcctgtccacgcgaagcaggggctgccgtggcagggagcacccagaacggcaagcgatagctggtccgatagctggaagcacctcggcgcagccaggcgtcatggtcgcctgccttggggctctgcgaggccgttgccctgggtcatccgccctccggtaaagcctgaccctgatccagatccagagccgggcgttccgccaggtcattccgtttcgctgaacttgggttgctcggtggtgggcgtccccggtcttgcacccctcaaccttggaaccaccgcgtgctacgtggtgcgaccgcaacgcaggacgtatgtcgtgatcaatgaagtttcgtttgtacggctccctgatcggacgcccatcgaggtgtcgaggatctcgctcagtgcgagcaggagcgcctgggggtggaccttcgacgttgagctggccgacccaacgcaactgtcgctgctgaagccaacggcggctggcccgcgccagtttgaggtatctctcaatggacatgtgtggactggcatcatcgagagcttccagaagcagcgagagtttgccgatgggggagtccggcttagcggcaggtcgcggacggcgctgcttgcggcgccgtacgcgccggcaagggtcaaggtcgctaacgaggacaggagcatggcccagctggtggccgaagagctggccgataccggattcaccagccagtacgagacggttgattggacggtgcctgctggtgcttggttctatgacgccagcacgccccttgatgcgatcagtgcactggccgaggcgagcggggcggttgttcaatctcatccgcaagacctctcgcttcacgtccgcgcgagctacccagtcagcccatggctctggcgcgacacccagccagcccatgttgtgcaagaagacatcgtgctgactgagagcttgcagatgcggagcgcgccactgtatgacgccgtcgtggtgactggcgagatttcggggaaaggagtcacctgcaaggtgcgtaaagctggtgaggcagggcagctttacgcacagcaagtgagcagcccgctgatcagcgtcgctgcggcgggtgctgagcgaggacgcaacgttctgagcgatcgcggtgagcaggcagccgtggacctgacggttcccctcttcccgaggccgctgaaggcgggggaagtgggtgccatcatgcctttggatctggtggaggtcgttgctgctgaaggcacttggcacgggcaatgcgagtccttgcgcatcgaggttgtgatcgatcagcaggccgttgtgattgaacagacagccactctggaaaggcactacaccgatgcggactga

SEQ ID NO: 505150 - DNA, 234 bp, Stenotrophomonas maltophilia
atgcggactgacctctgggatcaattcggcgagctggtgaccagcagcccccgattgctggcgaccgtcactgcgcacaacagtgacggaaccagcacgctgaccacttatgacggagtacagatgcgggcctttggtcagctccagttacccatcccgtacaacgtgtgggtccggggtgggcgcctggttgaggccgcgcccaacctgccgttggtggaattagtggtttaa

SEQ ID NO: 505151 - DNA, 345 bp, Stenotrophomonas maltophilia
atggcgattcgcttcgaatgcagcaacccaagcaagcttctaaaccagttcaaatccaaaatagccctcggaaacaaatcaggcggaatttccacctggaaggaagacagcgacggggacttcacgcatgtcgctgatcaaattgctggcaaaggctatcttgtcgcgcacgtgacgaatgtcgctccgtcatccctgagcttctacgtcaagtactacaaaaacgccactaccgccgagagaaaactcgcattcaaggaactgagtggcaatctccttgcaaccttcatcgatcacttcggggcagatttcgatcaggcagtgttcttcgacgccaggagctag

SEQ ID NO: 505152 - DNA, 996 bp, Stenotrophomonas maltophilia
atgtcgaagttcagtttgaggttttatcgggttgcacattgcggttactacaagcacggacagccggatcccgctatcggcgatcttgattttttccttgaagaactgcgtgaatatgccgctgggaagaacttggaagatacgagggttgaaggcggtggtgatcggctgccggcctatctgtttgacatcaaacagcatggtagttgctggatactaacgctttggaatgaggtgccggctgatgaaggtgccgttgcctccgtgccggcgtcgtcgcctgtcggcgctggaacggtgctttcaaatccggtggctgcgaatagcataccaggcttccccacttatttccttttcgttcccgaggcggagctcgtggcgccggtagtttacggcgattcggtgtttggtctccctcagtttaagcaatacgctcatcagttcctggaaaattcgaccagcgtcgttcatttcgacgaggatggggatgaggcggaagtgctagggtacgaagatagtgatggggaggttcgtgaggatctgcgcgccagatttgagatccagcttaagcgtagcggtacgcaagaggcagctattatcaaaaaggccgcatcaatcagatcgatcattagagtggctgagatgaagactgtcacgcagccagagagggctcgattccagaggttcttggatttctggggcatgacggctgcccctgcagcgaagacagtccgcattcgccagcaaatccctgtgtcggtcactaaagaccaggtgaaggcaatgatcgatgacctgtctgagaatctcgtgccaaagagaaacgacattgcatttaagtttgagaaggaggcacagccggtgtggttaagtgggagtattgcgtctgccagctatgatcttaatgtcgataaggtggatggtgttttctccgctgaagatcttgcgagagcattttcgcggagaaaaggtgcgctaattggtgatgcaggataa

SEQ ID NO: 505153 - DNA, 528 bp, Stenotrophomonas maltophilia
atgaagacttggcaaaaggtatttctggtgttggtctggattgccgtgcttagtggtgcggtggttcagggcggatcggtctcttttgcccaacagtggccgctgtacgaggcgttaaggaatacggcggccatcatttttgcggtcgtgggtgcatggttggcgatcgtctatccagagcgattgcgaatgtcgcagggcaggccggggactgctgagcctaagaatgcggagaagatcactaagctgctcgagccaattgtaaactcgaccgtgattcttgcggttgtgctgattgtggggttgattgcgcctctgattaagggggttccttttgttagggcgcatgtggaggtttttcgaactatttcctttgttattcttgcgtcgttgacattgcttcagatttgtacggttgtattgacgctcattccggcgagtgatgtgcgacagcaggtgttggaggaaaaggcggtgaaagatacatttggttcgattttctcacgcgggaagaagaggggcgggtag

SEQ ID NO: 505154 - DNA, 654 bp, Stenotrophomonas maltophilia
ttgagcgccaatggacacgaaaacattgccgaattgttgtcgtctcagcttgatcgcggtctgctgctcgacctgcagcgattggtattgcgagcgctcgaggaggccgtggaggccagtgctcgctttgctatgggtcataggccgacggcggagggccttttgaggcatttgatcctgaacgaagcgatggagagggggctggctgaagcggaagtcccgcggaccccgcttaggggcaacgcgatcatggttggtcaggtcgggatcgtcacccttggccgtgtgcacatggggaatggcaagtggaataacgccaagcgcagcaaaggcaaagtgaagctgtgccgcaacaatgacgtcgttcgccgtttggttaagcctgacctttttagtgatgttcgggttgcagatgttcgcgaagtagctgtcttccttgtgacggaggctgggcaaggtgacgcggatgcccgaatctatctggtagttcctgatgaaaccatggaccttaagaactgcgtattcaaggaagagatgtctttgttcttgcagcggtacgcaaaacccagtgatgtcgaggatagggtcggaccgaagctcaagagcgggatcaagaaaaagcgggacggcgatgaagatgagccaatgagatga

SEQ ID NO: 505155 - DNA, 1215 bp, Stenotrophomonas maltophilia
atgacacgttctatccaaaattttgttccagagcggctaacgcaagcgttggccgctcgcggtttttctgccacagaattggcggcgcgagtaggagttaccaacaccaccatcagcaggtggcgtaatgctgtacaggtcccttctggagccatgcttgaagcgatcgcgtcggagctgagagtgacggcggagtggttgacccgccccatccggccggcgacctcacgcccgtgctataggggaagtattgcccaattgaagcaagatcgggcgctgttgggcgcccgcatgtcgtggcttgaggagctctcctcgcagctcgaggactacgttgactatcccgaagtctgtgttcctgatatgggaggcatgaggctttctgatatcaccaacgcggttattgaagaggcggcggagcgctgtcgccgtgcgtggggtatgggcgaaggcccggcgggcgacattctgctgcttctagagaatgctggcgtggtcgtagcaagggaagagacgggcgtcgctcgtatcgagggcctttccgcctggagctctctgggtcgtcctttcgtactcctgtgcgcggataagggaaatgcgttcagaagtaggttcgacgctgcgcacgagctcggacatctgatacttcacaggggtattgacgcgccgggcgatgcgacaacgcataagctgatggaaggccatgcgcaccgattcgcaggggcatttctgcttccagcgaagggcttttcggccgaagtcaacacgccagtcaccttgaacgggttgctcttcctcaaacagcggtggggcgtgtccgtcggcgcgatgatcatgaggctacgaaatttgcagatcattggcgaagaggactatctgcgtttgattaagcaccggtctgcgaaatggggccaacgcagcgagcctggtgatgatgatcgagaacccgaacagcctcgccttctgcgtcgaacgatggagctcttggcgaacgaaggtgttgttgtgccagaagcgctgcctgaccttgtgggtctctctgggcgcgatgttgaaagtttgatggggctgccattcggtcatctgtctggtcgcaaagccgacattgtggagctgtcactcaagccgcgcgaacgggtccgggaggagcgggaatccaatctcggcccctctgcagagatcctgccgtttggcaggagggggcgcgagaagtag

SEQ ID NO: 505156 - DNA, 2280 bp, Stenotrophomonas maltophilia
atgtccttcgatctcgaaaccactgccgctgacgccgcgcccgtacagggcgaactgctcgacgcggaatcatcccctctgaccctgagccttcaggatttcgtcggcgagttcggcgacgaactgctcgacgccctcaacagcgccaacccgcctgtctataccggccaaccgcaggcgcaccggcagctcatcgtcgccagcctcaaacgcaagctgttcccggcccaggccgaagtcgtccatgccgcagccgagctgctggtcgatcaaggcgaacgcgctgcgatcgtcaatggcgaaatgggctgcggcaagacgaccgtcggcatcgccacggccgccgtgctcaacgccgaaggctaccgccgcactctggtcctgtcgccaccgcacttggtttacaagtggcggcgggagatccaggagacggtggccggcgccaaggtatgggtgctcaatgggccggatacgctcgtcaagctcctcaagctgcgtgagcagttgggcgtgcagcccacgggccaggagtttttcatcctggggcgcgtcaggatgcggatggggttccactggaagccggtcttcacccagcggcgcacccgccacggcgacgtggcagcctgcccggactgcggcacactcatcaccgacctcgacggcgagccggtcaacccggtcgcgctcgaagccgaggagtcccgcaggaagtgcagccactgcgccgcgcccctgtggacgctgatccgcccgcgtagcctgtccggcagcgaccagtcctcggtcgtcctcaaagccttgaagcgcataccgaccatcggggaagtcaccgcacagaagctgatgcagaagttcggtgacggcttcctggcctcgatgctgggcgacaacatccatgagttcatcaacctcatggatggcaacggcgagctggtgttttccgaccgtcaggccacgcgcatggaacgtgcgatggccaacatggagtttggctttggcgaaggcggctaccaaccgtccgagttcatcaaacgctacctaccgcaaggcacgttcgacctgctcatcgccgacgaggcgcacgagtacaagaacggtggcagtgcccagggccaggccatgggcgtgctggcggcgaaggctcgcaagaccttgctgctgaccggcacgctgatgggcggctacggcgatgatctgttctacctgctgttccgggcactgcccggacggatgatcgaagacggctaccgcccgaccacgagcggcagcatgacctcggctgcgatggcattcatgcgcgatcacggcgtcctcaaggacatctactccgagagcgccggcacggcgcacaagacagccaagggcaccaaggtatcggtgcgcacggtcaaggctcccggcttcggcccgaaaggcgtcttgcgctgcatcctgccgtttacgattttcctcaagctcaaggacatcggtggcaacgtcctgccgccgtatgacgaggagtttcgtgaagtccagatggacgtggcgcaagctgcggcctaccgcgatctggcgggtcggctgaccgcagaactgaaacaggctctggcgcgacgcgatacgaccttgctgggggtggtgctcaacgtgctgctggcctggccggattgctgcttccggtcggagaccgtggtgcatccgcgcacgcgcaacaccttggcgtttgtcccggctcagttcaatgagttcgagatcagccccaaggagcgtgagctgatcgagatctgcaaagcggagaaggaacagggccgcaaggttctggcctacacggtctataccggcacgcgcgacaccacgtcgcgtctgaaggggctgctggagcaggaaggcttcaaggtggcagtgctgcgcgcaagcgtggatgccagccgccgagaagactggatcgccgagcaactggaccgtggcatcgacgtgctcgtcaccaatcccgagctggtcaagacggggctggacttgctggagtttccgacgatcgtgttcatgcagagtggctacaacgtgtattcgctccagcaggcggcacgccgctcctggcgcatcgggcagaagcagcccgtgcgtgtgatctacctcggctacgccggttcctcgcagatgacctgcctggagctgatggccaagaagatcatggtctcgcagtccacctcgggcgacgtgcccgaatccgggctcgatgtcctgaaccaggacggtgattccgtcgaggtcgcactggcccggcagcttgtcgccgcatga

SEQ ID NO: 505157 - DNA, 306 bp, Stenotrophomonas maltophilia
atggcatcgcatcgcatcgaaacctactgccagaggctggcgttccccatcggggcgcttatcttcagcagagccgttgaccacctggtccgcgcgggtcgcctggacccgattccgtacttcaggcgccacacccgtggcgactggggtgacgtcaacgtctgccaatggcacgccaacggcgttgcacttcaatcgggcgcgtcgctggaatcgcactatgtgatccacccgggactcgccattcgcatcatcaccgatgcggggcgcagcgtcactgccatcgtgctgccgtccgaagactga

SEQ ID NO: 505158 - DNA, 321 bp, Stenotrophomonas maltophilia
atgttccccaatccgttcaagcggcctgcgccgcgcaagcaacccttgttcgcaccgagtacgttgaagttgagcgagaaggtgcattggctggctcggcgaggcctgatcgaccccttggcctatgtccagcgccatgtgcgcggggactggggcgagatcgatgaggccacccgccaagccaacgacgtcgcaatccaacaggacaacctgatgatctcccagtaccggatcacgccggaactggtgttgctcgtgaagaccagcgaagaccaccagaccacggtggtccagcttcccgaagagcgcgacctgatctga

SEQ ID NO: 505159 - DNA, 1110 bp, Stenotrophomonas maltophilia
atggctctcatgttcccgcggctcgcccgcaatttcgccaaaaatgggtactacccgaccgacgaacccacgctcgaaagagccctcaacgcactgatgcccagcgacgggccgatgtgcatcctcgatccctgcgccggtgaaggcgtggcaatcgccgaagcctctcatgccctcgggcgcgaacaggccaaggcgttcgccgtcgaattcgacgccgagcgggcgcgccatgcccgcggcctggtcgatcactgcctgcacgcggacctgatggacacgatgatctccaagcagtccttcggactactgtggctgaatccaccgtatggcgacctgtccaaggacgtcaacggcaacatcggctatcagggccagggccgtgcccgcctcgaaaagctgttctatcagcgttcgctgtcgctgttgcaatacagcggcgtgctggtcttcatcgtccccggctacgtgctcgacgcggagctggtcggctggttgacgcgccactacaccgatctgcgtatctaccgagcggtggaaacgcagttcaagcaggtggtgatcttcggccgccgggtccgtcagcgggagctggcacccgatggcgtcaaggccgtgcgcaatctgctgctgcaggttgggcttggcgaagtcgaagccgaggaactgccgagcgaatggccgttcctgccgtacatcgtccccgccagtccggccgagccggagcatttcttccgcgtgacgatggagcccgaacagttcgccgacgaggttggccggctgcaaggcctttggccgtcgctggacacgcacttggggaccgcgcagcagtcgctgcgtccaccggcgcgggccttgtcccactggcatctcgccctggctctggccgcgggcgcgatctcgggcgtcgtgcgctcccagacggggcgcgtgctcgtcgtcaaaggtgacacccacaaggacaagacgctccagcgggaattcaccgaacgcgaagacggctccatcgccgagacacgcatcctcaccgacaagtttgtgcccgttatccgcgcgtgggacatgacgcctggctccccgacaaggggcgaggtgctgaccattcgctga

SEQ ID NO: 505160 - DNA, 651 bp, Stenotrophomonas maltophilia
atgcacgcacacacttcatccaccacgctgttccacatcgacgaatgcccggacgttatggccgacgcttgcgtcggcgatgaccagggcaacctgatcttcctgtccatctgggcgcgcgacaccgccgtccagcagttccttgcacgcctgaccctcgggcgcgacgagcagggactggaccagttccacgtcatcaccgaccagggcggcagcgtcccggtattcatcggcaacgtcgatcgcctggaaaagcgcatcacgcgcgcctaccggcgaacgctgttcggttcgctgtccaacgtgtggctgttcgaccggcgctgcgtcaagcccgacaaggccaacgccagcgcattggcactgctgccacgtgacagcgcccaccggcttgaccgcctgtggatgctggtgcgggacacctgcccgttgccgctgctcgaccactggcgcgagaccgtgctggaactgctgcaaagccgcgagatgctggcccgccttccgtccgccctcgggccgctggaaggccatcggctcgccatcgacgtgccggcgctgagcttggcgctgggctccctgatccgcagtgacgcgctcaccgcctatccctatccggccaagatttggacgccggaagcggtggcggcttga

SEQ ID NO: 505161 - DNA, 342 bp, Stenotrophomonas maltophilia; identical to SEQ ID NO: 441862

SEQ ID NO: 505162 - DNA, 327 bp, Stenotrophomonas maltophilia; identical to SEQ ID NO: 323923

SEQ ID NO: 505163 - DNA, 690 bp, Stenotrophomonas maltophilia
atggcagccacatcggcacctacgagatcagccctacccatcgtcgtcccgggccagctcacgttgcggaccatccggggcaagaacggcccgttcacggttgggcgcctttctacccccatcggcgagttcgcggttaaagacgcggagttggagcagtaccccgaaggaaagtacgacggggatttcgtcattcgctacatcttcgcgaagtcctatccggtcgcgggcggcgcgcggtttgaagtgcgcgcaaacctcgacggcatgacgctcaacggcatcgacaaactgagtcgtgatgaggcccgcagcttcgccacccaggaagtcgatccactcgatgaagagctggggacgcagcctgcggaaacgccggccaagcccgccaaggcctccagacccgccaagcccgcacccgtgcaggcctcggcggacccgctggtcgataccacgcccttcggtgtggatgcaccgacgcccgctgcggcggctgcccctggcagcaccgaagagggcgacgttgctttgttcggcttgctctggccgctgggcgattccgtgaaattggattcgaccatcgaccgccgcgccctgcgcgcgcagatcgcccgcctgggcgatctgggctacgcgctggacttcaaaacgcaggagtggagccgccaggccgaactgcaacctgcgtga

SEQ ID NO: 505164 - DNA, 930 bp, Stenotrophomonas maltophilia; identical to SEQ ID NO: 349965

SEQ ID NO: 505165 - DNA, 354 bp, Stenotrophomonas maltophilia; identical to SEQ ID NO: 323920

SEQ ID NO: 505166 - DNA, 279 bp, Stenotrophomonas maltophilia; identical to SEQ ID NO: 323918

SEQ ID NO: 505167 - DNA, 738 bp, Stenotrophomonas maltophilia; identical to SEQ ID NO: 323917

SEQ ID NO: 505168 - DNA, 393 bp, Stenotrophomonas maltophilia; identical to SEQ ID NO: 323916

SEQ ID NO: 505169 - DNA, 252 bp, Stenotrophomonas maltophilia; identical to SEQ ID NO: 330037

SEQ ID NO: 505170 - DNA, 312 bp, Stenotrophomonas maltophilia
atgctgatgtcacccgttcgcctcgcctggcaagtacaagtagttcgtcgcggttttctggccgtgtccgcccgcttcgctggcccttttgccccaaacaagcgcaatcatgcctgcgttaccaccaaagttcgcccccgccagttgctgttcctaaagggcatcaagctcaacgccatcgccgaccggccagcgtatttcgcatcgctgcgtgcccgtcggggccagcccatcgtcatcctcgcagagctgggaccggacgaggcattcgccctgtggaagcagcacgtactgggcgacaggcctcgctga

SEQ ID NO: 505171 - DNA, 501 bp, Stenotrophomonas maltophilia; identical to SEQ ID NO: 323914

SEQ ID NO: 505172 - DNA, 2955 bp, Stenotrophomonas maltophilia; identical to SEQ ID NO: 323913

SEQ ID NO: 505173 - DNA, 399 bp, Stenotrophomonas maltophilia; identical to SEQ ID NO: 323912

SEQ ID NO: 505174 - DNA, 636 bp, Stenotrophomonas maltophilia; identical to SEQ ID NO: 323911

SEQ ID NO: 505175 - DNA, 2031 bp, Stenotrophomonas maltophilia; identical to SEQ ID NO: 349604

SEQ ID NO: 505176 - DNA, 441 bp, Stenotrophomonas maltophilia; identical to SEQ ID NO: 323909

SEQ ID NO: 505177 - DNA, 528 bp, Stenotrophomonas maltophilia; identical to SEQ ID NO: 323908

SEQ ID NO: 505178 - DNA, 792 bp, Stenotrophomonas maltophilia; identical to SEQ ID NO: 323907

SEQ ID NO: 505179 - DNA, 1239 bp, Stenotrophomonas maltophilia
atggccgtggacgacaccgccccacgagcccagcgccctggccccatcgcactcgccgacctgttcgacgctgcgctgaaggacctcgcgcccaagtccagctctggcgctcccgcgtccctgcctgctccaacgcccacgcctcctacgtccggcgacgccttcctgttcagtggcaatcggcacgggagcgtgccgcggcggctgttcctcgaccgccgcctgacaccgctggagcgcaacgcctggcaggtgttccgattgatgctcaacgacgatggcgtcacggcatttcccacctatgagcagttgcgcccctggctggcgtcgatgccctgcgcaggccaggcctcccatgagaccgtggcgcgggcgctgacgctgctgcgcctgacgcgctggctgagcctcgtgcgacgacggcgcgaccccaagaccggtcgcatcctcggcaacctctacgtcctgcacgacgaaccgctgacgccgttcgaggcgatgcaactcgacgccgactacctggccctggtcagccagtcgctggggcattcggccaaggccgtccaggtggtgggactcaacaccctccaggagatcgcggacgacccgatgctgtccggacgcaccttgccgtcgcggctgcaagtgctcgccgagcgcctggccgaccagggcatcaccgcctccgaaagttatccacaggaggatgcggtccacgattccgaagaagggcccgcgagccttcttcggaatggcgatcgcccatcttcggaatccgaagcagggccgaaacccgcgccagacggcgctcttcggaattcgaagcaggaccgtacagtacgtagtagtcgtattgatgaagtacgtactaccgcgcaggcgcgtgcgctgggcgacctgcaatggcccaagcgcttcgcggaactgaaggcggaacagcaggccggagccaagatggcgttgcagcaggtggacgctgccctgcggcaggccgtgctggacgaatgggccgcacggtgcggcaagcatggcatccgcaaccccgccggttatctgttcggcatcatccagcgcgccatgcgcggcgagttcaatgcctgggccaagcagaccggcccggcaccgccaacaccatcggcggcgcgagcgccaccaaccgagccgccgcgcaacgtcgtgccgcccgaggtggcccggcagcacatcgagcgcctgcgcgatctgctgcgcaaatcctga

SEQ ID NO: 505180 - DNA, 561 bp, Stenotrophomonas maltophilia; identical to SEQ ID NO: 323905

SEQ ID NO: 505181 - DNA, 1680 bp, Stenotrophomonas maltophilia
atggctgacatgacctcgcaggacatggcaggcaagctgctcgcggccggcttcgagcgcagcggcccagcggctacggccttgagcgacccgatcgcggacacgcccatggtcgtgacgctggaccagttgcggccctacgaccatgacccgcgcatgaagcgcaacccggcttacgaggaaatcaaggcatccatccgcgagcgcggcctggacgcggcgccggccatcacgcgcaggcccggcgaggaccactacatcatccgcaacggcggcaacacgcgactggcgatcctgcgcgaactctggtcggagaccaaggaagaacgcttcttccgcatatcgtgcctgttccgaccatggccggagcgcggtgaaatcgtcgcgctgaccgggcatcttgccgagaacgaactgcgcggcggcctcacgttcatcgagcgcgcgctcggcgtcgagaaagcacgggagttctacgagcaggagagcggcgccgccctgagccagtcggaactggcccgccgcctggcggccgatggcttccccgtccagcggtcgcacatcacccgcatggccgacgcggtgcgctacctgctgcccgccattcccactgtgctctatggcggcctggggcgccaccaggtcgagcggctgtcggtcatgcgcacggcctgcaaacgcacctgggagcactacgccaaggaccgttcgctgccgctggacttcgacagtttctttcaggaggtgctggcgcagttcgacacgcagggcgacgagttcgcgccgcagcgcgtgcaagacgagctgatcggccagatgtccgagctgctgggcatcggctacgacgtgctggcgctggacctgaccgaatcggaaagccgccaccgggcgctggtcagtgacccgacgccacctgcggcgcagccggcgttgccttcgcccaccgccggcacgccgactccgccgggcgcagcatcgtccatcgccacgcctgcagcggcggccggtcctccacccgccagccctccggcgtccgagcccaccttgcgccacgacgacacggcggttggcgaagcggccacgggaagccagccggccgcaccgggcgatctgcttcgcgagcacatcgtctcgccagcaccgacgacagaacggctccaatcgatccagcgcatggtcgccgaccagttgggcgatgcgctgccgcccgacttctcggcgagcgtgctgcagtccatcccggtgcaactcggcggactctatccgatctccgacgtctggtacatcgacgccggcctggacacgcccgatcggctgcgcatccacatcgcgcagttcgcgcgcgagatcgccggggaggcaggcctggacgagtgcatcgaggatcgcgccgatggcatcgggtttgcgtgccgcgcccgcggccaagccccgtcgccgctcggccgcgcggtgctgacgctgctcacttccctgacgggtcagcccgtcgccgaagcgggcctggacggcgcgcagctcgccgccgacctgccgaccctgttgcacggccagagccaaggccatggcagcggcgcaaggcgcttgagcgacacggcgttggtcaagctctttcggctgctgcgcctcgcccggcgtctgctggacctggaagccggcaccacggcgcccgggacgtga

SEQ ID NO: 505182 - DNA, 270 bp, Stenotrophomonas maltophilia; identical to SEQ ID NO: 323903

SEQ ID NO: 505183 - DNA, 876 bp, Stenotrophomonas maltophilia; identical to SEQ ID NO: 323902

SEQ ID NO: 505184 - DNA, 213 bp, Stenotrophomonas maltophilia; identical to SEQ ID NO: 323901

SEQ ID NO: 505185 - DNA, 768 bp, Stenotrophomonas maltophilia
atggatacgggcagcgcgtggtcagtgatgacatgcgtaacagcaggactaaccgtcttactcgaatttctcaagtccgcgcttagctccttagcttggccagtaacggtgataaccgcagtgtggctgtttcgaaagcaggtcgcctcactgctatccaacatcgccgccattgaagcagttggatttgaagcttcatttggccatcaggtccagacaatggagccgcttcaggagtcgaaggatcactctgttgaaggcgtcgtggaaccggtacagccggatgatcttcttcatgactgcgctcagtcaaacgggggcgaccaagctggggctagagatgcaccaaactacgcacctgccgatgaattcgatttcgatccgtctgatcccgctgctgccatcttggcgcgggtgaggctcctgaggaatgtaaaagacttcgctgcatcggcctggctttcggcccaagcgaaacgtgacttcaaggaagcccggcttgttgcggctaactctgcgagtgcggccgtgctactggcatggagagctgtagaaggaattctgcgtaacctatctttctgcatggatgtgcgctatgccgagtcgagtgtgcgccatccttcaaggcaaagctccagacaaatcatgaaatcgctctacaaggggggctcattgacagtgatgcctttgatcgctatttcgacctggttcgattgcgagactcggtcgcacacgcggaacacttttcagccagtaccgaagatgtaa

SEQ ID NO: 505186 - DNA, 1959 bp, Stenotrophomonas maltophilia
atggtagacgccgcggtggtgatgatcgagaacgcacacaagcacctggaacactggcgcgaaatccacgggcgcgacccggagggcgaggaacgctgggaactgatggccgtctcggccagcgaagtcggtccggcgctgttcgccagcctgctggtgatcaccctgtcgttcgtgccggtgttcgcactgcaggcccaggagggccggctgttctcgccgctggcctataccaagacctacgcgatggcggccgccgccggtttgtcggtgacgctgatcccggtgctgatgggttacctgatccgcggccgcatccgccccgagcagacgaacccgatcaatcgcgtgctgatcgccggctaccggccggtgctggattgggtcttgcggcatccgcggctgaccttgggtttgagtggggtgttgctgctgctcaccgccattccctatgcacggatcggtagcgagttcatgccgccgctcgatgagggcacgctgctgtatatgcccacggcgctacccggcctgtcggcgggcaaatccgggcagctgctgcaattgagcgatcgcatgatcaagaccgtgcccgaggtcgcgcacgtgttcggcaaggccggccgcgccgatacggccaccgacccggcgccgatcgagatgttcgaaaccacggtgacgttcaagccgcgcgaccaatggcggcccggcatgacgccggagaagctgcgtcaggagctggatgccgcggtgaagatccccggcctgacgaacctgtgggtgccgccgatccgcaaccgcatcgacatgctcgccaccggcatcaagagcccgatcggcatcaaggtgtcggggccggatacccgggtcatcgagcagatcagcaacaaactcgaacgcttggcgaaaacggtgcccggcgtgagttccgcgttggccgagcgcgtgaccggcggtcgctacgtcgatgtccgcatccgtccggacgtcgcggcccgctatggcttgagccaggcccacctgcagcagctcatcgccacggtggtcggtggcgatcccatcggcgaaaccatcgaggggcgcgaacgctatcccattgtggtgcgctacccgcgcgggcaacgcgattcgctggcggcgctggcgcagttgccgctggtcgctccggggggcgtgcaactcacgttggggcaagtggccgacctgacgctgacgcctggtccgccgatgctcaagagcgaggccgggcgcctggttggttacattttcgtcgacgttgccagccgggatctcggttcggtggtgaaggacctgcagcagcgcacggcaaaggacatccagctgccgccgggttacggcatcgcctggtcgggccagtacgaatacctggcgcgggcactggcccgcttgcagtgggtggtgccggctgcactggcaatcatcttcctgctcatctacctggtgttccgacgtttcagcgaggcagcgatcattctgctgagcgtgccgctggcgctggtcggcgggctgtggctgatctggatgctgggccatgccatctcgatcgcgaccttgatcggcttcatcgcactggccggcgtggcggccgaattcggcgtgatcatgctgctgtacctgcgccacgcttgggagcagcgcctcgctgccggcgaaccggaaactctcgcgacgctggagtcggcgatccgcgaaggcgcggtgctgcgcgtgcggccgaaggcgatgacggttgcggtgatcctcgccggcctgctgcccttgttcatcggtgggggtgccggctcggaagtcatgcagcgcatcgccgcaccgatgatcggggggatggtgaccgcgcccctgttgtcgatgctggtcattccggccgcgtaccgcctgctgcgtggtcgcaccttgtcccgaacttcgtccgccgcgccgccggcgggcgccgcgacgtga

SEQ ID NO: 505187 - DNA, 357 bp, Stenotrophomonas maltophilia
atgaaccgttctctcgtcatcgctcttctcaccatcgtcggcgggttgctgagcgcctgcacctcattgaatccggcgtaccggctcggcacggtctcgaccgtgtcgggcagtgatcttcaggtgtgctccggcccgaaagacaccccgcccagcgccggacaggccgtgcaactggtgcggcgcgagcagttcggtaatccgaagtttgcgcccaccttccgcgagcgccgtgtcggtaaggcggaaatcggtacgtcggtctccggacgctgcgtcgaggctcgtttggtgcaaggcaaggcacgccgatacgaccaggtattccctgcgctgggagatgccacgcccaagtga

SEQ ID NO: 505188 - DNA, 279 bp, Stenotrophomonas maltophilia
atgcagatgaccgaagccgagcacaagcaaatggccggtgatgcccaggcggcgaccatggccctggcgatggggaccgtcgagtcagtggatgccgccgccggcaagatcaccatcgcccacggtccggtcgaagcattgacgtggccggcgatgaccatggcgttcaaggcatcgccggagcaactggcgtcggcgaagcccggtcagaaagtggaattcgaattcgagtccaaaggcgcggataacaccatcacccgcatcacgccgatgaaatag

SEQ ID NO: 505189 - DNA, 387 bp, Stenotrophomonas maltophilia
atgaacttcaaacatgtggttgccatcgtcaggcccgatgtactgactgcgccggaaggtgcgctccgggatctgggaatacgcgggatgaccgtgatcaaggtccgcggcatgggcgagcacgacggcgtcgattttctatcgcgcgatcatctgtccgattacctcaagatggagttctacgtggaggtgccgaaggcggacgcgctgattcggaccatcatggaagtcgcgcgctccgacctgccgggtgcgggcatcgtggcggacaagccggtcgagtggttttcccgcgtcccgaaaggcgacgacacgttgcccgatgtgttggctagccgcggccgtacgggagggcttcacgcagcctcgtacggcatgggtccgtaa

SEQ ID NO: 505190 - DNA, 1506 bp, Stenotrophomonas maltophilia
atgagcaacgagcagcgagaggtcgtggttgtcactggcagcagtggcttcatcggtacggcggtggtcaagaagctcgcgcagcggtatcgggtcgtgggcttcgaccgcggtgtttccacacatcctccggcggccgccgaatgcatctgcgtcgacgtgacttccgattccagcgtggccgccggcatggaacgcctgcgaacggcgtacggtgaccgcattgcctcggtgatccaccttgccgcttatttcgatctctccggcgaacccagtccgctgtacgaggcggtgaccgtccggggcactgagcgactgctgcgcgcgtttggggacttcgaactggagcagttcgtattcgtcagcacgatgctggtgcatacgcctaccacgccgggcgcgccgatcaatgaagatgcaccgttggatcccaggttcccgtaccgggcgtcgaagatccgcaccgaacagctgttgcgggagcagcacggcgatattccgatcgtgctcgttcggccagccggtgcatacgacgatcacggccattcggcatttctcgctcagcagattgcccggatctacgagcgccagctgtcgagccatttctaccccggcgacgttgctaccggccagccgtttctgcatctggacgacctggtcgacgcgctcgtgcgcatcgtcgagcggcgcgcgcagttgccgccggagctgccactgctgcttgccgagcaggatgctccgagcttcgatcgactgcagcacgaactcggatgcctgatccacggtgaagcttggacgacgcatgaggtacccaggacgctggcgcagaccggggtctggatcgaaacgcaggtgctgcgcgaagaaccgttcatccggccctggatggtcgagatttccgatgaccactacgaagtcgacacttcgcgcgcattggatctgctcgaatgggcgccgcggcaccgcttgctcgaggcgttaccgaccatcgtggccgaactcaagcgcgatccggtcggctggtaccgcgccaacaagctcaattcctccaaagtagctgcacgtggtgtggaggcgcaggccgctgcatccacgcatgagccaggcgaatacgccgacggtcacgatacggtctccgataaacccatggagggccgatgtggacaggaaatggcaggcaaaactgccgaaggcaaatgcggaaacgcgatgaccgcgacgggcaaggtcgccgaaggccggtgcggagaggcgatgtcgacgaagaccggcgacgaaggcatgagcgggcatatggccggcatgcgcaagctgcacttcaacctgctctgggtccattacctcaacctgctgctgggtgcgtggctgatgaccagcccggtcatcctcggcggtgacactgtcttcagcgatgccatatggcgcgtgacgcaggaacgcggcctgtcggatcggcactgcgcagccagtggctggcccgcagcgacctgttcagcggcgcgctga

SEQ ID NO: 505191 - DNA, 1185 bp, Stenotrophomonas maltophilia
atgttgttctcgatgatgtcgctcacgccgcggctggcttgggcgcagtgggccaatgctgcggtcggtgcgtggctgctgttcgccccgctggtgatgtgggcgccgagtgaagcggtctatgccaacgacacgatggtgggtgcgctggtgatcacattctccatcctggtgccgatgatgccgggcatgagcatggcgggaatgatggattcctccgacatgccccccggctggacctattcgccgtccacgtacctgcagcgcctgccgatcatcgcgttgggtgcagtgggattcctgatttcgcgacatctggcggcctaccagctcggtcatatcgaaggcgcctgggaaccgttcttcgccggcatgcatggcctgaacggtaccgagacgatcattacctcggacgtatccaaggcctggccgatcgccgacgctggccttggcgcggtcgcgtatctgttcgagatcctgatgggcgccatgggtggccggcaacgctggcgcaccatgccctggatggtgaccatgttcggcatcctcgtggtgcctctgggcatcgtcagcatctacttcatcatcatccagccgatcgtcatcggcacatggtgcacgctgtgcctgcttgccggcatcgcgatgctgatcatgatcccgtacagcctcgacgaactcatcgcgatgggccagtttctggcgcagagcgtgcgccgcggcgaaccgttctggcgcacgttcttccagggcggcgcccagccttacgacggccgcgatgcgcaccccgatttcgatgcgcctctcgtgcaagcggcgcgctccgcgattcgcggcatcacgctgccttggacgctgctcgtgagcacaacattaggggcatggctgatggtcacgcggctgacattcgacgcagagccgcccatggccgacagcgaccacctggtcggcgcgctgatcgtgaccaccgccgtgatcgcgatggccgaagtggcacgcccggtacgtttcgtgaacatcgggtttggcgcatggctgctcgtagcgccatggatgctcggcggagcgtcgatgcccgccacatggaacggcgtgctggtgggactcgccatcatcgcattgagcctgccgcggggtacgcgcagcaaagagcattacggcaactgggaccgttttgtggtgtag

SEQ ID NO: 505192 - DNA, 213 bp, Stenotrophomonas maltophilia
atgatcgaccgcaagaaagagattgccaaattcttctgtgggtttgagacctttcatacgctcttccatgcctatttgtggctctctggcaccacattcgcagctttcgggatcactaccactccagcttggaatgccgcgggcacgatcctcaacagcgcaattgccgtcatcctcggcgtctacggatggaagcaacggaagttggcatga

SEQ ID NO: 505193 - DNA, 585 bp, Stenotrophomonas maltophilia
atgcatgcaggatcgaaacccaacatacccgatgcggacccactcgtggatctggcccaccagcgtcgaggcttattcaaggttgcagggttgggcgtggttgcctgtgttgtcggactgtttgcgggctatttgctgctgccgagatacttcgactttcccgaagcgctgaccgatcggttcgtgttctgggctcgcctgcaggtgtttctactgatctgggtggcgatgggcgtcggggcggtctcccgcggccggcggcggtcggcccaggatattcggggctcggcctatggcccacccagtccgcgcgtggcgattcggatcgcgttccttcagaacagcctggaacaggccgtgctcgccagcggcgcctacctggcgctgatcacgctgctcgcggggccagcgctttcgctcctcgtcagtgctgcggtgctttttggcataggacgagtgacgtttttcctcggataccaaaggggcgcgccgggccgaggcttcggatttgtgctgacggtgcttccgactttgttgggctatgcatgggccctctttttgatcactcggcagttgttcgcgtag

SEQ ID NO: 505194 - DNA, 1407 bp, Stenotrophomonas maltophilia
atgagcgagcactacgatgtcgtcattatcggcggcggcccgggcggctatcccgccgccattcgtgccgcccagctggggctgcgcgtcgcgtgcatcgagagccgccaacggctgggcggtacctgcctcaacgtcggctgcattccgtcgaaggcgctgctcgaatcctccgaacgcttcatcgccgcccgcacggagttcgccgaacacggcgtcgagttcgagggcctgcggctgaatctgctacagctgatgacgcataaggacaacgtcgtgtcggggctgggcaatggcatcgactttctcatgcgcaagcacaagatcgcgcggctggtcggcaccggatcgatacccgcgcctggacaggtcaccctgatcgacagtaacggcgctacacagacgctgactgccacttccatcgtcatcgccaccggctccgacagcgcgaccttgtccggcgtaccgatcgacgaagcacgcatcgtctcttccaccggcgcattggccttgccggaagtgcccaagcatctcgtggtgatcggcgcaggttatgtcggcctggagctgggatcggtctggaggcgcttgggggcaaacgtcaccgtaatcgagtatctcgatcgcgtcacttcgggaatggacatcgagctttctcaagccctgcacaaggtgctggaggaacagggcttcgtattccggctttcgcagaaggtgacgggcgcgcgaagcgaggacgatgaaatcgtattaacggtagaaccggcccagggcggcccgagcgaggagattcgcgccgactatgtgctggtatcgatcggacgccggccctttaccgacgggttgggactggacgccatcggtatcacacgggatcggaagggttatatccaagtggacgagcactggcgcacgaatgtggacggcatttacgccattggcgatgtgatcggcggtcccatgctggcgcacaaagccaccgaggaaggtgtcgccttggccgagcaattggccggactgccgggacacgtcaactacggcgccattccggcggtcgtctacacggcgcccgaagtcgcctccgtgggccagaccgaagaagccctgaaggctgccggggtgagctacaaggttggccgtttcccattcagtgccaacagtcgtgcccgcgccaaagcccagactgatggtttcgtgaagatcctcgccgatgcgacgaccgatcgcgtgttgggcgtgcacatcatcggcccggaggccgggtcgctcatccacgaagcggtggtcgccatggagttccacggatcggcagaggacatcgcccgcagctgccatgcccatcccaccttgcccgaggcgctcaaagaggcggccatggccgtggacaactgggcgctacacgtctaa

SEQ ID NO: 505195 - DNA, 528 bp, Stenotrophomonas maltophilia
atgaacactaatcgcaagaacgcggctccaatccctaacggtctcatttggttgacggtctccttgctggtgattgcactggaccaggccagcaagcactgggtggtcaccgcgctgcccgagtacaccgcagttccggtgatcgagggcgtgtggaactggtaccgcagctacaacaccggcgcggctttcagcttcctcagcgatgccggcggctggcagcaggttgtgtttagcatcctggcgttgggtatcagcgggctcctggcctactggctataccagacgccacgctccgcctacaaggttgcgttgccctacgcgttggtcatcggcggcgcgctgagcaatgtcatcgaccgatcgctgcgcggccacgtggtggacttcatccaatggcactggcgcgattactactggccggcgttcaacctcagcgattcggccatcatggtcggagccatcgcgatcgcgctgcacggcgtgttggggtcgggtcgtacttcaggcaacaccactcggagctga

SEQ ID NO: 505196 - DNA, 1266 bp, Stenotrophomonas maltophilia
atgacccgacagcacaacgccattcgcgaacttgtcatccccgtggctgtggcggtactggcagtgctgccggccttggtcctacgcctgaccgatcgcagcgccggagtgctggcggatgcagcgctgttcggcctggcaatcctggcggcgggtttcctgttgtcgtggggcgcggaggcggcggagaagtacatcgccaccggcttcgtgctcgctgtcgtcgccttgatcaccgtgctgcccgagtacgccgtggatttctactacgcctaccgcgctggtcaggatcccgcgtcgggctacgtcgcctatgccgcggccaacatgactggcgccaaccgcttgttgatcggcttggcctggccactgctggtcgggttgcactggtggcgttcgcgcaagcgcggcatcgcgctgcagccggagaacacggtcgagatcgctttcctggcgttggcaagcgcgtatgcgttcgtgatcgtgctcaaggaccgcatcagcatcttcgatttcctcgtgctcggcgcgttgttcggtacctatttgtggcgggtgtcgcgggcagagaacgaagaggaggaagaagacgaggaacccggccctggagcggtgatcgccaccttctcaccggtgcgtcgctggacggtgatgggcgccatgagcgtgcttgccgccaccgtgatcctgctatccgccgagccgttcgccgagtcgctggtggcctccggtcgccgcctgggcattgacgagttcctgctgatccaatggctggcgccgctcgccagtgaagcgccggcggtgacgatcgcggtcctgttcgtgctcgacggccgcgcccgcgctgggctgactacgatgatcagcgacaagatcaaccaatggaccttgctggtcggcatgctgcccattgcgatgagcatcggcgctggagaactgacgagcttgccgctagatgcccgccagcatgaggaattcttcctcaccgcgacccagtcgctgttcgcccttgcgctgttgctgcagctgcgcctgagtgtgtggggcgccatcgcgctggcggtcctgttcctgacccagctggggcttgcgttcttctaccaggccacaccggcacgagagatcgccgtgctgaccacaatggcgtggatctacctcgggctcgcggtgcttctgctgacgcgcaacttccggcagttgccggcgctggtgggcgccgcatggaacaagcgtccagccgtcgacgagggcccccatgaacactaa

SEQ ID NO: 505197 - DNA, 321 bp, Stenotrophomonas maltophilia
atgaaacagatcaaggctttcgtacatcgcaaccgggtcgccgatctgatccatgagttggaggccgccgggttccggcggctttccctgttcgacgtcaagggcctgctgcgcgcactcagtgcgcgcgagcagcagtattcggtcgagtttggcgatcaggtgatcaacgaagtgcagatggaactgttctgcgaggacggcgacgtggagcgcgcggtcgaaatctttcgccgcgtcggacgcaccggccgcacagacgcaggtgcggtttacgtgagttcggtcgaacaggcgtttgtgattgatggcgccccgtaa

SEQ ID NO: 505198 - DNA, 1185 bp, Stenotrophomonas maltophilia
atgagagagaattcaatggttccgtttcgactgacgtcactgctcaccgtgaccctattgctggccttggcgggctgctccaaatcgcctgacggcaaagccgcccaagcacctgccaccgaatcggccgagcatggcgatgccgaaggcgcgaccgcggcgggtgaagccggcgaagcaggtgaagtcggaaccccagtgaagatggacgccgcagccctcaaggccgcgggcatccagcttcaggccgtgcaggcgaccgcgctcagcgaagaactgcgggcccctggcgaagtggtcgacgatgcctacggcaccacgctgatcacgcctagggtcgaggctctggtcgtgcgccggcacgccaggctcggggacgaggtccgcacgggcgcgccgctggtgacactggccagcgtcgaggtgtcggacgcccaagccgaactgcggatcgcggagcaggagtggcgccgggtttctgcactcggtcgcgaagccgtttccggccgccgcatcaacgaagccaagatcgcagtcgaccgggcaagggccaaggcgcaggcctatggcctgccgggcaccgccagcgggggcgtcaacggccagttcacgctggccgcaccccatgccggccgcatcaccgaagacgagtttgtcgtcggcgagcgcatcgagccgggcaagcccctgttccgtctagtggacgagtcgagggtatgggtcgacgccaaactgccctccggcacgatgtcccgcgtggcaccgggttcgcaggcgactgtcgtgttcgcgggcgagcgcttgaccggcaccgtgcagcgttccgcacaccggacctccgataccacccgcactgcagtggtacgcatcgaagtgccgaaccaaggcgatcgtctgcacggcggggatttcgtcgacgtgttcttcgagtcggcttccggtcgtgtcagcaccaccacactgtcggtgcccaatgacgccctcgtgcaattccagggcgataccgtggtcttccgccgcaatgctgagggcgcactcgaaccggtgccggtgcgtaccggcgaagtgatcggcgaccgtaccgtgatccgcgaaggcctcaaagcgggcgacgtggtggctgtgcaaggtgcatacgcgatcaagtcgcagatgctcaagtcgcagctcggagaagaagaatga

SEQ ID NO: 505199 - DNA, 1287 bp, Stenotrophomonas maltophilia
atgcactttgttcgtttgccgcgacgacattctgccgtgcggttggctgccgtcattgcgctggccttgacgctatcgttgccggtcatcgcggccgagatgccgtccacgctggcgcctgccgccgtacgcgatgccttacaggccgcatggcagcgccaccccacttaccgcgccacggaagcccagttggcggccgctcgcgcccgcctcgatgcagcggcacagccgctgtacaacccggaagtcgaactggcctccgacgacgaaggtcccgaacgcaccaccaaggcggggctcaatctcaccctcgatctcagcggcaaacggcgcgtgcgtcgggaggcggcatccgcccgtgtggaccatgcgaccgccgaagcgcggttgcatcgacgcgatttcgccaaacaatggttcgccggatggaccgaactgcagacggcgaacgagcgcgtgcgcaccggagaacggcgtttggcgctgatgacgcggttcggtgacctggcgcagaagcagttcgccgccgaggacatctcgggtctggaacgcgatctcgctttgctggcgcgggatgaagcgcaagccgagcaatcgcagctgatcgccgagcaggccgaggcgcaggcgcgtttccgtgccctgggcggatcgccggaattgctggccgatctgacgttgcccaccggaacgttgccgccaccgaccggcaccgccggggaagtcgagcaactgccggactggcaggtcgcccaggccgctgcagtcgcggccgagcgcgaagtcacggtcgcccgtcgcaaccggatcgccgatcccacgttgggcgcttacggcggacggaaacgactcgatatcggcggccccagcgacaacgtcgtcggcgtgtcgatcagcgtgccgctgttcgtacgcaactcttatcgcgccgaagtggtggcggcgcaggccgacgccgatgtcgcggccgcggaccgcgaccgcgtgcgcatcgaactggaagccgatcgacagcgggccatcgacagctacgcggcgacgcaatcgacctggacgcgctggcaggccagccgcggcaccgacgtcgagcgccgcaccacattgctggagcggttgtggcgcgaaggcgaactgtcgactgccgactacttgcagcaactcaaacaaaccctggacacccaactcgctggcgctgaactcgaagcccggctgtggcggtcctacgccgattacctcgccgccaccggccagctagaacgctgggccgggctggagggcgccccatga

SEQ ID NO: 505200 - DNA, 2388 bp, Stenotrophomonas maltophilia
atgagccaagcagactccaaaacctgtggttgttcggcggccgcagcggcagcccccgaggcgcaccttcacacgcccgccgcgacggtttaccgcatcgagaacatggactgtccgaccgaggaggccttgatccgcaacaagctggcgggcgtgccgggcgtcgagcgcctggacttcaatctggtgcagcgattgctgacggtgcaccacgccttgccgtcgctgacgcccgtggaacaggccttggcggcgatcggcatgcgtgcggtgcccgttcaagggacgccgacggaccagtcaacgacgctggccatcgccaagatggattgcccgaccgaggaagccttgatccgggccaagctcgggacggtgtcgggggtgtcgaatctcgttttcaatctggtgcaacgcaccttgcaggtccgccatacgcccgatgccttgccccaggtgctggcggcgctgaggacgctcgattttgaagcacacgtcgtggagggagccggtgccgtggcgccggcggcggcgaccccaacgaaatggtggccgttggcgatttccgcggttgctgcgatcgccgccgaagcgatctattggctcaacaacggcaatcactggtccgtcattgccttggccttggtggcgatcctgacgggcggcctgccgacctacaggaagggctggatcgcgctgcgcaacctcaacctcaacatgaatgcgttgatgtcgattgcggtcaccggcgccatgctcatcgggcactggcccgaagcggcgatggtgatggtgttgtttgcgctggccgaagtgatcgaggccaagtccctggatcgtgctcgcaacgccatccgcgggctgttggatctcgcgccggaacgggccacggtgcagcaagccgatggcacgtggcaggagatggaggccaagcacgtcatgatcggcagccgggtgcgcgtcaaaccgggcgaacggcttgcgctcgatggcgaagtgctggagggacgttccaccgtcaaccaagcgccgatcaccggtgagagcctgcccgtggaaaaggcgccgggcgaccctgtctttgccggcaccatcaacgaatccggttcgttcgagttccacgttaccgccaccgcgagcaactccacactggcgcgcatcattcatgcggtggaggccgcacaaggcagtcgcgcaccgacgcaacgctttgtcgatcagttcgcccgctggtacaccccggccgtattcgcggtcgcgctcgccgtggccatcgtgccgccactggtgatcggcgggccgtggctcgattgggtctacaaggccctggtgctcctggtgatcgcctgtccttgtgcactggtcatctcgaccccggtgagcatcgtcagcggtctcgccgccgctgctcgccacggcatcctcatcaagggcggggtctacctcgaaggcgggcgcaagctgcaatggctcgccctcgacaagaccggcacgctcacccacggcaagccggtgcagacggatttcctgacctggaacgaagcggcgccgaccgccgcgcgggaatgggcggccagtctggctgcgcgctccgaccatccggtatcgaaggcggtcgcgttggccgcgcaggccgacggcgtagtgctgcaagcggtcagcgacttcgccgcgctgcccggccgtggtgtccgcggccgtctcggtgatgtgacctaccacctgggcaatcaccgcttagtggaagaactgggcgtcagctcgccggagctggagcgccgcctctcgatgctggaggccgagggcaagaccgtggtgatgctgattggagacagtcgcgtgcatgcgctgttcgccgtggccgacaccgtcaaggacagcagtcgccacgcgatcgccgagctgcatgccctgggcgtcaagacgctgatgctaaccggcgacaatccgcacaccgcgcaagccattgccgcgcaagtcggtatcgatcgtgcccaaggcaatctgctgccggaagacaagcaacgcgaggtcgagcaattggcccgggccgggacggtaggcatggtgggcgacggcatcaacgatgcgccggcgctagcacaggcggacatcgggttcgcgatgggcgctgccggcaccgataccgctatcgagacggccgacgtggccctgatggacgatgacctgcgcaagatccccaccttcgtgcgcctctctcgcgccacggcaagcgtgttgatgcagaacatcgtgctggcgttgggcatcaaggcgatcttcctggtgctcacttttacggggcaggccaccatgtggatggcggtgtttgccgacatgggcgccagcttgctggtggtgttcaacgggttgcggttgctgcgccaatga

SEQ ID NO: 505201 - DNA, 1944 bp, Stenotrophomonas maltophilia
atgaaagtcctgcgtcactgcgcgctcgccctcctgattatggcgctcagtgctggcgcggccggggcggccgacccacaggccgaagcccggcaggcctggcagctgctcgattacatcgccgtggattacggcggggccgtgcgcggcggccaagtggtcgaaccgggtgaatacagtgagatgcaggagttcgcggccacggtgcgcacgaaagtggccggcctcccggcgacgccgcagcaagctgcgctggtgagctcggccgagcggctgcaggcggcggtcgccgcccgcgccgaaccggaagtcattgcgaaagctgcgcatgcactggccgccgaattgctgacggtttatcgcatcgaggcggcgccgacgaccccgccggacgtggccagcgcggccccgctttacgcccagcagtgcgccggatgtcacggggcccagggccgcggagatggccctgtagccgccagcctcacgccacggccaattgcgttcactgacgcagaacgcgcggcgcagcgcagtcccctggcgctgtatcaggtgatctcgcagggtttgaacggcacggccatgaccagctttgcccatctgtccgaagccgatcgctgggcactggccttctatgttgggggatttgcctacgacgacgcggcgcgcaaccgcggcgaaatcctgtggcgagaggatccgaaactgcatcaggcgctcccgacattggccgccttgtccggttcgagcgaggcagagttgggccagacgttggcggcggcacaggccaaggcgatcactgcgtatttgcgcgctcgcccggctgaagtggtgccgcatgccgctgtcggggctggcccgttcgcactcgcgcggcaacgcctggcgggcagcctgcgagcgtatgcggccggcgatgcagtgcaagccaagaccctggcgttgtcgtcttacctggatggcgtggagccagtggagccgaccttggccggccgcgatcgtgcgctgatgcgccggatcgaagcgagcatggcccgattccgcgatgcgctggggcgccgtgcgccggccgccgaggtgaccgctacggcggcggagatcaccggcttgttcgatcgcgccgaagcggtactgcaaacgtcccacaccgatacgaccacggccttcctgggcagcttcaccatcctgctgcgggagggactggaagcgctgctgatcgtcgtgggcatgattgcgttcctgcgcaaggccgaacggcgcgaagtgctgccctacgtccatgccggttgggtcggcgccttgctggctggcgtgctgacttgggccgtcgccacgcatctggtcgacatcagcggcgccaatcgcgaggtcaccgaaggcgtgtctgcgctgtttgccgcggtggtcctgttgagcgtggggatctggatgcaccagaagagcctggccgggcgctggcagcagtacctgcacgcgaagatgtcggcggcgttgacgcggcgctcggcgattttcctgttctcgctcgccttcatcgcggtctaccgcgaagtgttcgagacgatcctgttcttcatcgccatgtggagcgaacaggcgtccggcgcgatcctgggcggcttgctggccggtgccgtggtcctggccggggtggcctattggatgctgcgcatgagcaagcgcctgccgatcggccagttcttctcggcgagttcgatcctgatcgccgtgttggctgtggtcctggtcggcaagggcgtcgcggccctgcaggaggcgggctggatcgcgcaggccctggtggcggccccgcgtatcgaatggctgggcatctatccctcctggcaatcgctgctggcccagttgaccgtggccgtcgtcgccatgatcggcttcctcttcaacatgcgctcgcccgccccggtgcggaccaccaaggcctaa

SEQ ID NO: 505202 - DNA, 690 bp, Stenotrophomonas maltophilia
atgtgtataagagacagcaccgccgccatcaccacccccgccgtcaccgccaccatcgccgcccccatcaccaccgccgtcaccgccgccttcacccggcccggttccgccgccatcgcccccgccttcacccggatcgggcgtggtgggtgcaggatgatcgttctccgtgcacgtggcacctgtgggcgtaaagaggcgtcccgtcggcgcctgtgcatagagcgacccgctgtatgcgcagccgttgctgcacacgctttcaagcccattgttgccgccgcctttccagctggtttcctccgggcgagccgaacaggcgccggtgtagtagaactgctgggtgttgtcgtctcctgccgcgttgtagcaccgaaccgcgccaccattcggaccctcggcaactgcacacgtaaaagaaccctttgcggcagtgcctcccggtgtgcagtcctggcgaacgttcggcttaccccaaggattgcccggaacgtcaaatttctgcttggtgcgctcaatagctgccttgcacatcgcgtatgccgtgccctgatcgcaagtgccattgttggggcagtccgccgccgcgcgggtttcgccgggaagccacaggccgccgaacacgatcagagcaagcagagcgagtcgaatcactggctggcctcattgaatgccagggcgaccgcatga

SEQ ID NO: 505203 - DNA, 270 bp, Stenotrophomonas maltophilia
atggacttcagtggggtattcctcgggctatccgtcgcacaggtggttgcagcaattgtcggtgccggcacgttgatggcactcccttggttcggacggtggtgcgtcgacaagatcgcagggttctttgaggaccgcgaggaccaggacgcggacgaacacgccgacgacgaggcgggagaggttgaagaggtcgtgtgcgctgacaccggccatgactatgacggtggcgagtgcgtcttctgcggcgcaccggaaagggaggagtga

SEQ ID NO: 505204 - DNA, 135 bp, Stenotrophomonas maltophilia
atggacttcggcgacattctgaccggcctcgcagccgccagcgcagtcagcgcaatcatcagcgcaggtgccatcaaggcatctccgggcttcgcccgctgggcgaccaacaaggtcgccaccttcttccgctga

SEQ ID NO: 505205 - DNA, 258 bp, Stenotrophomonas maltophilia
atggccgtgtgcgtgtctctgacagctgaggggacgcttgtacccaccggggagcctgcatcgcagtgtggtgggtacgtgcttgtgtcggcggcagaacacgcacaggcctcaatcctcatcgatctattccagtggcccgaaccggaagtggccactggttggttctcgggggtgttcacgctggtcctcgcactgaacgtgctgggctacatcgtgggcgccgtcgtgaagtcggtcagtacagagcgggattga

SEQ ID NO: 505206 - DNA, 2001 bp, Stenotrophomonas maltophilia
atgcgtgatggatcgcgccgcagtgagcgcctgcgcatcctcatgctggaggacagcgcgcttgacgcggagctgatcagcgcacagctgcagcgcgcaggcctcgacttcgaggccgagcggctgtggacccgcaatgcgttcatcgaggcgatcgacaatcgccccttcgacatcatcctggccgaccatgtactgcccggattcgatggcgatgccgcccttgcgctggcgcgcgagcgcatcccgcacacgcctttcatcttcgtctccggcaccctgaccgaagagctggccgtgcaggccttgacccgcggcgcacgcgactatgtggtgaagcagcgcctgcagcgcttgccggatgccatccgtcgcgcgcggcaggaagcccacgagcgcaaccagctggtgcaggcgcaggctgcgctcaacgagagccaggcgcagctgcagcaggtgaccgacgccgttccggcgctgatcgcccggctcgacaaggaccaccgctaccgcttcgcgaacaaggcgttcctggattggcatggcgtgagccaggccgaattgctgggacgccttgcccgcgatgtcagcggcatcagcgccttcgaacgtgccctccccagcctggaacgcgtgctgcagggcgagcgcaccagcttccaggtcgagctcgtgcatcgcagcggccagtcacgattcgtgcagatggactgcgtgccggagcatgccgccgatggcagcgtggccggctacatctgcatgggcagcgacgtatcggtgttgaagcaggccgaactggccctgcgtgaggacaaccaggccctggagcagcaggtgcaggcgcgcaccgccgaactgcgggccagcaaacggcggctgcaggcaatctttgaatccagcttccagcatcaggtgctgctggatctgtccgggcgcgtggtcgatgccaatgacgcttcattggccgccgtgctggcggacaagaaggacattgtcggccagcgcttcggcgaatccctgtggttcgccaacaccaacggcgtcggcgcggtggttgaccaggccgtcgccgcggcggcgcagggtcgcaactcgctgcattccctcgagctggaactgcccaccggccggcgcagcttcgatgtctcgctgtgcccgctgctggacgccgacggcgtggccaccgccgtggtatcggaggcggtggaaactactgcgcggcggcaggccgagcatgcgcttcgccagtcgcagaagatcgaggcggtcggccagctcaccggcggcatcgcgcatgatttcaacaacatcctgacggtgatctcgggcaacatcgagcacgccatgctgctcagcgaacgggccggcgaagccggcgcgatggccagccgtgccctggacaatgccctgaagggggttggccgtgccgccagcctcacccagcgcctgctcgcctttgcccggcgccagccgctgcacagccaggcagccaacctcaacgagtgcctgctggacatgcaggacatgctgcggcgggcgctgggcgaactggtgcaactggacatccgcaccgccgaggacatctggtgcgtggagatcgacatcagccaactggaagcgtcggtgctgaacctggcggtcaatgcgcgcgacgcgatgccgcacggcggccgcctggtgatcgaagtcgacaacagccacctcgaccacgactacgccgcattgttcccggatgcttcccccggcgagtatgtgatgctgcgggtgcgcgacaacggccacggcatggacgcggccaccctggcgcgcgtgttcgagccgttcttcaccaccaagcaggtcggccgcggcaccgggctcggcctgtcgatggtgcacggcttcgtgaagcagtccggtggccacgtgctgatcgattcggtggaaggcggcggtaccagcatcaccatgatgttcccgcgctcgcctctggcgctgccttgcgaggctcgcgtcccgtag

SEQ ID NO: 505207 - DNA, 801 bp, Stenotrophomonas maltophilia
atgcagcagcgtgtcggccgccggcatcaggccaccagtgaagaaatggcggcccatccagttgtcgccgccctcggtctcgaacgggtacatcagcgtgcggtgggcgaagatgtgcacgaacagcgcgccgtcgggcttcagccactggctgatgcgcgccagcaggcgctcgtagttgcgcacatgctcgaacatttccaccgagacgcagcggtcgaagcgtgcgattggcagttcgagctggttgacgtcgcgggtgatcacctcgacgttgtgcagcccccgggcctggcactgcgccatgatgtgctggcgctggctgtgcgaattggacacggcggtgatcgcggcggcgggatagcgctcggccatccacagggtcagcgaaccccagccgcagcccagttcgaggatctgctggccatcggccagtccggcgcgctggccgtacagctccagcatggcgtcctccgcctggtccagcgtttcgcgcccggtggggtagtagcagctgctgtacttcaggcgcctgcccaggcaggcctggaagaaggccgccggaacctcatagtgctggcggttggccgcgtcggtatgcagcgcgagcgggctgtcggccagctcggcgatgcgacggctgaagcgtgcggactgtgcttcgataccgcccagcatttcctcgtgcaggcgttgcgcgcacaggcgacggatgccggcgcgcagcgcggcatcgggaaccaggccgcgttcggcccaggcgatcagcccggtttccgcgtcgtcggccggggtcagtga

SEQ ID NO: 505208 - DNA, 627 bp, Stenotrophomonas maltophilia
atggcggtgaatggaggccatggcgcgcaccctcgtttgactaaaacgaattggtgcgagggatttgcggcttccttccaggggttctttggctccccacttgtgattcgggaaacgcgctgtgggtgtatccaagggcactgcacacgtttgactaaaaccaatgtgatttgggtttcttggggcggtgctgcgggtgggcgagggcaacctgtcctggggatccggggcaatgcgaaacggtgggctgaaaaactttgcacgggttcccatggcaccggttgccactccagccgctcccgagcagttgcccgaggtggtggaagtccccgtggttgcgcctgctccagcagtgctttcagaacaggccaagccagaagccacgatcgagaaacccgcacctgtcgccgctcccccggtatcgacgacagcgccaattgcgccccagccaatgccttcgccgaaacgtgcaaccgccccattgccgaggaagccccccgcacccgccgccgaaccgcggaacgactggcagcaaaaagccaatgcagacctagacgcttgggcgaagaagtcggggatcgactgatcccccttgcgcatccgcggattcgatctagaaagaagtga

SEQ ID NO: 505209 - DNA, 333 bp, Stenotrophomonas maltophilia; identical to SEQ ID NO: 497769

SEQ ID NO: 505210 - DNA, 549 bp, Stenotrophomonas maltophilia
atgatgactattcaaaagtctcactggctgttgctctgcgctgtcatccttggcacggtcaccgctgcgctgcagctgggttgggagcacactcacggcggcattctgcgccaccatctgctcaatgatgcgagtcttccggcaatctccaatgtgtgggcgctgctggtgatgcccatgctgggtgcattggcaggctgggtcgttaatcgtcgaacacgcgagcagtcgggggcactcattccggccattgccggcttcctcggctcgctgcttggaggaatcgcgctagcggtggcattcgtagccagcggtgaagcggcggcaacgcaggtaatgatggcgcttctcgtggctgctgtactgatcccggtctaccgggcggagtacctgttcgggttcgtcatggggatgaccttcgtcttcggtcccgtgctgccggcgcttgtggcttgcgtaccgatgctgatcgccacgatcagccggctggtgctatggcgagctgttgcgtgggcgttgcgccgcgtgcgacctgttacaacagcatga

SEQ ID NO: 505211 - DNA, 423 bp, Stenotrophomonas maltophilia
atggccacccacgtaatgacgatcagtcggctggccgcggccgctggtgtgcatatcgaaacggtccgttattaccagcggcgaggcctgctgccggagcctgagcgcccaatgggcagcgtgcgccggtacggccccaacgaagtcggccggcttcagttcatccgtcgagcacagacgatgggattcagtctcgacgagatagcggggctgctggaggtcaaaggccagcgcgcctgcgagcagacgcggcagctgaccgaacagaaattggccgaggtgcgccgacgccttgacgagctaagacaattggaagtcgaccttgagcatttggtggaggagtgtcgccacgtggtgacaggcgcgccatgcccgacgctcgatctgttggcgcaaccagtcgagaagaaaaatatcggctaa

SEQ ID NO: 505212 - DNA, 357 bp, Stenotrophomonas maltophilia
atggcccaacgtcccgcacagtcctccttacctgccctcttgggcgccgcggtcgcggctattggcgcgtccgtgtgttgtgtcgtgcccttggtgctggtcctgatgggtgtcagcggggcctggatcgccaacctcaccgccttggatgcgtggcgtccctggttcagcgttgccacgctggcgtgcctgggctgggcgttctggacgctgtatcgcccggcgtcacgttgccggaacgacggagcctgcgtcgatccgatgcaattgcgacgccgtcggcgctggttatggattgccacaggattgatcgcgatgctgctgctcttcccttattacatcggctggttcctgtag

SEQ ID NO: 505213 - DNA, 294 bp, Stenotrophomonas maltophilia
atgcgcaagatccttctcggtttggtattcacggcatggatgggcctggcttgggcggctaccccaaagcaagttgtcctacaagtgaaaaacatgacctgcccggcgtgcagcatcacgatcgaaaaggcgttggacaacgtgccgggcgtgacggcgcgccgtgtcgacactcagggcgccaccgtgaccgtgaccttcgatgccgagcgcaccgacgcggccgccatcgcgaaggccatcaccgatgctggctttccggccaccgccaaggcggacgcgaacggtggctga

SEQ ID NO: 505214 - DNA, 2961 bp, Stenotrophomonas maltophilia
atggcgtcgatcgaacggaccgcgtatccccagttcaagcgcaatcccgtcgtccgggaactggtcgccgcctatacgccgaccgacgccgaattggccttcatcaccgacaatgctcgccaaccgggccatcgattggcgttggcactgctgctgaaatccttccagcgactgggctacttccccgcaatcgatgaagtgcccgctgcggtcgtccggcacctccgcaacgcgctgcggtaccgggtccagaccaagcccgccgacatcgcgccgaacaagcgctaccgctatttccagcgcatccgggattatcttcaggttcgggcttacgccgacggcggcctcgacgtggccgcccgcgccatccatgaagccgccgcagtcatggacaatccggccgacctgatcaacgtggcgatcgaacagcttgtccgcgatcgcatcgaactgcctgcgttttccgcgctggatcgcctggggcgccggattcgcaccttggtcaatggccgttacttcgccctcatcgacgcgcggttgacgtcggaggagaagcaacggctggacgatctgctggtcgtcaccgacgctcgcatcaagagcccgctgcaggccatcaagcggttgccaaaacgctcctcgctgcagcacttccaggaactaatcgaccatatcgcggcgttggacgaactggtcagcagcgaactgcatctggcggacgtaccggaactcaagcgcaagcacttcgcggccgaagcccgggtgctggacgctgccgagttgcgcgacttcggcccggccaagcgacacgcgctactgctgtgcctgatccatcgcgcccgggtgcaaacccgcgatgacctggcggagatgttcatcaaacgcatgggcaacctccataaccgcggcaaagaggaactggagcgactacgtgcgcgctctcgcgagaagaccgaggccatcgtcgccacgatgtcggatgtgatccaggtgctcgaccgtcacccgggcgacaccgatgcggggcgggaaattcgccggttggtcagcacacgcgggggcgttcagaccctgcaggccgattgcgacgcgatcgccgcacacagcggcgacaaccatctaccactgctctggccgttctataaaagccaccgcgccaccatcctgcgcatggtgcgcatgctggacctggaatccaccaccgaagaccgttccttgatcaacgcgatcgaactgatcctgtcgcaggagcgcgcccgcggcgactggctcgacgaaccggtcgatctggcgttcacgacccagctttggcggaagaccatcacccatcgcaccgagcagggcgaggagcgcattcgccgccgtctgttcgaggtatgcgtgttctcgtcgctggcgaacgagctcaaatccggtgacgtggccgtgcgtggttcggaaacctacgccgattaccgcgaacagctgctgccctgggagcaatgcgaaccgctgctggacgactactgccgccaggtgggcttgccgacctctgcggtgggattcgtcaatgccttgcagtccaaactgatacaagtcgcggacctgaccgatcagggttacctggagaacggccaggtgatcatcggcgacgacgggttgccggtactcaagcgccacaaggccaaggacatgagcagcggtgcccgcgctttggaaaccgcgattcttgctcgcctgcgcgaacgcagcgtcatcgagatcctgtgcgacgtgacccactggacccgctggccacggcatttcggaccgctgtccggatccgacaccaagatcgaccagcccaccgaacgctacgtgctgacggcattcacctacggctgcaacctcggcccggcccaggccgcccggcacctccgtggcgccgcttccgcgcacatgctgtcgttcgtcaatcgtcgtcacgtggatgcgaacaagctggcagcggcctgccgcgacgtcatcaacagttacgccggcctgcagcttcccaaattctggggcgatggcaagcgtgccgcagccgacggtaccaagtacgacctgtacgaccagaatctgttggcgtcgtaccacatccgctatggcggctacggtggcattgcctatcatcacgtctcggacacctatgtggcgctcttcagtcacttcattccgtgcggcgtctgggaagcggtgtacatcatcgacggactgctgaagaacacttccgacatccagcccgacaccgttcacgccgatacccaaggtcagtcgctgccggtcttcgggctatcgcacctgttgggcatccagctgatgccgcgcatccgcaactggcgcgattatcggttcttccgtccggacgaggacagccgctacgagcacatcgatgcgctgttccgggaggacatggactgggacctgatcgagacccactggaaggatctgatgcaggtggtgctgtcgatcaagtccggcaagatcgccgcctcgacgctgctgcgaaaactgggtaactacagccgcaagaatcgcctgtaccaagccttccgggcgcttggcgccgcagtgcgcacgttgttcctgctgcaatacatttctgaccgcgaactgcgtgagcagatcacggcctccaccaacaaggtcgaagcctataacgggttctccaagtatttcttcttcggtggagagggcgtcattgccgataacgatcccctcgaacaagagaaggcggtcaagtacaacgacctagtcgccaacgccgtcatctttcataacgtggtcgaacagacccgcatcatcaagacgctgatgcgagcaggttggaagatcaccccggaggacgtggctgcactcagcccctacgtgaccagccacgtgaagcgcttcggcgattacctgatcgacgtggacgctcttccggaaccgtacgaaatcgaactggccttggccgcgtag

SEQ ID NO: 505215 - DNA, 957 bp, Stenotrophomonas maltophilia
atgagcgatatcgaccgttacctgcaagccgccacccgcgacaacacgcggcgcagctatgcctcggcattgcggcacttcgaggtcgcctgggatgggcacctgccggccacggccgacagcgtggcccgttacctggccgaacacgccggacggctggccgtgaataccctgaaactgcgcctggctgccctggcgcactggcatgccgcacacggatttgcggatccgacccgggcgccgctcgtgcgccaggtgctcaagggcatccaaaccctgcaccctcaggaggagaagcaggccacaccgttgcagctgacccagctggcgcaggtcgtggactggctcgacggggcgatcatcgccgcccaggcgcggaacgcacacgccgcggatctgcgttatcgacgcgatcgggcgctgatcttgctcggcttctggcggggatttcgcggtgacgaactgatccggctgcggattgaacacctgcgcctggtccctggggaaggcatggtctgcttcctgccgcacagcaaaggcgaccgccaagcccaaggcaagacctacaaagtaccggccctgtcgcgtctgtgcccggtagcggcgacacgggactggctcgaggccgcacagctgacttccggcccgctgtttcggagcgtcggtcgctggagccggattgccgacgccccctttcatccgaacagcttgatccgattgctccggcaggtgttcctgcatgccggattggccaacgtcgagggctacagcagccattccctgcgccgaggcttcgccggctgggccaatgcgaacggctgggatgtgaaggcattgatggagtacgtcggctggcgtgacgtgcactcggccatgcgctacctcgatggcggcgacccgtttgcgcgccagcgcatcgaggcgagcctgccaccgccggcgttacccgcaccctga

SEQ ID NO: 505216 - DNA, 1647 bp, Stenotrophomonas maltophilia
atgaccacgccacttcgactcgcgctggcgcagttcgattttcccgtcggcgatctgatcgggaatgccgagcggatcacggcatatatcgccgaggcccgcgatatccacggcgccgatctggtggtgtttccggagctcacgctgagtggttatccgcccgaggacttgctactgcgtcccagcttcctcgccgggtgcgaggcggccgtgaggcacatcgcggcggcggcccgcggcatcgtagcggtagtcggctggccggaagcggccggcgccgtggtctataacgcggtcagcgtcttgcgcgatggtgctatcgcgaccacctaccgcaagcgcgacttgcccaactacgcggtcttcgacgagcggcgttacttcgccgtcgatcccgacggtggcgcctgcgtgttcgaggtaaagggcgttcccatcgggctgctgatttgccaggacctgtggggcctggaaccactcattgaaaccgcggccgccggtgcgcacctggtgctggtgcccaatgcatcgcccttcgagcgcgataagcacgccgaacgcgacgccttgctcgccgagcgcacgcgcgatgccgccgtcgcgattgcctacgtgaatgtggttggggggcaggacggcatcgtcttcgatggcgcctcgctgctggccaacgcagacggccgcgtgcatccggtggccatcgcgttcgagccgcattggctgatcgcggactacgacgtcgaaaatcgcacgctgctaccggtgtcgtggccgatcgaaggcgacgaaagccgcgatggcctcgcgtggcgggccgtggtcttgggcacacgcgattactgccgcaagaatggctttgaccgcgcttgggtcggcctgtcgggtggcctagactcggcggtcgtgctcgcgatggcggtggatgcgcttggcgcagaccgcgtcacagccgtgcgtctgccttcgcgctacaccgccgcggtgtcgaatgacctggcccaggagcagtgccgcgtcctggacgtacgcttggtgacgctgccgatcgaggagcctttccaagggtacctggatgccttggcgccgctgtttgcgcaggcgccagcggatgcgaccgaggagaatctgcaatcgcgcattcgcggtgcgctattgatggctttggccaacaagttcggcggcctgctgctgaccaccggcaacaagagcgaatacgcggtcggttacaccacgatctatggggatatgtgcggtggctatgcgccgatcaaggacctgtacaagacagaagtctccgcgctcgcccgctggcgcaacgccgtggcgggcgctccagtggtcccatggggggtgatcgatcgtccaccttcggcggagttgcgcgcggaccagaccgaccaggacacgttgccgccgtacgacgtgctcgacgccatcttgttccgctctatcgatcaggagcagtcgcgagaggagattgtcgcggcaggattcacccccgaaacggtcgaccacgtgcttcgtctggtgcgcatcggcgaatggaagcggcatcaggcggcgccaggaccgaaggtctcgcgccgcgcctttggtcgggagcggcgataccccattaccgacgcgtgggccgacacggcggaatag

SEQ ID NO: 505217 - DNA, 414 bp, Stenotrophomonas maltophilia
atgcgaatgaaaatcagtgacgctgccgccgccagcggctgccacctcgaaacgatccgctattacgaacgcgtcggcctgctgcccaggcccggacggacgcgcagcggctaccgacaatacaccacggccgacgtggagcgcctgcgcttcgtcacgcgcggtcgcgacttggggttcagcctggaggagatccgcggtctgctgcagctggccgaggatccggcgctgtcctgcaccgaggtcgaccggttggcgcgcgagcacctggacgacatccagacccggattcgggatttgcagcggatggccagcgaactggagcgcaccatcggcagttgtcgcgtcggccagcgcgggcaatgcacgatcctcgaaacgctgcggcgatcccccgaccattcctccccctga

SEQ ID NO: 505218 - DNA, 381 bp, Stenotrophomonas maltophilia
atgattgagttcgacccgcaccaccgtatcgacttgaccggcccttgggccggtttttctttcctcggtgatcgtctgatcacacccgaaggccgcgagctggaaccgcaggatctggcctggctgtcgctgactgcctgccaggcacaggaatggcgccggatgatggaagctgcacgctcggcgccgtcgatcgacagttccaagcgtggtggcaatcttcctgcagtaacgtgggatcgtcctgccactgtcgtcaatctgcgggacgtggtgagccggcgcaaacagcggtcggcggtggcgatggctggccctgacgccgagccacctgcaggtgtcctgccggtaccggggccgaaacgccgccagcgcgtgtga

SEQ ID NO: 505219 - DNA, 1350 bp, Stenotrophomonas maltophilia
atggccgcgtatcgctacgttgtactgcttgcgacactagtgctgatcggcgtcggcatgttctatagcggaggcgtgtccgctgccacctatcagtgcacctcgtatccatctgagtgcgatgaaggccaggctttcgctgaagcaaatgcctacgcgaactccgtttcgagtagcccctatgttccctgcgtgtggaaggggagcgggatgagctatgtcggggcattcggttctaccggttgcgccggatatcgtgacggcctgcagacgttctatttcagcaagggctgttcggaacgtggcggcaagacaacatcatttttccctccatctggctccgtaaggtgcatgaatggctgtgagtcggtcttccgtgataacggcgatgacaccacgacttacactccaaacggtaaggtctgcgacaagaagcctgattgcgatgctcagggcaagaacatggtgtggaacgggatgctcggcgtatgccaacccgttgagcctgagtgccctgagggcaaggtgaagactggtaatgcgtgtaccgatgacaaggcgtgccctgatggcatggcgttggtggcgggctcctgcaagaagaaggacgaagaatgcccgtccggcatgatccgcagtccttcaggtcagtgcattcctggcgatggttcgtgcgcaactggtgaggtgcgcgggcctgacggcacgtgtaagcgcgataaggacaacgatggcgatcctgatccgaccgggccagacgataaggattcattttcaggtggtgatacgtgttcgtcgcctccgtcgtgtagcggatcgccgatcatgtgcggccaggcgcgaattcagtggcgcattgattgcaacacgcggcgcaacaacaacatcagcggcggtcagtgttctcaggcaggcatgcctacctgcactggcgagaaatgcaacgcgatggagtacgccgggctgctgatgcagtggcgatcagcctgcgcgttggagaagctcgctgcggggaagacggagacgcccggaaacaacgccgatgccaatggcaatggcgtggcggatgtgctggaaggtagcggcgatcctgctccgattggcgatagtgcaaccgatgtccagggcgccaagaaatggggtatcggggtatcaaccggattgctcgatacgagcaacatgttcggcggtggatcgtgccccacgccgccaacgttcaagctgatgggccagacgatcagtggcactgacttcccttacttctgccaagcggcggcgattctgcgcgggctcattcagatatttgccgctttcgttgcattgaaaatcctgatgggttgggggttctga

SEQ ID NO: 505220 - DNA, 183 bp, Stenotrophomonas maltophilia
atgaacacggtgccgccgagctttgttgagttctttgatgtgatgcgcgatgacacgggcttactagccgccgccatcttcatgatcgttttgctcctgggcgcgctggtttcgatcttgattgagcatgtctggctcgcgcttcggcattggttgcagcggcggaagggcgatgagtcatga

SEQ ID NO: 505221 - DNA, 459 bp, Stenotrophomonas maltophilia
atggattgggtagagtttttcgagaaaacgcggcaggcagcaggcgttgagagctttgcaaagctcgctccgaagctcggtatttccgatggcgccatttctcactaccgcacaggaaagcgcgtgccccaggtgtgggtcgttgcagagtgcctgaagattcagggccatccgcagccggaaaaagcggcaattcagatcatgaaatcagaggcgcaaacgtcgccggagcggcacttctggaagcggctagcggccaccgccatggcgctgatgctggcagtaggcttcgccctaccgcatgaggtgcaggcaatgccgcaaccaggtaatgccttgcacgatatacattatgcgaaatgctgtatcggccttggcacgattcgtcggatcagcgtggcaatggctgagcctctggctcggctcttgcctgcgccctcaatccccggccaaggatga

SEQ ID NO: 505222 - DNA, 249 bp, Stenotrophomonas maltophilia
atgagcgcctctgtcgatgtgctggcagtgctggacgccctctgcgaacgggcggcatctggagatccggccgaacatcgcgagctcaattcgttgcgctatgccgtgtccgagctgagcacagcctcggagcgcgtccagaaccaagtcgatccgcttctccacagcaatggctacggctatgtgggggcaatggcaggccatcgacgggctcttgcccgggcaagggggctactgcatggccgttga

SEQ ID NO: 505223 - DNA, 225 bp, Stenotrophomonas maltophilia
atggtcgatccgttgattaccttcgtgctgctggcggccatcgcggtcgtctccatcggtgtcgctcgcatcgtttcgtggctgctggaccggcgtgaccgtgccgccgcccagcgcgccaagcaagctgccatcgtcgcccaggcacgcgccgaattggccgcatccggctggaccgctcaggacgaagcttgctaccagcgtgagaaggggcgtgcagcatga

SEQ ID NO: 505224 - DNA, 1830 bp, Stenotrophomonas maltophilia
gtggcaggaagaagatccgcccagctgcggcacgccgtagtagttgaggaaaaggtaggcaacacaaagaaatgggatgtccgcgagagcgctggtcgcctagaagtcgcgttcaggcgcgccggagacctgcgcgacaacatcgttaatctcagccggtggaagggcataggtgcagcggcaccgctcttcgccgaggcgttctgccgagctaacaagaacagcagggagacgactagatcctcttcagctaacaacatcgtgagtggcctggtgcagtacctaaccgtaaaaggggtaaagataagcggcccagacgacactccaatggatctcggcgagtcctttctaacgtatctgaaaggtagggataccacgcacccgacagttctctcggtggagacccagcgccactattacgggaccttcaagaaggtcgttcttgcgctgcacgagatggatccacggtggaaggtgatccgtattccgccaaagccgttcgcaggactgccacggaagagcaagccgaaagagctggaccgtgcggcttgggccaacgtcatgaaggcggcggtcgaagaatgcatatcgacaatggacgaagtgtggccgcttctagatagggttcacagtgccctcgctcagaagaaaaagggcgacgctgtatcgctaagcgatccggcagaggcaattgctcaaatattggcaaactttgacggtcatcttcctcgccaaggcgcggttcacaagctcccaggcgtaggaaagatcagcgaaagcgagtacttccgtctgaggagactagcgcacccgatcggcggcgatctgatcccattctttctcgtactagccatgcactcgggcttcaacgagcagccacttagaacactcaccctgaatggcatatcggagcactacccgcttggacaaaagcgaacggtgatcaagtcctccaagcgcagggctggaagttccgctcagggcgcgacacagcgagcagccttccccgctagcgatcacccgctagcgcctgaaagattgatcagtttcgttattgcttggaccaaacgaatcagagactacgctgctggtgagcttgccaatgacttcttcctccacgcagtttccgaaggcgggcggcacaagcgccgaggaatgcacatcgactcctactcagccagaaccgacgacgtgaccacgcgggtgaccggttacatcacgttgttctgcaaacgaagggggcttaagtactctggctctcaagcaaacaggcttgcgttctccgaagcggttgatgggctgaccgacggcgacgccttcgagctccgagcaatgctaggccatcggctactgtcaactggtcaagacagttaccagacaaccacgatgcagcatcggcaaaaggaacagctggcaggagccatgaccgcacaggagcgctgggtgacttcaaatggaaagatcgacacacgctccgcccgaagtgatcgtgagcaaacggcagccacgcagggcttctgctgtgcagatccattccaaagtcctcaaccagggcagcgccatggaaagctctgcaccagctatggttcctgtcctgcatgcccgctcgccgcagctgatccaaacgaagcctacgcgctcgcgcgctttcttcaactgcaggagctatacgaagaagccagggcagagctcggcagcgagatctggaggcgaaagttcgagaatgcctatctcgctctccgcgattcatggatcccagcagtgagcacaactgcgaatcgacaatcagcgatgatgatcatgctgacgcccctgcctggacttgaatag

SEQ ID NO: 505225 - DNA, 819 bp, Stenotrophomonas maltophilia
atgaagcaagcgattgcagccgtggccgtgtgcctggcgttggccagcgggacggccaccgcccaggacggcattttgggaaggattggcaaggggttgatgcaggcgggcaaggacgccgcctcggccccggcgaccaagcgttacctggagccggcaggcacttactgggacgacggcgaccctccagtgctcgacggctacacccggatccggtggggcttggcggccaccgcgtcggccggtttcggcatgtgcgaagacaacctctttgcccaggccaaggccggcgctgccctggcaccggcgatgcgaacccactgcattggctcatgggggcaccagttcaaacgcgtaggcctgcaaggcgatccggcctctgcgtttgaggccaaggcgcggcagatcgcctctaccgatgcgttctacctgcggccctacatcgacgtggagatcgaccccaagaccaacattctcctcgcctacgtgctggtcatgaaccacgactggtatccccgctcgcctgactttcttccgacggccgttatcggcccttcgccgttgggcaagggcagtgcggtggtcggggtcgagcatggcgggcgctaccacgccgcgctgcgattgaagccggaagacgcggccgagctgcgacgggtggggcgcgacgccgcgggagaccgaatctttttcaaggtcgtggagggcaggttgaagcccaacggcctgcccgacatcgttctccaaatcgaccggctggagatcggctacaagacccagaacatcggcatcaccccctccaaagacaaggacgcatga

SEQ ID NO: 505226 - DNA, 384 bp, Stenotrophomonas maltophilia
atgaagcacgcactgatcgtggccgcagcagcggcacttttgaccctgaccgcctgctctggtgacaagggcccctcaaaggaggacggggtgaaggtcgtggaaggctttttcaccgagcaggggaggcaggcaaccctccagcgctcttggcggtttgaagtcaccgacgcgggcggcttggatctcgactgcgagaagaagcccaatggggatcaagaatgcatggtgggcgggtcggtaaaagcgcaggggtccatcggtggccagcccaccaagcccgagccaagcaccctcaagccgaagctgcgtgcactgttccgcccgcagggcgagggctggcaagtggtcgaagtgaccgacgaagggacgtctgcgggctaa

SEQ ID NO: 505227 - DNA, 618 bp, Stenotrophomonas maltophilia
atgaaggttatccgaatcgtagtctcagcattggctctagtgcctattgcatgttttgccaaggggcctataggtattggaaagcttgaggttggagtgtcgcgcagcgccgttgagggcctttcgcccactgacggggtttaccttgccgctcctctggagccttacgaatacaaacattcaagtccagtgtcgggcgaggataagtttaatacgaagatcgtcagtcctttgagtgaccagcctcaagaggcggttcttacgttcgtcgcagggcagttgcaatcgataaatattgatctgggtgattccaatcggatcgtggatagcgtcaagtcgttgatcaccagcaagtatggtgagcccaaggtggacaactccatgaaagaagagcagtgcgtctacaagggcgggcagaacttcaaggtttcttcgggagcgattcgctacgagtggaagcaggatcgcccaaatgcagaagcggtcacagcttcgctgtcggatgtggtgatggacatgtgtccttccaacctgcgctatgcgattggtgcgatcaaggttaagagtttgacgattggtattgccaagcccgagaaaccagtggtgaatcccttctaa

SEQ ID NO: 505228 - DNA, 228 bp, Stenotrophomonas maltophilia
atgggtaagccgacctacccacaaaaagagagtgaagacatgaagattcatcccgtcgagcctgccagcactgacctggcgcatttccaactccacacggccgcgcggttcctggaccgcaccaatggcctcaatcagctggccgacaagcaccgcaggatccagcgcttggccacccgcgcccgccatgagcggcgttggaagaaggaagaggagcgcttcgcatga

SEQ ID NO: 505229 - DNA, 246 bp, Stenotrophomonas maltophilia
atgagcctcttgaacatggccctgctgtttgtcggtctcctgggcatcgcggtgttctaccaggacctggtcgccaaccccatcaccgctgggcgcgccctggtgcgcctctatcgcgtgtcagctcctgttcgacagggcagcaaggcccaggaggcatcccggcagtggtggagcatcgtgctggtgccgttctacgtgctggtggccctggtgctcatcggggttctgggaggtgggcaatga

SEQ ID NO: 505230 - DNA, 474 bp, Stenotrophomonas maltophilia
atgagtgccgggaccgaaagcctcatcagggccatccaaaccaacgacccgctggcgttttatgggtggctccacacactcaaagggacgcccgacctggacgctggcgtggccggcgaccctggcatcactgcgttggccgtcgcctccctcatgtattccaaggccgtccagtcggacccggtcttggcgacgcgctatgccgcgatgattgaggcgcttatggacgccggggccaatccgctggttcagatcggggagcggttcgtggtgcgacgggggcacactgggaagctggagcggcgacgggtggacgaaggccgaacgctggcggaggtctgcgggggcgttttttgcccggccatgcaggcatggtttggacgccaacgggcaggcgaatggtcccacaccgcgcttcatcggcctcaccccgcctacgcccacctccgtcgcaaccataaagccgtggcctga

SEQ ID NO: 505231 - DNA, 744 bp, Stenotrophomonas maltophilia
atgttgggttggttcttcttgccgtatcgcggcgccggggtttcattcacctctcgcttcatgcggtggcatggcgagacgttcttggggcgtcctgatgatctgggtttaaaaaatgtcccgcaggccgtcaaagacagttactacgatttggccgaggatcgtccggttgagttgcagcagcacaatctgaaagcgtggtcccttgggcagcagcacgcagaggaagcccggcaggtcagtaaggccgaaatcccgaaggcaacctttttggccgtgatggccgtcagctttggttgcgccctgattgcggcgccgttctccaactgggctgaatcgccggttgggatggtggcctttacccgtttgactaaagggagctacaagctgtatggcacctacgatgacgtggagcaactcaacacccgcttggggttggagcgattgaaggcgaccgttctggacgcggggctaaaagacgatccgcaacggccggttgtccagcgccttggggcagctgcacgccccaccactcaacgcccagccgctcagcgaacgcgcatccaaggcaagctcgacgcgctgctgaaggagcacgcggaacgcccaaaaccgcagaggagcgagggcgagcgcaaggcccgttggctgctggaagtgctggagccgttgcggcgggcgcgcaaggcgtctcccaagctgccggcgcagtccccgaaacacacgcagggcttctcgttgtga

SEQ ID NO: 505232 - DNA, 177 bp, Stenotrophomonas maltophilia
atgaaacgctttgctcttactctcaccatcgccgcgttgctggctccggggctttcgtttgcccaagacaccccccagcccgaacctcagaagaagaccgacaagctgcgcctgttcaaggcgggcgggattggctgcgctgcctgccgcggaagccagagcaaagcccatggctag

SEQ ID NO: 505233 - DNA, 447 bp, Stenotrophomonas maltophilia
gtgggtcgtccgtcgcttccaaccaaatctttcagcatcgctcccgatgagttggagagcgcgaggtattgcgcgaaagaacagggtatttcgctcaacaagtatttgcgcctggcggtcttggaaaagaaccggggcgtggtgcaggggctggagacccgcgacgccctggacgacatccgggccacggtgcgcgaatccgaaacccggaatgccatggccctagaaagcctgatagcggacctgcgagccgagcagggcgtggcgatccaggacaaccggaagctcgtcatcgaagccctgcgagggtttagccacttcatcgccgagcaacaggccgaccacgaagcccccgtagagccgccagctgccaagccgcatcgcggaccgtcccccaacccttcagaaaacagcgcggattggcggcgtcacgccaaccgctcttaa

SEQ ID NO: 505234 - DNA, 450 bp, Stenotrophomonas maltophilia
atgcctagacgttacatccgcctgttctggctgctggtcgcgctgacctggctggcgctgatcgccgcactggtcaatgccggcttcactccggactactggctgctgcaccacctggaaggcgccgaactgccctacccgaccagcaccgtcatcgtcttcgcgttgctgggcacggtcgaactggtggtagccgccttgatcgtgcggccgtggagactgaaacgcctgtggctgcgcctgctgatcgccttcgcccttctgctgctgtggtcggtgccgtggatgctgtcggcgatgcatcagccgccggtacaaggcatgcatctgctgtggctgctgctgttggacgtgggcctgctgctggcgctgtgcatggtgtcggcggtgagcgcgtggcgggcgttcaggcgtcgagggcgcgcggatgcgcccccgttgcagcactag

SEQ ID NO: 505235 - DNA, 432 bp, Stenotrophomonas maltophilia
atgcccttagaagatctatatcgactcagcaagttcgagctgtccctcatgctaatcagggagtcgagcaaagagaaaggcatccccagaccactccagaacgcaacatgggaacaagctatcctggatccgaacttcattccgcagatggagtggatagatttcaataagtttcggaaaagcgtcatcaaagttgtctccgatcaacttaagaaaactgcctcactaggcaaaaaggttagagagatcatttgcgatgacttcgaggcttgcaaaaaacttcaccttcgaacagctgccctggcattaagcctttcgcaggcactcaaagattatttcggcgaactggtcgcaaacatcatcaccgtcatcgtggtattccatttgtctttggactacttttgccgttgcgatctcatgaaggaatcctag

SEQ ID NO: 505236 - DNA, 330 bp, Stenotrophomonas maltophilia
atggatcccctcatcacaccagacggccgttacctcatcgtccgcgggcgcctctggcgcaccaccaacccaggcctcagtgagccggagagggcgcgcctggcccacgagctgatggacgcgcggcgtgccgtgaagtcagcgaaggccaacgggaacgaggaggcgctggccgccgcccggcacgccgtggacagcgcaaagaggggcctgggcgaacgaggcccggtgtggtggacggatgggacgccggactggaaccggcacctggtgaaggactccccctatgcggggtggttcggtagttgtatctcaaagagtgaaggctag

SEQ ID NO: 505237 - DNA, 420 bp, Stenotrophomonas maltophilia
atgaagattcacactcttgcgaccgacggaagccaagttatcgctatcacccaagctgcttccagcggcgggaagtatgggcatcctgttatgctttctgcgattcgttttgacttgacttcattcgatcaagtgatggaagagttgaataagaacggccatcgccacgaaaagagcttcgaagtgattgagcgctggagggtggacgccaggaatcagggacctcgctcccgcttcggcgaaaccttggctgctctgcgtgaagaggtcggtgacaatctgaagggcaacgtgctcttcgcgacagaggacgaagcagaagatgcggtggaatcgttcaagcccatgactcgcgctatcggcctcgatatcgctttgcctgccgcaaacgccgcagcccgccagccggtgcgcttttga

SEQ ID NO: 505238 - DNA, 231 bp, Stenotrophomonas maltophilia
atggaactcatcatcaatagccgtaaactcaaccgcaccatcactttctctcgccctggccgttcctacatctacgctgatttgaatggtcaaccaggcaccctcggtgagcagatctgcgatagcaatggctacacccattcctacgagggcgaagatcaagaagggtttgagaaggtctgccgccgctggtatcgcgcccacgtccgggatgagctcatcaatggctaa

SEQ ID NO: 505239 - DNA, 225 bp, Stenotrophomonas maltophilia
atgaaaacccctcgccgccaaaccctcgaaaaccgcgccgcccgtttgggactgcgactctccgaagctgggctccacgtcaaaatggaagccgccaacaactgcgaagccatgccgcggtgggagctttcggacgggaaataccaagacagtctttgcgggtatgccaccctggccgaggtttccgaggcgttggatcacaaggaaatcatggcagagctatga

SEQ ID NO: 505240 - DNA, 723 bp, Stenotrophomonas maltophilia
atgcacaaggacatttcaacatcaaaggtgttctatcgtcccatcgaggcggccatccgatgggctgggttgctgcggtatctcccgatgatcctggccacgatcgcgtcaccgcgtgtcctgcctcggtcgctgaactgccctcgatggaatgagtgccggctgcactcggaacgtatctatgacggcatcctcaacggagagctgccctacggcaagaacgggatcacgctcaatgatccgaacctgctcaattctctggatctgactgttcgccatgtcgatctaaaacgctggatgcgcacccactatcccgagcaccggccaggatttctgttcagccgtggcgaacgcatggcgcatcctttcatcaccatggaaacaggacaggcgatcctcgtggagcggctggcccttcaggccgcgcttgaacaagcccgacgtgagatgcgagaactgcaggagcagcacgacacgctactcaagcaatcctcggtgctgttggcatccaagcaatgcgagatcagcgaacgggcggaaacgacctatctcaacatcattggagggatgttgacgctgatgctgagccagtcgccttcaggcgtgccctattccagcttcaaaacgcaggaggcccttgtctctgcattggtcgcccactacggcggcaccatgggcatcatgaatcgcccagggttttctagacagtcgtcagccgtttag

SEQ ID NO: 505241 - DNA, 501 bp, Stenotrophomonas maltophilia; identical to SEQ ID NO: 323899

SEQ ID NO: 505242 - DNA, 1107 bp, Stenotrophomonas maltophilia
atgcctcacactccctccgcctacgaccacgatgtggtcatcgtcggcgccagtttcgccggtgccgcctgcgccttggccgccgcgcagtacggtctgcgcgtctgcgtgctggaacgcaaggtcgaccccggcgagcgcctgcacaccaccggtatcgtggtgaaagaagcgatggaggagacctggctggggcgcatgcccgaacatctggtggaccgggtcgcaaacgtgcgcctgtatgcgccgaaccttcgcagcgtgttgctggccgcaccgggctattacttcctcaccaccgatacgccgaacctgatgcgctggctggccagcgagctgcatgcgaacggcgtcgacctgcgcctgcagcagtccttcaccgacgctcgtcgctgtggtgacggctggcaggtggaaggggcagggcgctgcgcctatctggtcggcgccgacggcgcacgctcacgcgtggcccagcgcaccggccttggccaggtgcgcgacaccctctacggcgtcgagcgcgagttcgccggcctgcaggtggcgcaaggcaatgcgctgcattgctttgtcagcaagcgctttgcgccgggctacatcggctgggtcgcgcagaatccgaccgggctgcaggtgggattggcgctgcgtcatgacccgcaacaggtacggccgccggatatcgatggcttcctcgaccacgtgcgcaatgtggtcggcattccgccttcggcgcgtccctcggccacccgcgccggtctggtcccgtgcggccggccggatgggcccttcaccggccaacgcgtgatcctgaccggcgacgcggcaggcatcgtctcgccgctgtccgccggcggcatccactcctcgtggcggcacggctgggcggtcggcgaggcgatcgcccggcatctgcgcggccaggggccggacgccgagcgggtggcgcggcgggtggcgccggcattccatggcaagcgcctgctgcgctgggcgatggaccatctccaggccgactggccgctcaacgcactgctgcacacgggggccacgcggcgcatcgccgagcaggtctacttccaccgccgtggcctgcgcacgtaa

SEQ ID NO: 505243 - DNA, 4074 bp, Stenotrophomonas maltophilia
atggccttgatcggccttctcgtaagtgtccgtgaaaacgggggtgaacccgatgcgcacgaactgaagaagaggctgatgggatcaagtccctctgctgccggaaagatcgccttctggtttgatagcactcttctctcgccggattggctggaacggcaattcaagcggacgcgggctgagctgggtgagaggtacagtcccgagagccacatcgacctccccattcgacgctccatcgacgcagtttcgctggattctcgcctctttgaccagctttcggtgatggctggggagattcgtctcacgttagcgagtactgatcagagcaatggcgctgcagtcctcgcttgcgaggcggcgctcgctgcgttggatggagctcgatgtgatcgcaacgctaaggctgtcgaggagctgagggcgcggctggctagcgcaaggagtgcggtcgccatctggcatggcgagatgatgcatggccaggaagttgacgcagaaggttttgccaggccgacggccagtctgagggcgctatcgggtctggtttcggctattcgagttgcgagccgggagcttcagcaggatcattggaaccttgttggcgccagatcgctgctggtggtcggtgacgccggatcaggcaagtcacatctattggcagatgcctgcgatagtgcgctgaacaacgggcgtcctgctctgttgctgctcggtggcaagttagcagacgccgagccctggggagagatgctgaaggggcttgatctggcgggcagtttttcctccgcaacgttcctgggcgcgttgaacgctgccggcgaagctgctggtgcccgggcgctactgattgtcgacgcattgaatgagggaaacgggcagagaatctggccatctcgcctggccgcgctggcccacgacgtggctcgctttgaatgggtggcgcttgttatgtcctgcaggaccggctacctggacatggtggtgcctgcagagttggatgcgcgcgcgttgccaagagttgagcaccggggattttccgttcgccaggctcgcctgtacctgcagcgtcgcggcatccgtttggccgaagagccgagtgctgttcgagagctggagtcgcctcttttcatcaagatctgctgcgattcgctgaatctggatggacaggatgcactgaagagttcgctgggaggagtctcggcgatctttggcctctacactcgagccgttgtcaagaaagtgactctgaagatccgttcgaatcccgcaatgcgtcgggtcgagaaggccattgccgccttggtggatgagatggctgatgttggcaacgagctcattgatgctgatcgtgcctattgcctcgtttcgcctccgggcggagcgcctgtggatgtcgatcacgacgtgcttttccaactccagagtgaggggctcctggccacacagccattggatgggcatgagtactatcgattcacattccagcgtgtgggcgattaccagattgcggaaaggcttctatcgcgcagtgtgaaagggggtgatgtagaggccgccttctctgcgagcactcctctgagagctgcactcttcgatgagtcatcgatgatcgcgcaaggtgttcttgaggccttggccgtccagttgccggagaggtttggcgtagagctcctggatatcagtgagctgggtggagtgtggggacgcgagcccgcgtttcgagcaagcatcctggccagggacatggaggcgattcgcgaacgcacttgggagctcattgaggaggtgggcggaagcaacctgaggtttgaaacgatgatctcccttgcgtccgagcccggcttcagtcgcaacgccgaggcgctccatgctgaactgtctggcttggcaatgcccgagagagacgctggttggtccttgcaccttgcagatccggatgcaccctcagatggtgggcatgcggaacgactcatcgattggcttctgctggcaaaccaggatctggttcagcaagagcgggcagcgctggcggcgctgcagttgtgctggttcttcacgacctcaaatcgatcggttcgtgacacggcaaccaaagccctcgttgcggtccttgcggaccgcccgggcttggccttggagctgtggcggcgcttccaggatctggatgatccttacgtcaccgagcggattgcatgctcgatttatggtgcagcattgcaggggcaatgggcggaccaggatctttccgctgctgtcctttccttgcacagtacggtattcctgtccgcgaatttccttccgaacgcgctcactagagaccatgtgtcagggctcgtaggttacgcagatagcaggcggtgcttgcctgccgggctgacggcgggctcccctcttgctgctgttcgcagtgcgtgggctgatgagtatgtcagtgatgctcagatcgccacgtacacccgaacatataacaccgggcacgtccataccgacgagattgtcggatcggctgtgaatgatggtgacttcgcgcgataccagattgaccgtgcattggatgcgtggagtgcaacgccgctggatgaagcgacgtttcttaccgtgggagacgtgcagagtcggtgggaggtccagtttcgccaatcggcgtcaccggaggcccaaaaggcctatgacgagctacaggtggtgctgcagcaagcgcagcagggcgctcactgggagttccgggatcagatagcggcggcaagggctgtgttccttgcggctgcgggccagcgtgcttatgacatatggtgcgccgaagcgtctccttggtggcagcaagggacgttcggtggttctgtggcgaaacgggcagggcaggcggctggcttcaacctgcgctgggcccgaatgtgggtctgtaagcgtgctcacgatcttggctggagcgaacatcttcatggcgcctttgatctatcgaccagaagcgaccgccataaccacaaggtcgagcggataggaaagaagtaccaatggattgccctgtatgagctgtgcgccagggttgcggacaacttcaaggcaatgccgagccaggagttcgcagcgcagcgcagtcgtcttcgcaatattgatccgtcgttgttgatttcacagacaggcggtgatggtgggcaagccagtggggacgggtgtttctggattccccgtggacccgatctcgcccctgcatccctcgatgagtccgtcgaatggctggttgaagagcaggatgttgtagcgggattggagaacatcgaggtcacggacgatcgcgagaatcgaaggtggttggtactgagcggtttttctgactggaaaggagagagtgcagtcattcggcgcgatacctggcgccgcatctcgtgcatggtagttcgtgcccctgatcttgatagggcccttgcgctgctcggagggaaccacttccagggagagggcgattttcctgtggcccgaagtggagggctgcattcttacctaggggagcatccctgggtctgcaatctgggtgatggtgcgaacgctggcagtgaatggatcaatgactggaatccgcactactggactggtgagggtgagacgattggcgttcttcctacaaccgcctcctatttactggaaagcagcgagtatgacgcgtcgattacggagagcatcagtctcgatctacccgcaaagtggttgatggatgctcttgaattgaagctcatcgatggagcatccgttcagtacggcgacgcggccgatatcgttcggttcatggatccatctgtggcatggcctggccgaagcgcagcgctgatagatcggagtctgttcctggagtacctgcaggccaatcagttggtcgccatttgggctctttcgggggataagggagtctatggaacaggaggagcgcatggatttggcggcaggtggacgttcacccaaatcttctattccaaggccgacgagctgacaggcctggcccgctatgagacccatgagaagcccagttcggagcagttgcagaccctgcgcggccgcgaacagggcctactctga

SEQ ID NO: 505244 - DNA, 288 bp, Stenotrophomonas maltophilia
atgaacctctcaccgtctattggactcggcgcgcgggacttctcagccgatgcgtcgatgccgccagtagttaaggcccgcagggtcaagcacgacctcgcaggctacggctacatgcggtcgatcatgcttttcatgaagtgggcgcacgagcaggagaagttccctacagccgaagaggtgatcgcgcggtttagcgtgagccgggcgacggcttatcggctcacgagcgcgctcgccgatacctacggcatcgaccctgctgtacggcacaaggagcgccgatga

SEQ ID NO: 505245 - DNA, 387 bp, Stenotrophomonas maltophilia
atgaatcatcagtatcagcgtcgcgagccccgtcgtatgaagcaagccaatgaaggccaggttgcgagcttggacgacacactaggccttgaaggtgcagctcgcatgatgcgcttgggcctcgaagccatgaaggaactcgtggacaagggtgaagtgcctgccgtgcgcttgaatcagaagcacacggtcatgctgcgtgaggatctgatcgacttcctgcgttcggaagggcgcaggcaagctgctgagcgcaagaagtcggccatcgggacccggcttgcagccaacacgcccgaatcagttccgaccagacgtgcaagcaagtcccgtcgcacaaagatccccgacctccgcgcttacgagcaggccgatcaccaaagctga

SEQ ID NO: 505246 - DNA, 1116 bp, Stenotrophomonas maltophilia
atggcgaccaagcggcgccggggcgactcctggcagtacacgatcaagcgggcggggctgctgccccagccggtctacctgagctttgcctcggaggcggaaggcgacgagtatgtgcgtcgcctggaggcattgctcgaccgtggggtggtgccggaggagctggcaaacaccaaggcggcggcgaaggacctgcgcagccaggtgacggagtatcggagcgcgcagcacatatctgtcgatgacgagcagctgttgccggtcctgctctcgcggttgcctatcggcatcaccttgccgcagctgaccttcacttgggcgacagagtgggtcaccaccatgaagcgcgagcagaaccttgcgccttcaacgatccgacactacgtgggggcactctcgcgtgccttggattggctggctgcccatggcgcactgccaatgaatccactgcggctcctgcctcggggttattcgacgtacacagctgatgacaagatcgccgttaagcgcatagatggggaggcgaaagctgaccaggagcgcgatcgccgtctggaacctggtgaggaagaacgcatccgcgagatcctggccggcgccaagccaccggggcggcagcggccgctcgacctgccacagcgggaggcgttgatactgatgttcgacatggcgctggaaaccgccatgcgcatgcgggagatctacacgctagaacgcagccagctcgatgtgtcgcggcgcacgatcttcttggacaagacaaagaacgggagcaagcgtcaggtacccatgacttcggtactgctggcgaaacttgccgcgtatgagggtgattacgaaggccggctattcccattctgggcgggtgagcgtactccgctcgccctgcggcgtgtatcgagcaagctgtcgcgccagttcgagcgcatcttcgttgcggccggatgcgcggatctgggcttccacgatctacgtcacgaagcgacgagccggctgtacgaaaagaccacgctgacagacatcaagatcgcgagcatcaccgggcatcgcgatccgcgccagctgaagcgatacgccaacttgcgtgcttccgatttggccgatcagctttggtga

SEQ ID NO: 505247 - DNA, 399 bp, Stenotrophomonas maltophilia
atgaagcgtaatcatctgatcgtgctggctgctgcgctgattgtgctcgtgctgtcagcttcgtgggcatatgccgatggggtagggccggtcaccgcccttaccacgtgggcaaaggaacagatcacgtcgttgtgggcggacttctccgatttcatgacggatctgcagaccgacttcatcgagctggtgttgtcgttcgtcaaggccatcgtgtacctgattccagcgcctgatttcctatcgcaaattagcttctgcgcaatgctcaacgctgcggggccgtggaccgccttcatcgttgcccagttgcgcgtaggtgaggctatcgctgtgttgacggctgcacttgtattccgccttgtgcgggtgttcctcactctcttccagtggacgtaa

SEQ ID NO: 505248 - DNA, 1581 bp, Stenotrophomonas maltophilia
gtggccaccaccctgcgctatgcctacagcaagtcggggcgcctgactgcgttgacctaccccgacggcagcgtggccgactacgtgcgcgatacccaggggcgcatcagccagatcggcctgacccggcccggccaggcacgccagatcgtggtgaacaacgtgacctatgcggccttcggcccggcgacgggctggacctatggcaatggccgccagctgcagcgtccgctggacctggactatcgcccgcaggcggtgcatgacccggccgcaggcggcctgtcgctgggctatggctacgatcccgtcggttcgatcaccgagctgaagaacggcgcaggctcgtcggtgctggccaagtacgcctacgacgcgctgggtcgcctgacccagacccaggacgggacgacaggcacgccgattgaaacctatgcctacgacgccaccggcaatcgcaccgcgctgaccacctcggcaggcacggccagctacacctatcccgcaaccagccaccggctgaccgccgtggacggcgaagcgcgcgaccatgacgcggtgggcaacaccacccgcatcggcggcaagtcgttcatctacaacgatgccaaccgcatgaacgcggtgaagcaaggtgatgccgtgctggaaagctacggttacaaccaccgcggcgagcgcgtgctgcgtaccccggccggtggtgcagcgcagatcaccctgtacgacgaagcagggcagtggctgggcaactactcggccacaggccaggcggagcagcaggccatctggctggacaactacccggtggcgttgatcaacatgccggctaccggcgtgccggaacttgcctacgtgcagccggatcacctgggcacaccgcgcgtagtgatcgacccggcgcgcgatgtggcgatctgggagtggagcaacaagagcgaagtgttcggcaaccagattccgagtaccgacccggatggcgatggtgtggtgttcgagctggcgttgcgttttccgggccagcaggcgacggatgtgagtgggttgttctacaactaccagcgtgaatacgacccggctgtggggcggtattcgcagagtgatccgattgggttgatgggggggatctcgacctatgggtacgctagcgcttccccggcaaggcgggtcgaccctcacgggctcaccgacctaaactatattccaccccacgacaatcctgattcttatctgggcaataaaatgattccgtcgcccccgaatatgcttaccattagcattcaccacaacggaaataacttcatagggccggatggtagaagcatgtctgttgaatcgctggcgcagtcaattcgacgcgatgcagatctttcaaagtatctgtatatcaggctctattcctgtcgaacaggtaagtcggtaaatggtgggccgatcccagctcagcagctatctaaggcgctgaatatgacgattcaggcgcctaccgagtacacctgggcaaagaacgatcctttgtatccggatcaaggaaactatggaaaaacacctgaagggaatgaatcgcccagggttccgtag

SEQ ID NO: 505249 - DNA, 852 bp, Stenotrophomonas maltophilia; identical to SEQ ID NO: 498401

SEQ ID NO: 505250 - DNA, 708 bp, Stenotrophomonas maltophilia
atgtcggtccgtgaagaccgacttaccggggcaggggttgctctcacacttactcttcgggattgcccgcctacctctgacgattggcacaagctccgccgagcttgggaactccgtatgcgtcgctcaggcatggtccgtcttcactgggtcacggaatggcagcgccggggcgtaccccacctccattgcgcgctctggtttgaggaccggtacgacattgcctctgcggtagaccactgggtggcagtggcaggcgcctacggcgcgggccaccgtggtcagcatggccgcatcatcgatggtgctgtgggttggtttcagtacctcagcaaacatgctgcccgtggtgtttctcactaccagcggtcaatcgataacgtccctgaggcatggcagaccaagacaggtcgcgtatggggcaaatgcggcgaatggcctgtccaggagaagctgaagatccatctccaagaccaattcggtgacggcggctggttcgcctaccgtcggctcgttcgctcttggcgaagggctgacgcccggtcatcaggggatgcgtaccgcatccggtcagcgcggaggatgctgcaactctccgatccagtccgcgcccgcctgatcgggttcatggagtggatcccttacgaaatccaaagcgcccttttggccaacctggctatgcgtggctatcagatccacagcatctga

SEQ ID NO: 505251 - DNA, 927 bp, Stenotrophomonas maltophilia
atgagccaggacgcgatcgcgcgtgaagccgcacgctggtggctggacgggcacgacggtgaccgcgacgagaacgcgttcgaccagtggtgccaggccgattcgcgccatgttgcgcagtaccagcatctgcagcagctgtggcaggccggtgccaccttgcccagtcttcaacggcaacagcaacggcggcagcggcggcgcctgggcgaggccggcattgcggtactgctgctgtgcgcgctcggcctgtacagccgcaccgcctcgccacccgctgcgcaggtactgcgcactgctgcaggcgagatccgtgatgaagccctgccagacggttcgcacgtcctgctgtcaccgggcagcgaagtgcatgtgcgcgtcgatgcacagcgccgccagttgcagctgcagcaggggcaagcctggttcaaggtcgccgccgatgccgaccggccattccaggtacacactccacagggcacggtcactgcgctgggaaccgcgtttgatctggccgtgcagggcgacaacagcgtggtcacggtcaccgagcacagcgtccgtgtagaaagcggtaccgccagcgtgcaggccagtgaggggcagcagatacgcttcaacggacaagcgactgctgcagcacatccggcagacgacagcaccctggcctggcgcgaacggcgcctgcattgggtttcggcgccgcttgccgacgtcacccaggggctggaccgttggcacggcgggcacacgtgggtcgtcggcgagcagctgcgccagcagccggtcaccctgcttggcagtgccgacggtgcagccagcaaccgcgaccagttggccactcagttgcaggtgcgcgtgctgcgcctcggcgacggcatacaggtgtggctgccgccacgcagggaacagcgtgatggaccctga

SEQ ID NO: 505252 - DNA, 1215 bp, Stenotrophomonas maltophilia
gtgggcttccagctggaagcgagctgcatcggcgatcagcatccgattcatcgcctgcgcttgaatggggccgaagttgaactgatcgaggtgggcttcatgcacgcccgcggctgtgggtgggcacgaaggctggcgcaggagcgctatcgcgacgagcgctacaacctgcagatcgactcgcaccaccgtttcttggacgcatgggaccggttgctagtggagatgctcgaatccctgcgtacacgctcatgcaaaccgctgctgaccggatacccgcccgcgtttcagcccgagagctatcctgatacccggcagaaccatgtcggccagatgctggtccgcggcttcaacagcgtaggcgtggtcagctacaaagcagtgcgcatgccccaggaacccgcacgcagcgaaccgatgcgagctcgattcatcagtggcggattcctgttctccgacggggagttcgtgcgggaagtcatgaacgatgcagaccatttcttctcgacggaagagatcgtcatggcggtcagggcttatacacatggttatgacttcttccacccccaccgaccgctgctgtggcaccagtacaactcggatgcgaacagggtgtgggatgatcactccgatgagcgccggtcacgcggggaaatcgaagccagtgccttcgatcgctcgctgcgggcgtcgggcaaggcggtgaacatgcttgcagcagccggatcaggagatgcgaccgcactcgccatgcacgggctcggctgcaagcgctccctgcaacagtacgagcgctacgccgggttgagctttgctcaccggggcgtgcacgaagacgcgacgcgtgcaaccgagcctgacaacgctcatttcacgacggatgagcagcactggctggagaagctgatctgtcgacgtgcctttcaggtacaggtcaaacgattgggcaccgcaactgccgctgccgatgatctcgcgtcgctggtcctgaccgcgcaggccgaggacggcaccaccgtctgccgacgcgagctgtcaccggacgatctccagcaactggtcacacgcggtgaatatgtctgcatcgaccatttcaacagctgcccgtcgcgcctgcctgcctgctaccagatgcaggttggcggcaactcccaggatgatgccaaccggttccaggtgatcgtaagggaaatcgaggaagacctgatggcctga

SEQ ID NO: 505253 - DNA, 219 bp, Stenotrophomonas maltophilia
atgaaggcaagcctcatcgtaagtccgatcctgttgggtggactcgccatggccagtggaacggcatcggcgggagattcggtaaccgtcaatggcgcgcgctatacctgcacgtcaaggtgcgtcgtgcagaccagtggcaacggtggctacaccataacggattgttgtggcgggcgcgtaacccgcgtgatccgcacgcctccgcccgaggaataa

SEQ ID NO: 505254 - DNA, 438 bp, Stenotrophomonas maltophilia
atgcccgatggggattcgccttatctggctgcagaaagtgcaatgatgcaggacggtgcgctgtccgtggagcaaagcgatgccatcctcgcatcggacaaggttttcgaaaaaacagtccgggcgtttgccgatgatgccgggaagcgtcctgaagcgcaggacctgaccgcccactacaggcaggcgattgcacgcagcctcggcaaggacgaatccctgggtgaatttgcgtgtggatacagcctgtgcatcggttcggtgcgtacccgatcggctgaagagtacgaagcctggagcgaaaaatttggattggacgctgctgcgcccacctacagtttctcgggcctgagcaagaagctcgaccagcggaactatgaaggaaggttcgtgttttccaccgatcctgctgccccttcgatgatcgtcaaccaatag

SEQ ID NO: 505255 - DNA, 1188 bp, Stenotrophomonas maltophilia
atgcagcgctggacacttctgttttcattgacgctctgctccgccatgacggcgcccgccgtgtgggctgcacccgtgtgggtcactgcctggacggccgcgcccgcgcccgaccgcaaggacggaacgtccgaggcacccgtacagttcgccgcacagaccgtgcgccaggacatgcgtatcggcagccgtggcgatgcgctgcggctgcgcatcagcaacgagctcggcacgacgcccttgcgggtcgaggacttgcgtgtgggagtgaaggacggcaaggccgcaccgctgccggtaacggtggatggccgcgcggtcatcgaggtgccggtcggagccgcgctgctgagcgacccggtgcggatgccggtggcggcgctgcaggagatcagcgtgagtgcctatttcccgcagcccacccgccccgcggtgcgccgcaccgagctgcgggtcgcagatggcaagcagacagccgtcgccgacagcgtgcggctgagctaccagcagaacgtgttctcggcagtgatggtgcagcgtgatgatcgtccccaggtaatcgtggcgctgggcgattccatcacggaaggcgccaccgcacgccgcggcaccttcaaccagtggccggagcgattggcgcagcgcctgcagcaggcctgcccgaaccggttcgtggtactcaaccagggcatcagcggcaacaagctgcttgaccatggccgcagccacagtgcgctgtcacgattggatcgcgatgtgatcgcggtggccgacgccgatcaggtgatcctgttcgaaggcatcaatgacatccgccacggcggtggcgcgcagccgctgcctggacgcaatgcggcggacatgctgctgggctatcaacaggttgcggcgcggctgcatgcgcacggcatccgcgcctggctgggtacgttgaccccgttcggcggttccgagcgctacgagcccgtgtccgccgccacccgcaccacgatcaaccagtgggcacgcggcggcaacagcggcttcgatggcatcatcgatttcgatgccgcgctgcgtgacccgaaggcagccgaatcgttgcccaacgagatcacccgcgaccatctgcatcccaacgacgaaggctaccggcgcatggccgatgccatcgatctgcgcatgctgggctgcaccacccccgagtga

SEQ ID NO: 505256 - DNA, 186 bp, Stenotrophomonas maltophilia; identical to SEQ ID NO: 503280

SEQ ID NO: 505257 - DNA, 3774 bp, Stenotrophomonas maltophilia
atgaagcaatcccactccgataccactcgatcatgcgctaccgccggcgccccagtcggcatcgcttctcagaacgagcatgtaacggatggcgcgccaagcagcgatggaatgcccaggctaacgccactgacgccagagttctcaaagtcggatcacacgccatacgtcgacgcgctcacggatgccctggccaccccccagatccgcaacatcgccctatcagggacgtatggcgttggcaaaagtagcattcttaaagagctggtgcgtcgcaatgaggggaaagtgcttgagctctctctctcaacgttagctccgttcgagtctgttgcaaatcagggggcgctacccccacaggcgataacgccgaccaatcggattcagcaggagatcgtcaagcagctcctctaccgtgaagagccaagaaacactccgggatcccgcttccagcggatcgagcgttttaactggtcccgagagctgctgatcgcattgatctttgcactgatcgcggttgtagcattcctactaaccggctgggcggatcaggtcgccaaggttcttcctttcgggacggcaatgggcaatggcatctacttggtgctggccccggtcttcatggggacggcgctgaccctgaggaagcttttccatggccggttacggatcaaggagctctctgcgggggcggcgacggtcacgttggatgatcggtcggtatcgtacttcgaccagtaccttgatgaaattgtctacttctttgaggtatccaagcggaacattgttgtgttcgaggacattgatcgattcaacgatgcgcacatctttgaaaccctgaggtcgcttaacaccctcctgaacgtttcgccacagatcgaaagcgagatcaagtttatctatgcgatcaaggacagcatcttcgatcagcttggcctacagcagcaggggcggcgccttgagagcgatctgctggcagctgatgacaccgcacttgccgagacagttcgagccaaccggactaagttctttgacctggtgattccggttgtccccttcatcacccatcagaatgcgcgagatctcacgacgcgtttgctgaaggagatcgagcacggcattgaaccgaagttgattgaccttgccagcaggcacgtgcccgaaatgcgtctgctaaagaatgtgcgcaacgaatttctggtcttccggcatcagatcttgaggccggctagccgcctgaagctgtcggagagtgagctatttgctctgatgctgtacaagagcacgcacctaagcgatttcgaagccattcgtcttggcgagagcaagcttgaccttctctacaatcatggtcgcaagatcgtggccttcaacattgatcgcctggaaaaggagctagcagccactcaccgacgggagtcattggcaaacgggctgcagacgcgaagcgaagaactcggcgaggcattgctcggcattggtcagatgctgatgcgcgctgcttcccatcacgtcaccgaggggccattcgagctctcgggagtatcgtactcaatcgcggcgtacaagggtgttgacttctggcgaagttttcaggacgcctctatagagagtgtcatcacgtttagcgtccaaaccgatcactacaaccgcgttcagcagatactgtcgctgaagaagagtgacattatgcgattgctcggtgatcgctggaagccagagcagtggagtcaactggacgctgatgctgaggtcgcgcggcgtgctcagatccattcggatctagccgaactgcgcgcggcggatatggcccagctccttggtcgagaggactggtttgccccgcattcgggccaatcgatgtcattggatgccttggcacagaacgtgttgaagacgggattggcctatcaccttgttcgtgccgggtacattaatcgaaacttcaacctctacacttccgtcttccctggcgatcgtgttggcgccgcagcgatgaacttcctcattcatcatgtgcagcgaaacacgatggatgaacacttccatctcgagcccgatgaggcagatgaggttattggcgagtgcgccgagggggactttgcagagccgggcctgtacaacgtcagcatcttggagcgcctactgaacgatggagaacgcagcccggggcacccagacctcctctctcgccagatggcttcgctgaagaagatgggggccgagcagcggcgctacctccaggcgatcttggctggaagttccgagaaggatgccgttatcaggcttctagctcccatctatgatgggattttgatctacctctgcagtgaggttgaggtcgaggaaagcgctcgtttgcagcttatcggtattgcattagagagcatgagcggcagattcagctactcagttgatgctgcgtttatcgactactttagggcgaactatgcagcgatcccttcgcttgctggcgaggagctggatgatcgctccgcaaggagaataggctccattttcctgcgctgcgggctcagtgcatctcatctaggcagcctggcgccagcgctacggagtgacctgcttactcggggcctctatgagatcacgcgtaagaacatggtctccatcatggatggtgggtctgttgcgctggacgccattcgttcaatgagcgatattgcctacgatcacatgatcgggcatctgtctcagtacctcgattcaatctcgccttcggacttcagcgtcgatgtaggctccaactatctgcagatcctgtccgaagtggcagagtcagaagacgcggacctggagacaatcggagtactcatctcgcgagcctcccctgactgcatcattgacgatctcggtgatgtggactcgcaactttggccgctactggcgcagagcatgagattcaagatctcgctgctcaacctgattgcatacttggacgagttcaagagtatcgacgggtccttggccaccaccctgctgaagacttcatcaattgctggggttaaggaggtggaacttgagggcaggcagagagttgccaaggtgatactggccgcgaatgacgtccttactgcggagcggcgcgtggaactggcgaccatgctgggcctggagggaccactgccggtaagcgagctcgtggttgagagtggtgagctctttgggcttgccctgaaggcgaagctgatcgaagacacaagggaggcctacctcgccttggagggtatggactgggcaacccgagcacactacatccaacgttcacgaggctttggggagttcatgtcgcccaaggtcatcggaagcgatctggctgattttctgcaaagcgctcaggttcgcaaaaagctgaagagcacggttgtagcgcagatcgaggcctatgcaccctctgcaaacgatgcgggaattcagcaactgctgaagggggctatcgaggctggcttgaacattcctctgaatgccatcgaacgatatgcgcgcgtaccgaaagtctctccggcggtagttttcgaacttctggggccgcacctggccacgattgagcttgagaggctgctaccaattctccatagcctgcaaggtgtctacagtgagcttgcagcgagcggcgccggtaggccactacttcccgacgatccgtttgttcgaccggtccttgacgtcctgaaggacatgggggtcctcagtcagttctacgacgataacaagaagaagaggaagggcattcgagcgatcaagaggtacgcgtag

SEQ ID NO: 505258 - DNA, 363 bp, Stenotrophomonas maltophilia
atggacgaaaattttctgcgcgaggagtttgaagactggcacgaggagtacgtctcgatttatagagaaatgctagagacggtggccgacaaccagctttatgtttcgaacgaggctgaggccagctttcaccgcctgcgcgtcgcgatcgcaccccatctgaaccaggcggatcgggccgaggcattagcgctgggatacggtgcagatgacggtgaggcgaatagagctcgggcagacgacgagcagcgtgcactccgagaaacagtcgacctaatggacaaatttattgatcaagttcgacgagatgtcgcgaagatccgctcgcgcattgagatggattcaccggcacccatgctttag

SEQ ID NO: 505259 - DNA, 735 bp, Stenotrophomonas maltophilia
atgaaagagccaatcacaagtgccgaactaccaaacctggcgatggcctcgttgccccgacccgaccaccgccttcttgctgccgcggaccaagaccaggggccgcccaggatcctgctcctttacggctcgctgaggccgcagtcgttcagccgaaagctggccctggaagccgagcggcttctgcgccacatgggttgcgagacccgtgtgttcgatgcccatgggctgcctatgctggacagcgtggacaagagcaaccccgaagttcagcggctgcgggaatggtcacagtggtccgagggacaggtctgggtttcgccagagcgacatggaaccgtcactggcgtgttcaagaatcaaatcgactggttgccgttggaagatggcagcatgcgccccacgcagggccggacgctggcggtgatgcaggtgagcggtggctcccaatcgttcaatacggtcaacaccctgcgcgtgctcggccgctggatgcgcatggtgacgattcccaaccagtcgtcggtggcgaaggcttggcaggagttcgatgacaatgggcgaatgaaaccatccccatactacgaccgcgtagtggacgtgatggaggagctggtgaagttcacactgctaacgcgagggcggtcggactacctggtggatcgctacagcgaacgaaagggtgacgatgttgcgattgcgttggctcgggcggctggggctacagccacttga

SEQ ID NO: 505260 - DNA, 231 bp, Stenotrophomonas maltophilia
atggctggcgacatcgctacggccctgcaggtgccgccggcaacgttgagcttccatctgaaagagttagtacaggccggcctggtcgagagcgagagcctaggccggaacgtctgctatcgcgcgaacttcgctgccatgactagcttgatcgagtacctcacgcacaactgttgcgcaggctcgtcgagcgagctgtgtgtgcagactgttcccgattgcaagtgctga

SEQ ID NO: 505261 - DNA, 504 bp, Stenotrophomonas maltophilia
atgacacgtaacgtcctgtttctctgtactggcaatagcgcgcgaagcgtccttgccgaggccacgctacgcgcgtggggcggcgaagatttcaacgcattcagtgccggcagtcagcctgcgggctccgtcaatcagtttgcccttgcacagttgcaggccgaagggatgcccattgctggactgcgcagcaagtcatgggatgagttcgtggatgccgcgccaatggacctggtaatcaccgtatgcgattccgcagccgcagagtcctgcccactgatgtttggggacttcatccgcagccactggggcttgccggatccggctgcggtagcaggcagcgatggtgagaaggctgaagcgttcgcacgggcgcactccattgtgaaggttcgcctacgagctctactcgcgttgcccgaaacgctatggaaggatcgcttggcgctccagagcgcgctggaccagatcggccacttgcagccgatcggcgccttcctgtga

SEQ ID NO: 505262 - DNA, 1032 bp, Stenotrophomonas maltophilia
atgggcctgttcgagcgccacctgacgctttgggtggggctgtgcatcgcggccggcaccctgctcgggcatttcctgcccggcacctttgcggtgcttgcatctgccgaggtggccaaggtcaacctgccggtcgcggtgctgatctggttgatgatcatcccgatgttgctgaaggtggactttggcgcaatgcgccagctgcggcagcattggaaaggtatcggggtaacgttgttcatcaactgggccgtcaaacccttttcgatggcagtgctggggtggattttccttcgccatgccttcgcggactggctaccaccggggcagaccgacagttatgtcgctggcctgatcctgctggcggccgcgccttgcaccgcgatggtgttcgtgtggagcaacctgtgccgtggcgatgcgaattttacgctgagccaagtcgcgctgaacgacgcgatcatggtagttgcctatgctcccgtggttgccttgctgcttgggatctccgcgatcactgtcccatgggacacgctgctgctgtccgttggtctgtacatcgtcgcaccggtggtggtggctgtgctgctacggcattggatgctctcgcgcggcggagacactaacctgctagttaccctccgcaagctcggcccggtttcactgtgttccctgctgcttactctggtattgctgttcggcttccaaggacagcagatcgtcaagcagcccgtggtgatcgcactcatcgccgtccccatcttgatccaggtctacttcaactcaggcctggcctatctcctgaaccgtcgcctaggtgtagcccactgcattgccggaccatctgcactgattggagcaagcaacttctttgagctggctgtggcaacagccgtggggctgtttggggtgcattcgggtgccgcactggctacggtagtaggtgtactgatcgaggtgccggtaatgctgtcggtggttcgaatcgtgaatcggactcaagactggtatgagacacggagcgggagctga

SEQ ID NO: 505263 - DNA, 1824 bp, Stenotrophomonas maltophilia
atgacgagtaccccgaatcctagcaagccacaaaagccatcccgagagaatcactacgttcccgagtggtaccagcgcgggttccgcgtagctgacgccgataactggcttctagacattgcccccccgcacctgcggcccgatggaaccgcgattctggcgagaccgcgacagcgcccccccaaggcctgcttctggcaaaacgacctatacatcacgcgctttggggagcacctcaacgaccagatcgaaacagtgttgttccaggggatcgacgacactggcgcgaaggcagttcgagcatttataggcggcgacgccgcgcaggtccacgaccagtaccagccgatgctggcatacctaggagcgcagaagttgcgcacaccaaagggcttggagtggatccgcagccgatacccggcgctgtcccagatcgagctaatgcgggagatgcagcaccttcgccaaatgttcggcaccctttgggccgagtgcgtgcatgaggttgtatcggcggaggactctgaagtgaagttcttggtcacggatcatccagtcacgaccttcaatgccggtcttccgctcgacgcatcgttgctcaacctgtcgaacgaagcgccggtcacgtggaacgggacgcagacactgtttgcgctggatgccaatcatcttctaatcctgacacacgttccttacgccaaagatccagacagcgtggagctgaccgcgaagcgcgtcaatgcccgtcacttcgggcacacgatgctacgcaccgatgcgctgataaggggtcgacgcttcgacaccgatgctgtcatcgcggtgaatgcttggctcaaggcacgtgcacataagtacattgcggcaggagagcgagactggctatacccggagcagtccgcccagatggacatggcaaccctcacccggctgctactcccgccgaagcaggagctgtggcgccacggcggcgagatctacatcggctacaaggatggcagtttcggctatcgcgactcctatggccgcacgtcacgagaccacgagtttgtcgcaaaagcgccacctgccgctgtactggctcccacggaccggtgcccgtgtggcgcagaagccatgtttggcgaatgctgcgcaagagttcatccttgggagcgcccaccgtgggatgtgttgagtctgcgcgaacgaaatctcagttttcttcgggccattggcggtgtgctgaagctgacggaagatgagtcatggcataacgtccaacgtacgctctccgacgatcaagtctcgacgctacatcgcatctcccgcagtctctggccagagggtacggacctggcttcactgctgtcacgacctagcggcggcggcccaagggcgatctatatgggtccatctgacccccgaaccgctggcgagagcatagtaagcctggtgccaatgtttgatcaggtgctggtaatggatcccgttctcgcctcccggaacctgcggtctgaatacagcccgatcaattcgcctgcgcagcacaagcaacaattcctcaagaacatcatgttctggttgatgctccagccattgatcctcgccggtaaggtactggtgttccccgacccaggcgaccttaaccctgagttccagtacgccatgcgggcgatggcagcggagcgcaccgctaagtggcgcttggacccgcagcaactcgaagaatttagctggatgctgcgcgatgaccttgagcgctcgctactgcagctacctgatcgcgccctgctgcccttgattaggccgctgcgccgaatcgcgaagaggatcattacctag

SEQ ID NO: 505264 - DNA, 609 bp, Stenotrophomonas maltophilia
atgcggcgcaagggggaggacgatccgctggcactgctccaaatcgtggaagacccgaaagcgctctcacagactttcatggttcgctgcgtgaatttggaggttgcgctgttcatggcgcagatcagcaatgctgttatcgtgacggatgtaggtgcgctatgggaacaccttcatctccatactcgtgcagcgcagtcgacacctcccgcgtccacagacagcgcaatcgaactcaacgctccgatcaatccatttgaggcgctggcggtagaagcaaccgaggctgctgcaaaagtccgcgtatcgctcggcaacctacttgccgctaccaacatcgccgcccccagcgcggctgcaaccgagttggtcgaagccctccgcacgagttgcggagcactcgggagaagcgtgcgcatcacatgcaagggagtacaggcagcgatgcatataacaccatctatgccgcttaacggatttgaatcgccgacgacacaaaggctactggtctcttttggacatgagcgggccccagtcacggtagggctggcgctgtttcggcacaccgaaggctatgagcgtgccactcgtgccgatgctccggactaa

SEQ ID NO: 505265 - DNA, 1344 bp, Stenotrophomonas maltophilia
atgcctcgtagcaagagagctgcgcatttggctctgccgagatggacagtgctcccaccaatgaagcccttggcggtggggacatcgggaaccgaatcactcactagctattgcttgcgcctatcaaagttgtgtgggattccatggacgcgcttcatctccatgatcgactctgagattagctctcaggctgttaaatacactgattgcgctcggctctctggccctggtccagtttcgattagaagagcccgtgcgcttgagcgcttgactggtcagcaactcgttggcaccacgctgtatggcattggagagatcatttccgggcgatctgaggcgattcacagagtcgcggcgtggtgtccaatctgcctgcgccaggccgccgaagaagggcttccgaacttctcgcgactgatctggcggttcacttcctactctcactgttcagtccacggtgctcgaattgagcgctcctgcccacattgtgacttcgcaagtatcagaagaagcggctcattcctttgcccaaagtgcaatggatcgctggaagtccaggcccgctatgaccgtccgagtcgcgcggagagctggacaaatcactgcattgaggagcttattgagtggacctcgaatcaccctaggcagccacttaggaaggccagtctcatcagatttctgactgccgttgattcagtgaacgaggcgaaagcgctctcgtacattccgccgaagaaggcgcgtgacgactttgtgcggtacgttcgttggagagatgcgagcgtcccaactcttggccttcggcctgacacgagccgggtggatcttggggatcttctgagggcatcagcaaagcagtgtgtgtcggtgctagacatgcttctaagaccggaggagtccgcgtcggcactgcttccaggcgtccagtacaacttcgaacttcccgcgcttcacggcaaagcagctaatgactgcgccaggcttgcacgaatcgtcgaagcgctgactgacgacgtcgactgtgtgctgcctgcaatgcaagttatcttatgctgcgcccgaatcaggaaggcctacaagagccgtatgccgggtcactactccaggtatgcagtgcagctccgtattcagcgctcgctcttcctggcgatctcacccggtcggatcaacttagccttccgtgctgcggtgaagatgattgagggcggcattgaggaatccgatctagtgaagcgcgttgctagacagttccgcatcccaatggagacctctgcggcactggctcgatctgcctccactgtattgggcgctgatagtcgtagcagtgatcagggcagcctctag

SEQ ID NO: 505266 - DNA, 627 bp, Stenotrophomonas maltophilia
atgctggaagctcttttcctggcgaccgtcaaggcgacgccggcgaccgctgcagcggcgagtgctggcgaggactggaagtggctggtgccggtggccacattgattctgggcttcgtccttaagtggcttcaggataacgtcaccgagaaggggcgaaggcggcacgagaaggatctgcgtcgggagcagcgctatgacttgctgcggatgcggcgcctggaagccgaacgcgcgaacatgctggcattgcagcccatggtcacgaatcttctgcgaaagtgctcacaatgtcatcttgagcgggttcgagcggtctcctcactcgcttccataggatgggaaaatgctcgcttgccgcccgaactagacgaagaacttcgcaaggcgttggcggaccttgttccgcttagggcgcgactgcactcgaccgatgtgacgagtctgattgacgatgtcgtttcggatgtggtcaagacccaatcgccaagaattgggcaagaggatgcagacgccctttggttcggtctgtcggacaagcacgatcaacttcaagctttgatcggcgaccgtatcaaatcgttggaagacgagaatcagcagcttggcgatccgcctgggcagtga

SEQ ID NO: 505267 - DNA, 819 bp, Stenotrophomonas maltophilia
atgcaccagctacgagcagggccgcgtcggtgccgagctctgggtggcgaggcacgaggcgaggctgcgggacgacgtggcgaagatcgtcggatggcgggaagcgatccgaggcaatcggctggccaagggccgcttgaagcctccgtttccggggatggaaggcgagtagcacagatcagcggtccaaccgcggtagcctgcccgggcccccatcgctctgctaaagttcctgaacgaatgggagagaatatgtcaggtcgctggcagggaattgcgtttgcgatagctgctgtggtcgttgcttttgggaccgcgtgggcagcgtactggattgggttcgcgggacatcttccgagcgatgctctgttgcgtgcggatcgccatgtggccggccttttgaaggccgccgcgctctttacaccgctgatcgtcctctatttgacctggaggaattggctgacagcgcggcataagatcaaggttgatctgtttgatcgacggtgggcgctttggcgcgaagtcgagcgaatttactctgaaactattgagggccgggatttcactaggccgttgcagctgagtgccattcacgcgtcctggcaggcgcagtacctctttagtgacgctgcgggaaagtatctgcgcgacagttttttcgcagatctgagtgcgtggtctgaggagatgaatcgtccgctcaagccagatcaggaggcagactggacgaaacgggtcgacgagttgtctgaccgtttaggtaaccacccgtttcggttccatgaagtcgtcggagagcagctaacaattcgggagtag

SEQ ID NO: 505268 - DNA, 294 bp, Stenotrophomonas maltophilia
atggaagaattgccgaagcggaagaagaaccccagccacaaagacggcttcccttggaaaagcctcatcgccgtggtggtgatcgtcagcattgtcctggctgtagccgaaatggcgcggattgaccgcgagtatcggttgcaagcgaatcgccaagcgcttgaggctctagaaggcgtgacccaagatccggcgtttcaggtaagacaggcgctggaacgggctcaggccagcgacgcggccttgagagagcaggttaaggaagagtcgcgagcgtcgaccgaagagcattga

SEQ ID NO: 505269 - DNA, 465 bp, Stenotrophomonas maltophilia
atgtatcggttaacagagaatcccgacatcctgcattgcatcgaaaccggtaccgacatcccacgcggtcactggatgtggccgacagagtggctggagtcgaacacgccgctacctatcccgccgccgtatgaactgcattcgcccgagcattaccgtgcgatccgtgcagcagcctggagctggatgaccgccgaggtaaatgctcggcagtacgacagcatcgaaacttgcgtcggctactacaacagcggtgtggagcggtaccggttggaagctcgagcgatggttgcttggcgtgacgcggtgaatcagcggcttgagcagcttgtacttgcaccgcctgccggcatcgagacctgggagcaggtgcgtccgctcctgccgcagcctgaagcgttcccatggccggcgagtgtggagctcccactggaggctggtggcggccccactgctcaactttga

SEQ ID NO: 505270 - DNA, 1017 bp, Stenotrophomonas maltophilia
gtgagtgtgcggaccccgatcatctacaacccggcaactggccgcctggaagaactgggggcggccgataccattgccggcacggagatcgaggggctgatggggcgtaaccgcttcatcaacggggacatgcgcatctggcagcgtggcgtcagttttagcgcgagcggcggggtaggcaagctattttgcacggatcgttggtttgtagagcgcaatataagcaccatggcgtgcgcgaaacaggatacgtccgccagcgaccgggccgtcgttggccctttgccaagctatatgcgcgtcacagtgtcgggaagctccggcggcagccattacgcgctgctgggccaggatgtggaagacgtattcacgttctccgggcagaccctggtggtatccggttggttccgcgcgcagtccacgatgaacatcaatctggaggcgctgcagatcaccaacggtggtggcggaaatcctgcattcaaatcagcttcgcagcaggtaaccactacgtggcagtacctgtcgtttgtgctgcaggtcgatgcgctcaccgcaaatatcggtgccggttcacgcctacgcctgcgtttctggctgtctggcggaaccgattgggccagctcgaccaacgtcggctcgcaaaacgggtggtttgacttcaccgcgctgcaagctgagcagggcgtagtcgcttcaccgttcgagcgccgcttcgacgccgtcgaaatgcttatgtgccagcggtacttcgagatactacgcattggaggaacctgtggtgctatcagtgcacagaaccaggtgctcggctttcacatcaactggaaggtgcctaagcgaggaaccccgtcagtagcgctggtagcaggtagtgaatccgtgaccgcatttccaccggggctcgctgcattgaatgataccgacaccattggaaccattgctttcaagatggccactggccccagtagcaatgctggttggtaccagaccatagcggtcgacgcggagttttga

SEQ ID NO: 505271 - DNA, 342 bp, Stenotrophomonas maltophilia
atggagaaggatccctggctcgatctcggcaatcggatggtgatcgccgcagcgctggctgcgattgcgaattttctgctcgccgcggaagtcgctcccgtgggagtgctggtcaacaacgcggtggccctgtcggcagctgcatttggcgtgtggatcgcctttgtcggggtttttcatgtgctcccggaaaggagccccaaaaccctcagaggttggttcggcatcgtgttcagcgctttgatgtgcttcgcaatcctctggttcatgttcggcgccgtagctggtgcttattgcaagcaatcgcccacaaacgcgccgtggctttgttcacgtagatga

SEQ ID NO: 505272 - DNA, 573 bp, Stenotrophomonas maltophilia
atggttgagacggtgctcgggatgaccgatcttcaaatcaagctggttactgcagctggccagctcgcactggcaggcatggtcgcctacgtcgcctggcagcaatggcggacagcacgcaacaagttgaaagcggacctttttgatcgacgtctagccttgatgaaggccctgcaggccctaggcgagaagacctatctcgagaacctcacggatgcggaactgaccgcgctgccggctttggccaaggagtttggctatttgtttggcaaatcagtcagcaagaaagccggactactgagtgatgccctccgcgcacgtcaccagatcaaggctgccatcgtcgagaagagggagttactcaggactcagtgggacgcgactgccttcatggcaacgcttccgaagacccgcatcagcaatgaagctcagcttctggagcaacgcattacggctacagaagaggaaatcagaggtcgcgaagaggagctgattggtgtgactgccgccctatctcattatctagttgatttgcagatggccgcctcggaagccctcactttgaagcactag

SEQ ID NO: 505273 - DNA, 339 bp, Stenotrophomonas maltophilia
atgagcggctggagatccagcggccgcactgccggcacccgagtcgatctcagcacggtgtccaccaccgatctgctgcgggagatcgaacgcaggtgttcggttgggggacctcccaaggtcgatcggccggggaaggagcggccgttcgcgacaaaggcgctctgggccgaggacaaggtcaaccaggcacgtgcccgcctcgcggagctccgcgcgctgccagaaccagcctgcgagactgagcgcgcggctcgttctgctcaggacactcaactggtcgccgacgtcgtcaagtacgacggcatggccaaggtattcgcgaggaaggggcaatga

SEQ ID NO: 505274 - DNA, 381 bp, Stenotrophomonas maltophilia
atggaccaggaagttgcgcagcggctcgcgacattggaaggcgcgctcgtcgagcagaaccggcagatcgtcgagcagcagaaacaaatcgtggatatggccaacgcactgaacagcttgacggaagccaacaacagctctttcgaaggcctactgacgaaggagttcaaggacatgggtaccgacgtcgtgcaacagaccatcatcaatggcctccttgcacgatctgacgaagccacaaagcgagacgtccaagcggctctgcaagtcgcgtatgaagcgttcggggaaaagatccccgatccgcactttctccgccagtttgaagctgctgcggacgcagtgttccctggcattcggctagtgcctgccgctgactga

SEQ ID NO: 505275 - DNA, 249 bp, Stenotrophomonas maltophilia
atgaccaccgtgaacatgaccgtcgacgcacagatcgacctcgatgacctggtcgccaatctaagcgccgccagcaaggactacctcgccggcatgctgaaggtcaaaggcgaggctgcgcgcgcgcctgacggacgcacattcgaacagatcatcgaagccgccttctacgaagcccgcgccatgtccccggtgccgtcggcactgaccgacctgttctgggtagtgcacgggagggcgatgtcatga

SEQ ID NO: 505276 - DNA, 792 bp, Stenotrophomonas maltophilia
atggctagcatcttgcgtctaagccacaggccggtttgcctccatcccagccccgttcacgacccgcaaatcgtcacgaaggcttcgagcgtagcgaattattgcggaaactcgcacgcggccttcattgtcgttctgcaggcgaagcatcggatcgcgcgcgagccgcagtatcttcagggtgcccagagcacgagccaaccgactgcccacttcctcgtcaacaacgtggagtcgacccaagagggcctctgtctgaggcatggcgagcgggccaagtccatcaagaacttgtcgccgcgccgtattgttcatcccgagaaattgggcctccaccgcattggcctgctgaagccatgcttcgatgctggaatacgtgtccagaacctccgcatagaggtatgcaaggataatgtgcgcctctcgcgacctttcggcctgggcaatttcatgggaggccgtggcgatgcggtgggatgcactcgctacggaattggcttgcttgccaagccaaaaaacagcggcagcggaaagagcagtgaccaaagccgaaagccaggctatgtaaatcgtgacaagggcggccacaatcgcccatgcatcccaatcgatggtgcattcctcgcccatgggccagcactgattgaagccaagccaccaatccatagtcagatccccctaggcgattactggaattctgccacgacctcggcccactggaagcaggaactcatccgtgttggcgaacagcagctgatggaagccgcagacaggccaggagactgtctatga

SEQ ID NO: 505277 - DNA, 891 bp, Stenotrophomonas maltophilia
atggccatcaacgctgacttccggatgttcccacctgttcctaacgtccaagcgatgtgggcgcccctgtacatcgagccgatgcacggaagcggagagcgaattgtgattgccactgctgccgtggatggtagtggcgctttccacgttcaagccacgttgtcgggtcgagttctgcagtgcatgtacggcgacagggcagaagtgctggacggacttattggcttggccgttgatgtcctccaggcttacctggccaccggtggagcgctggacagctgggcgccgcccttccgatcctgtcacttgggggcttgccgcaccgcaatgggagctgacctcgagcagatcgcccgcagcggcgcgatcttgacttcgagcttggcagcgaagttggccgacagcagcgtcgagcagacttcggagtcggttggaactgggctagatattgataggtgggttcagcagattcgcgatcgggtttgcggccagagtccgcacctggatgcacgcttcaacggcgaggtcgtagtccggaaaggggccgccccaacgagaatcggatacctgggggaacgaatcgccgccaatttcgacatgctgattcctggttcaaatctctctaccaggcgcataaggtcaaaatctcgcttggtggatctgcagattctgaaagaccagttggatgtccttgcgccaaggaccacctatgaacttttgctttggatcccggagaaggactcgccgggcttctcgcaaaggcagctcgatgcagcccatggtgctctgtcggagcttgaggcattcgccgatgaacattcgctcatggtgcgttcctacagccgagccgatgaggcggcgcagcgaattctgaaagcggaattggcctaa

SEQ ID NO: 505278 - DNA, 753 bp, Stenotrophomonas maltophilia
atgctgcagtttggcaccttggtgaattcgctgggcctggctggcaccggcattaatgatgccgttagggcggttgtccggacatcgtcgggcgatgtcgaagcctatgtgaagaggttggctagctcccgggaggtcttagtggaggtcgcctgcgcggtcatcgctcgccaattggacctcccggtaccccagccactgcttgtgtacgtgccagagcatatgggtgggccgtacgtggcctacggcagcgtggccgcggggaatggggatctctctgccttcatagaagctgggcagcttcaggcgattcttgatcaattgcgtgcgtggcctggtttaatcaaggctgcatgctttgacgagtggatcgcaaactgcgatcgacacgagcgcaacatcctctataacggtatcggcgagttctggctgatcgaccacggcttggccgtaaacgccacgctccctgtagatgaattggcgccgcagaacatcctttttgaagtggcggtacgtgacagagcggagaacgagctgctccgaattcggcccgttgctttaggcgtgatggaggcgtttcaggaaaagccgacctcgcagagcgatctcggcctgcctgcgggactatggcctgacgaagaggccgattcggtactcgcgtggcttgcgtccaggcaggcgcatctaatgcgactggctagcgagagaattccggcaatgcagagcgagatgttcgatggccatcaacgctga

SEQ ID NO: 505279 - DNA, 819 bp, Stenotrophomonas maltophilia
ttgcgctttaaccagattctgattgtcgactccatccccgccggagagcgaaacacagctcgcgagctgcatcaggacgtgggactgcgtgctcaggtgttcgagcctgcgccggaagtcctgtatcgacgcgtcgagagccgtagggaattcttggtgttgctgcccgagctggctgcggcggcatcgactacaggcgacattcccgtgctccatatcgagtgccacgggaacgatgacggcctggcatttgcggacggatcattcgccacctgggccgacctgaaaggaccacttacatccctcaacattgcgacggaaatgaacctgctcgtggtcgtttctgcatgcggcggcagcgcacttacgtacacgctcggactggtcgatcgcgcgccacttcacggcctcatcgggccgacccgcgtggtcacgtcggaggagttgatgcgtgcgtatctcgcgttctacgagacactcttgcgtacgcgatcagcgcgccaggcggtggacgcgatgcgtcttgccgtgcctgatacgttcgtctatcgcaccgcgcaattgctgttccagcatgtatgggaccactatcaggcaacacatgaaacgcctgaggcgcgtctggagcgtggcagaagaatggcggtaaatcctccagacgattacgtcggaccacccgtccaaccggaggtgttcgctcagctgttggcggaaaagaatcgggaattcttcgacagctaccgtcgcaagttctttctatgcgatctatttccggagcacgagacacgtttcaccgtccgatacgaagcccctgagtga

SEQ ID NO: 505280 - DNA, 789 bp, Stenotrophomonas maltophilia
atggaccgttgctttgttatacagccgttcgacggcggaacgttcgacaaccgctttgaagacgtctttcagccagccctcgaaaaggctggactagaggcgtatcgcgttgatcgcgacccgacggtcacaattcccatccaagacattgaggcaggcattcgcgatgcgaggatatgtcttgcagacatatccttggacaaccccaacgtatggtttgagttggggtatgcgcttgcatccaacaaggaagttgtcttgctgtgctcagacgcgcgcaccacgaagttcccatttgatgttcaacatcgttcgataatcaaatacagcaccgggtcgccgcgcgacttcgaggcgcttaagaagaagatcatcgaccgcgtgaccgccattctctctaaagaacgtggaatgcaaaccatatcctcagcggtcgaaatcccaaaggtagagggactggaacaccatgagatcaccacccttgcggccatcgcggggacggtcgagtcccttgaagagaaggcggctatccatctcatccgcaaggacatggagagggcgggattcaacaatatcgcgaccatgctagcgctagggaagcttaagagcattggtcttgttgacgaagtatttgaaacggaccagaacggttacgaatatgcccgctacggtttgaacagcagcgggtgggactggatcagacacaaccaatcgcacttcacgcttaagcggccacagcgccagatgacgacgcctgtggatgacttccaagacgacatcccgttctag

SEQ ID NO: 505281 - DNA, 825 bp, Stenotrophomonas maltophilia
atgacattgatttgggatatcgatagggctggtttggtaagatttggcgatgctatcagatacttggaaagtatgggtgacagactttttcatgaagatctggattctaccgccgaggttcttcgggggctcttcgatgatcgtgatttcattagcagttttcttcaggaggtgttgatttgtaatcccgacgggaatgactactcgtcgcaagtatttgtcatgcatcgctcaaagtactttacgctcagggtggttctctgggaggcgcctcaaggtctgccgggtgaggagattttcctctatgagctccctcatgaccatgacttctccttctttaccctcggctattacgggccgggttatgaaactgtagtgaaacactacgatcacttcaacgttgttggattgcccggcgaaggcgttagcaccgatggtaacgagcgatggctgctgaaggagcagagggttgttttctacgaaggagggaaagacatccactgtcaaatgcctcccagttctttatccatcagtttcaatgtccttcaggacattaacgcatttggaatcaggagaaggcagtacgaatttgatcgtgacttctcccggattcgaagggtaataaacgtgaatccagtatcgttgttggtacgcgctgcctgtgcgctgggtggcgagggtgtgaagtatgtcgaggaggttgcttcgaccggtggcgagtatgagcgggcagtggctttcaaagcgcttgtcgcgatggattcgaagtatcggctatcggccctgaaggatgagagcatctatgttcgtgcaatggtcctttaa

SEQ ID NO: 505282 - DNA, 1047 bp, Stenotrophomonas maltophilia
atgccggattcctcctcgacggtacgcttctggctgctcaatgcgctggtgtgggcgctctatggcgttgccggaatcggcctgcgccaggcctatttcagcgatgccggaagcgcaggcgtgttgatcacgctgggcctggcgttggccctgttcgggtgcagcggtgccatccgcgcgctggcgctgcgtgccgactggtgggcgcgcggcacggccgggctgttgctgcggctggcgctgtcggtggcattgggcgcggcagtggcgcagctgctggtgaacatcgcgctgcactcggcgctggcctggaactgggtgagcctggggcggcagacggccgacttcagccccaaggcgctgctgctttactggtacaccactgcggtgatgctggccctgtgggcagcgctctgggcaggcctgcacagcctgcgccggatacgcagtgcggaactggcccgcctgcgcgccgaggccgagcgcagcgcgctggagcgcgatgcgctgcgtgcacggctcaacccgcatttcatgttcaatgcgctgaacaacctgcgcgcgctgatcctggaagacccggagcgtgcccgcgacatggtcacccgcctgtcgcgcacgctgcgccaggcgctggcacacagccgcagcgagcaggtcaccctggccgaggaactggtggtcgtggacgactacctggccatcgaggcagtccacttcgaacagcgcctgcaggtaagccagcacattgatgccgatgccatgcaggcacagttgccggcgatggcgctgcagctgctggtggaaaacgcgatcaagcatggcatcgccagccgcccgggcggcggtgaggtgcagatccgtgccacgctggacaatgatgtgctgcgtctgcaggtcgacaatccgctgggcagcgccaacgagcctgcccatggccatggcgtcggccttgcctacctgcgtgcgcaactcggcacgcaggggagtttcatgctgcagccggtcggcgaccgcatgcaggccctgctggagattccgcaatga

SEQ ID NO: 505283 - DNA, 1278 bp, Stenotrophomonas maltophilia
atggttcccgatcgatccgccccggccctgtttggctttggctgcgctgcaggcctggtgctgggggcgctggcctgcgtgcagatgccgatgttgctgccgctgtggctgagtgtgccgatggcgatcgccggcgccggcggctggctgttgccctggcgcggccgtgcctgggccgcggccctgctcggcctggcctgggctacggtgcacgggcactgggtcctgcatggccagctgccacccggcgcgccaccgcaggatgtgcaggtgcggggccgggttgctgaccttccccagcaggggcccggctacacgcgtttcgtgctgcatgtcgaagatgccggcgcgctgccatcgctgcgtggcaagcgcctgcaggtcacctggaacgacccgtggcgcggatcgccagcgcacgaggcggagggcgggcgccatgcggttcgcgcaggatcgcattggcagttgtcgttgcgcgtgcgcgcgccacgctcgcggatcaatcccggcggcttcgatggcgagcgccacgccgtgctgcggggcatctccggcaatgcctcggtgcgtgatccggcccgtgcgcgggagtggctgccggcgcagggcctgcaggcctggcgggaacgcagcagtgcagcgatcgccgtgcaggtggcacatcctgccgcgcggttcgtgcaggcgctggcactgggcgatacccgtggcctgtccgatgccgactgggaacacctgcgcgcgctgggcctgacccatctggtcgccatctccggtttccacgtgggcgtggtggctggcttcggtgtactgctgtgccgcttgtggtggtggctgtgcccgttgctgggacggtactggccacggccgcaggccgccgcatggggagcggcgctggccgcagccacctatgccgtggcggcgggtggtgcgctgccgacggtgcgcgcggcgctgatgatcgggctggtcgcactggccagggccgggcgtcgcccggtgggcgcagggcaggggctggcgttggccgcgatggtgatgctgttgcctgcgccgctgtcggtgctctcggctggattctggctgagcttcggtggcgtgctgtggctgctctggtgcctgccgaggacggggccggagggaatcggtggcgggctgcgcgggttccttgccgcgcagggtgttgccagccttgggctgctgccgctgtgcatcgccttgttcggcgggaccgcgcggctggggccgctggtcaacctgccggtcatcccgtga

SEQ ID NO: 505284 - DNA, 1344 bp, Stenotrophomonas maltophilia
atggcacgcccgatccgttccatcaccctgggcctggcctggcgcctgttccttgcgcaggcgttcaccgtgctgttcgcggtggtcgcgctgatcctgacctggggtgacaaggactcctggggcatggacatgttcacggccgaggcggtggccaaagccgtgcacagcgaaggcggccggctggaactggaccaggcgcgctgggacaagctcaatgccggggccggcggcaacctctggttcgcggcggttgatgacaggggcacgtggctggagcgcggcacgattcctgcggtccacgcgccattgctggcacgcttgccgacagtgggcgccaccgaactgggttcactggtgccaccctatctggacgtggcgcgggtgatgatccgcaacgaggatggacgccgcatcacggtgatggtcggtggtgctccaaagggtgggttgctggatggcgcgctgatggtgctgcgcctgatcggcctgtggttcttcctgccgttgatcgtggtcacgctgctggtgatgccgacggtgatccatcgcgcgatgcgcggcgtgcgccgctccgcgcagcaggccaaggaactggacatcggccagccgggcgcgcgcctggatgcgcagctggtgtccaccgaggtcgcaccactggtggaagcgttcaacgatgcgatcgacaaggtgcagcagggctatgcagcgcgcgacaagttcctcgccgatgccgcgcatgagctgcgcgtaccgatcgcggtggtgcaggcgcgcctgtcgcagctgccgcagggtgaactgaaatcgcagttgctgaccgacgtcgcccgcctcggcaacgtggctgagcacctgctcgacctgcagcgtctcgatcgcaatgtcggcgcgctgcagcggctggacctggcgttgctggtgcgcgaggcggccgccgatctggcgccgctggtggtcggcgccggttatggcttcgaggtggatgcgccggagtcgcccgtgtggatccatggcgacagcctggcgctggggcgggtgatcgccaacctggtgcacaacgccatcgtccatggcggcgggcgcggcacgatctgcgtgcgcctcgatgcacgcggcctgctggaggtcagcgaccagggcgccggcattccggtcggcgaccgcgaagcgatcttcgagcccttccaccgcctgcgtgcagccggcagcggcagtggcctgggcctgcacctggtgaaggaaatcgtgcagcaccacggtggctcggtcagcgttggcgaagcggctggcggcggcgccagcttcagagtcaatttccaccgcggtaccgtacggcgctga

SEQ ID NO: 505285 - DNA, 1410 bp, Stenotrophomonas maltophilia
atgaagcgcctgcgccatttcctgtcctcgatggtcgggcggttgttcgtcatcctgctgttgggcatgagcgtggctgcgatcggcgcgaccatgctggccacctccaaacgccagcaggagttcgagcggcagaacctgaaccgcatcgccgaccgcctgcagggctacgtcaacctgctcgatggcaatcccgaactgcgcgagcgactgcttgagatcggtgggcccagcgtgcgtgcgctgcagcccggcgcgcgcctggggcgggcggataccgcactgatggaagtcctggatgaccggcccggcccggtgtcgcgcgcgcatgtgcacttcacctcgttccgttcctgcattcccaagctgcaggatctgctgccgccaccgccgccggggcaccgacggcatccgcgtgagcgcgatccggccttcattccgcccaagtgccgcgcggtcgatgtgacgctcaacgacggtacgctgctgaagctggcgctggattcgccagcagtggcccacaacggcattctggccgtggacccgtggttcctgaccctgctggtgctggccatcgcggtgctggcctacatcgtcgcgcgcatggccagtgcgccgctgcaggagctggcggcagccgcggaggatctcggcgacgatctgcagcgcgatccactgccgttgcgcgggccgcgcgaggtgcagcgcgccgccgaggccttcaatgccatgcagcaccgcctgcagcggcacctggccgaacgcacgcagatgctggcggcgatcacccatgacctgcagaccccgttgacccgcctgcgcctgcgcctggagaacgtcagcgacgaggtgctgcgcgagcgcctgatcggcgatctggcggcgatgcaggcactggtgcgcgaaggcctggagctggcccggagcgccgagagcgccgagcagcgcgccgcgctggatctggattcgctgctggaaagcatcgtggaagacgccgcagagggtggcgccgacgtggtcttcgagggcggcaccggtgcggtgctgatgttgcgcccgctggccatgcaccggctgttctccaacctggtggataacgccgtgatgtatgcccaccgcgtgcgcgtgcgggtggaacgcagcggcggcacgatcacggcgatggtgtccgacgatggcccgggcctggcggaagaccagctggaggccgtgttcgacccgttcgtgcgggtggaaacctcgcgttcgcgcgaaaccggcggcgccgggctgggcctgaccatcgcgcgcgccctggccgagaaggatggcgcgcggctgtggctgcgcaaccgtgccgagggcggtctggaggcggtggtgcagtggccggccagtgcgcaggtggtgccgcctggccggcccggctga

SEQ ID NO: 505286 - DNA, 744 bp, Stenotrophomonas maltophilia
atgcgcagcccggcctgcgcgcagcgttgtggttgccggtggcgtgaagcggccaacctaacggtgggtagtgccggccgctggccggcaaccacgtggtcaccggaaacgccctgcggaagccggccagcggccggctctaccgagcgccaatccggccggtcgccgtacacccggcaggtgtcgacattggccaacctaacgatggggagtgccggccgctggccggcaaccacgtggtcaccggaaacgccctgcggaagccggccagcggccggctctaccaagcgccaatccggccggtcgccgtacacccggcaggtgtcgacattggccaacctaacgatggggagtgccggccgctggccggcaaccacgtggtcaccggaaacgccctgcggaagccggccagcggccggctctaccgagcgccaatccggccggtcgccgtacacccggcaggtgtcgacattggccaacctaacggtgggtagtgccggccgctggccggcaaccacgtggtcaccggaaacgccctgcggaagccggccagcggccggctctaccgagcgccaatccggccggtcgccgtacacccggcaggtgtcgacattggccaacctaacgatggggagtgccggccgctggccggcaaccacgtggtcaccggaaacgccctgcggaagccggccagcggccggctctaccaagcaccaatccgaccggtcgccgtacgcccggtag

SEQ ID NO: 505287 - DNA, 207 bp, Stenotrophomonas maltophilia
atggggcgtggttgccccatgggggcgcgcgaccgacccggctcggcgatgcagcgcatgggcagcatcgaggtaaccggcctaacacgtgacctacccggcactgacaacggaacgctggccctggccgactacggtgcgatcctgggcgggagtgcgctgcggtgcttctccacgggcatcgagtatcacgggcatcgagtatga

SEQ ID NO: 505288 - DNA, 2331 bp, Stenotrophomonas maltophilia
atgaacagcagcgaactcacgcccattgacgccgaccgcgtgcaggtcggcgactgtgtcattaccttgtcctcgcgtgaggtcgaggttgaaggcgcgcgccgtccgcggcggctgacgccgaaagcgctgggcgtacttcgcgtgttgatgcggcagcctgggcgcgtggtcacccgtgaagagctgtttgccgaggtctggcccgatacgttgccgaccaatgacgtgctgacccaggccgtcacccagctgcgcaaggcgttcgccaacgacgacgacaatggccaggcctacatcgagaccatcgccaagagcggctatcggctgctggtaccggtgcaggcgctggacgacttcgagccggcggcggaagtggacgcgctggccgttgcggatgtgatgccgtcgccggacggtgccggcacgattccggcgctggccgtgccggcagcgccttcacgccggcgcggctggcgccagctgcgccgccagctgttgtgggtgctgggtgtgatgatgctggccgcgctgctggtcatggccacattgttgctgcggcgcgggccggatccgagttcaccggtggatgcagcggtcgagaacggcgtgcgggtgatcggcagcccgcagcgtccctatcgcctgatcaccgccaccagtggttttgaaacctatcccacactttcgccggacggctcccaggttgcctacgaaggcgccaacgaggatggcgccggaggtggtgtgatcaaggtgcagacctcgggcaatgcgccggcccggcagctggcgctgccgcccaagggggccagtgaccgtttcccgagctggtcaccggacgggcgcgagatcgcttttgcccgctttggagccgacggcggttgccaggtgctgatcgccagcgccactggcggcggcgtgcgccaggcgacccgttgcgatggaaccgagctgctcagcttcgactggacaccggatggccgcggcctggtctttggcagcatggtgggccgctatgcccatcgcggcatccgtgtgctcgacctggccagcggccagtggcgggcgttggactacgcggtcgatcaggatgattttgactacgcgccacgctactcgcccgacggcaagtggctggtgttcgtgcgcaatccacagatgggcgacctgtggcggatgccggccggaggcggtgagctggagcagttgaccaacgaatccgccgaacagcgtggctgggcctggctgggcgatgggcgcagcatcgtgttcggccggcgcgtggacagcgaggtgcggttgtactacctggacgtggagcgccgcaccttgcgtgatgccggcctcgacgacgcacaatggcctgcggtgtcgcgccacggcgacgtgctggccttcgttcaccgccgtgcccagttcggtgtgttcaaggtgccgatggccggcggcagcgccgagcggctgttcgcgtccagtgggcgcgacgggcagccgatggcggcgcccgacggtcgccagctggtcttcacctccgatcgttccggcagtttcgcgctgtggtgggcggacatgcagcggcccgactcactgcggccgatcgagggcctgcgtccggaggggcggcaggcgccggactggtcggccgacagccgccagctgctggtggtcgggcgtgacgagcatgggcgtaccgttgtctacgagatcgccccgcgcgacgagcacctgcaaccgctgccggttccggtggatcagccgctgcaggccctgtacggggcaaccccggagcagctgctggtagtcgagcgcgatgcagagcaacgcacccggttgagcctgttcgatcgcagcgtgaccccctggcgccgcctggccagtatcgacggcgtctcccaggcgcgtttcgatcggggcgatggccgcgtgctgttcacacgcctggcatccggcggcttgtggtcggtggatgcggcactgtccccggccagcgtgcagcaggtcagtgaagaccggcccagccgatggcgctatcgcacctggacggtggcgggcaccggtggcatcggctatctcggcaactcgaccgaatgcggtacgaccttgatccatatccaggccggcaccgaagcccccgagcgctgcctggaccggcagcggctcagcgcgggcaacggcatcagtgccagcgccgatggccgggatctgtacgtcgccctggcggtcagcgatggtgccgacatcggcgtcatgcagctgccccggtcgacgccggcactgttcccggcctttctcaagtcattgatcctgaagaaaaatatctcttcgtga

SEQ ID NO: 505289 - DNA, 846 bp, Stenotrophomonas maltophilia
atggatgatcggctttggtacgagcacatccggcgttcgatcattgaccccacactgggcttgcctgggtttccgtcggcctatcagcaggaggtcttcgttggaaaatcgaatgaagccgcacttgccgaggcgtttcatttctaccaactggtgaaggctagaagctatcggttgcggcgcaattcaccagtgctggactttggtgtcggctggggtcgtatcctgcgattttttctcaatgacgtcgatccgtcccacttgtacggcgtcgatgtcgatcccgagatcctcgaggttgcgcgctcaaccggcgtactgggcaacctttcccagatccagcccaacggccgactgcagcagccggatgggcgattcgaggtcatctacgcgttctcagtgttctcgcatctctccgaaacctcggcacgtttctggttggctgagctgatgcgggtattgaaaccgggtggcagtctcgtgctgactaccactacggaccgcttcctggaattgtgtgaggcctgttcctacaagctcaacgaccgcaatcagtacgaggaagactacgccagaatgtttgctgacccggccgatgcccgtcgtcgttacgccgctggtgagcatgtgtacgctgccgtagctggcaatgctgaggtgttggaagcatccaactacggctgggcagcaatgccaccagcgttcgtcgaacgggagattggcaggctggcacagtcgatctcattcatcgaagcgaccgagcagcttccccaaggcgtgttcaccatccgcaagcccgcatcgtttgcacagagggccgtgcgtagattgcggtcgctcgcttag

SEQ ID NO: 505290 - DNA, 1290 bp, Stenotrophomonas maltophilia
atgtccattccccatagcccatctgcgccccagtctgcgtatccggcacgtgaacaggccactttctttctcgtcattcttttggtggtcgcattcaagtgcaacgatgcgttgaactacccccagttctgggctgaagatgccggcgtgttcttcagcggccagttcggtcactcttggccacagctgttctcgccttatgcaggctacttgcatacgataccccggctggtcgcttgggtggcgtcgtggctccctgccggaaaagcaccgctgatctataacggcatggcggttctcctgactgccttggccatctcctttacatgcaaacgcctgcgcaatcacttgccagcatggatcgtggccctatcgttccttgccgtgcccaccagcggcgaaatatttggcacgataaccaatgcgcagtggtttctgcagttcacaatggccgcctactgcttggctccaatgcagcagcagccgttgccacacaggctctggctaaaggccttggccatgtttctgatctcgatcaccggcccgttctcgatcctcttgctgatcgttatgatcgggatttccggtgccagctggctgtcgcagtgtctgcgcaaggatccgttcggtggcgcactatccggcttcatcgccaaccgtgatcactacgctgtctggccgacaatgatcggagcgggcatacaggcatgcgtcctgatcacgaatccgcctgaccagcatgaagtggcgcagcccttacttgcagcattcaaggctacattcactgaaatcgtgcccattcacgtatttggcagtgatttcctaacggggacttcgtggtacctggtctacgcagcgatccttgcggcactgctgtacgcgaggcaggtcgatggacatgctcgcctgctcgtactgggctttctggccgttgcagcgatcgaatgcttcgcccccatggtgcgggtcccggatctcagtccgatgtattcactcggcgccgcggatcgctatttctaccttatgaaggttgtgtggtggtgggccgtatggttggcgttgtgcaatggacgcaagcggagccgtttcaatgcaactgtggcaacgactgcgctgatctgtttgatctcggtgacgaacgcgggttatctgcgtcgtagcacattcgttgatttcaactggcgagatcactcatcggctctggaccaaccagggcaacataccatccccgttaatcctcctggctggaaggtcagcgttgagaacccagcggagcaatccgcacaatga

SEQ ID NO: 505291 - DNA, 426 bp, Stenotrophomonas maltophilia
atgccgaccctgtctcgacagttcatcctgttcctggttgcaggtggcctcgcggctgccgtcaacttcggctcacgcattgtcatcagccagtggttgcactacgtccctgccattgtgatcgcctactgcctgggcatgatcaccgcattcaccctgaacaagctgttcgtattcggccaggctagcaaccggctgcaccatcaggtgctctggttcatcctgatcaacctggcggcggtgctgcagacggtggtcatcagtcttctgctggcacgctggttgctgcctacattgggcgtggatttccacaatgagacgattgcccatgctgtcggcgtcgccgttcccgtgatcaccagctacatcggtcataaacgattctctttcgccacctcccgcgccgacgcgccgctcgacagttga

SEQ ID NO: 505292 - DNA, 1935 bp, Stenotrophomonas maltophilia
atgagcctgcaacccgagaatacgcggcgcctggactggacggcctgggtcgcctggggagtaggtgcagcgtcgctgcttgcgttggttgcataccagtaccgcctgctgaatttcatgcagtatggcgatgaatccgagaccattgtcgccgcaaagatgatggtcgccggcagcagcctgtatcgcgacttcttcaatcaccatggcccgctgacgttcctgccgggcatgatcgtggagctgctcggcggccacacagtggcggcgcatcgcgtcttcattgatctcctgcaattggccgcgctggcgagtttgttcttctcgccgttgatcaagggcaagcacgtcgttgtccgtgtcacctatgtgcttgtggtcgcaaccatctacgtcgctgtgctccccgccggcttcgggcatacctacatctaccaggtgatgtgtgggctgatgcttaccatcgccctttcgggatggctgcttccgctcctgggcaatgacggtgcgcaaggaggcacgagaacgatcaccggcagcgcgctgattgcctgcctgccgtttctggcgatcacctatcttcccgcttccgcggcactcctgattgcatcgctgcaccgcgacaactggcgcaaggtggtgctcggtacttcagccgctgttgtcctgaatctgatcttccttgcaacgaccggatcgttgcgcggttacctggccttccacatctatctcaacgctaccatcctgccgctcttcaacgagggccaggctgcgccactcatccagaatgccttcttcgcggccacatccgacctgggcagtctcctccaacttgcgctggtggtcggttcgctggcatttgccgccggactcaagaagggttttccttggcgccatgtactggtgggcctggccatcggctccctgcttctgcgaggcctggcgttccacgggctgagttatcaatacgcagcacttgccttgcccctgcttcttgtggctcggctggatgaccgcagcgtggcaatgcgcggaatgctgctgatactgggtaccgttcttctggcccggctggtgactggcggacaggacgagcgcgcgcatatcgcgaagtatcggatcccggagaccaccgagttctcgcgactggccaaagccctgacccggcccggagacaggatcctcgcgtactcgttccagaactacgagtacatcgcgtcggaccggctgccggcatcgggctattacttctacttcccttggcaacagaagtacctggagcatccggtgctgggaattcgcatcgacccttgtgaagacatcaatacggtcaagcccaagatcgtgatgctgcatgagtggaaggtgtgggatcgattcgaatggtccagctatggtgcctgcatctcaagcgcgctggctcgcgactatgttcgactgccccacaccatctattatgtccgcaacgacatcgcggctgcggaaggcttggtgggtggaccggccgacaccttcggtgcgagtgcgcaggtcgccaagggtgaccagatcgaagtccggaacgagatagctgccaacgatcgaacggttcgttcggtcggcgccctgatgggaacctacgggcgtcggaatgagggtactgcagccttgatcgccacgcttccggacggaagtacgaaggtgctctccaagatgcccctggcagacatgcaggacaatgcttacgcctatttcggcgtgcccgcgggtacccacggcaagctctccattcaaatcatggagggaggcggcgtaagcttctgggaggcgggagagaccggcgacgccaagcgcgcatgcgtcgtggtggagtattccaccggccctggataccgggttccaggctgccccgtcgacttcagccgcgtgggggctgcaacgccctcgccacaatga

SEQ ID NO: 505293 - DNA, 201 bp, Stenotrophomonas maltophilia
atggcgctcacgcccccgcaaccggacccaccccgccttcgacagttggccgcgatctgttggaacctgctgctgatggtgctgctgatggtgctgctgatggtgcttctgatggtgctgctgatggtgcttctgatgatggtgggtgccgaccgttggtcggcacggggtcggatcccgttgcgacgcaacgggctctga

SEQ ID NO: 505294 - DNA, 1491 bp, Stenotrophomonas maltophilia
gtgctcggcgttctggcgcacggtggaggtcagttcctccatcgaggcagcggtttcttccaggttggcggcctgctgctcggtacggcgcgacaggtcactgttgcccgaggcgatctcgccggcggccgagctgatcgcgcggctggactgcttgatgcgggtgacgatttcactcagctgcgcggcggtggcgttggcgtcgtcgcgcatgcgggcgaacacgccctggtagtcgccgtgcatgcgcacggtcaggtcaccctgcgacagcgcggcaagcaggccggagatctgttcgatgctgccggcattggcgtccagcaggccgttgatctgctgggccagctgcaggaagaagccttccttgtcgctggcgtcgatgcggccggacaggtcgccggcggcggcctgggcgatcacgcgcgccacttcggcttcgaccagtgcttcctgggtgcggtcgcgccattccaccacgtagccgacggtgtcgccgccttcgttgcggatggtcgacaccacctgcgcgaactgggcatcgccgtactgcatcgggcgacgggcgacgccgtgggccttcaggttgcccaacagcgtctggtccatctcgccgcggtgttccagcacggtgaccggcttgccgatcaacgaggcctgggcgtcgaagtccggcaggtcgcggcggacttcatcctggtactggctgagggtctgctgcagggcgcggttgctgtacacgatggtgttgctggtatcggtcaggtagacaccggtcgagctgtagtccagcgcggtgcggatgcgcaggttctcgcgggcaacggcctggtcggtttcgatgcgttcgcgcaggtcgcgctgcatgcgctgcatggcctgcatcagctcgcccacttcgtcctggcggctgacgtcgatgtggccatcgagcttgccgccggccacgtcgttggcaaccgacacggcgccacgcacgctgccgacgagggcgcgcgcgaacagccagaccagcaccaggccgagcgcggcgccgcccagcagggcgatcacggtcagcacggcggaggcggaataggtggacgcggcctcttcgcgcgaggcgcgggcgaggcggttgtcttcggcgatcagcgcttccagcgcggatgcagccttgcggtgcttggtgcgggtctcgcccacgaaggtatcgatggcatcgtccggcaggtccagctccagcatctcggtgacgctgtcgtaggaggccagggcgtccttccattccttggcgaaggtatcgaacagcttcttctgctgcgcgttgtcgaccagcttcgggtattccttgatcgacgtgtccatgctggtgcgcaggtcgacggcctgcttgcgcgcgtcggacttgacgtcatcgctggcgcggatcagctgctggtaggcggcattgcggtactcgcccagcatgccgcgcatctcgccggccatgcggatgctttccatgcgtga

SEQ ID NO: 505295 - DNA, 609 bp, Stenotrophomonas maltophilia
atgcgtggatgcgcgggatacggcgttgccggccagcggccggcactaccggatgcggtagatccacgccatgcatggatgcgcgggatacgggttgccggccagcggccggcactaccggaggcagtagatccgcgcaatgcgtggatgcgcgggatacggattgccggccagcggccggcactaccggaggcagtagatccacgccatgcgtggacgcgcgggatacgggttgccggccagcggccggcactaccaaaggcagtagatccgcgccatgcgtggatgcgcgggatacggcgttgccggccagcggccggcactaccggatgcggtagatccacgccatgcatggatgcgcgggatacgggttgccggccagcggccggcactaccggaggcagtagatccgcgcaatgcgtggatgcgcgggatacggattgccggccagcggccggcactaccggaggcagtagatccacgccatgcgtggacgcgcgggatacgggttgccggccagcggccggcactaccaaaggcagtagatccgcgccatgcgtggatacgcggggtacgggttgccggccagcggccggcactacctgctaa

SEQ ID NO: 505296 - DNA, 1377 bp, Stenotrophomonas maltophilia
atggacggagcgcaagcccaaattcttcagcaagaactaatgggagcaactcttgatgggtggaccatcacaggaggcctaggccatggaaagtccgcggttgttatggtgggtgagaaagaaggcacaagtgcagcaatcaaggtgttccatccagagctggtggagagatttggtcgcgatgctcaactagagcgaatcaggcgcgaagccagtctcgtgggtgcaacccacccacatgttgtcactatcctcggtggcggggaagcggatagtggatggctctacgtggcaatggaaaagctgccatggaaaaacctgaagcaagcgttgccgcagataccgacagacgcagtgccggcgttgatttcgcagctttcgtctgcagcgagatttcttgaggataatgggcttgcgcaccgtgacatcaaacctgagaacattgcgataaatgaagacttctcaacactgaagcttcttgatctcggtgtgatacgcccatttggtgcggctggtctgactgatgtcgactctcgcagtttcatcggcactctccgatacagctcgccagagtttcttcgtagagaagaggttgactcgattgatggatggcgggctttaacgttctatcaaatcggagccgtactccatgacttgctcatgcgaaaagagctcttcgaagaatattcggaaccgtatgcaattctggtagaagctgttcatcagagaaatccaaatgtggctggtgaagatctgaggcttgtgaggctgtgcaagaactgccttctgaaagatccgctcgcgagattggagctaattagctgggattcattcgatgttgagccgtctgcgagcgatgaaagatctaagctttttcatcaaattcgaaatcgtcagggctactactcccatcaatccgcagaagtctcaggtctcccactgaatggagaagagcagcgaattcatcgcgaggagattcgtagggctagctcaagtctaagctttaaggtgggaaagctaattactacgctcaaatgctttcctctccactctctaagtgcaaacgtggaccttcggaaagacgaggcgacgtgtggcgtgtcattcctaaaggatgacacactgggtctaactgcatccatcgaaatggtcttcatcttggcctgcgttgcacggaacgcaggtgctctcgtctttcagcttagtgcccatgctgacgttgctggtcacccgctggccgagaagtctgtgctttgcgctgggactatcgaagaagtactgccagatcgagagctcgaggggtggatgttatccatgctggccaaggcgtacgactacatagaagattgcaatttctctgcgggggagagggaatga

SEQ ID NO: 505297 - DNA, 1158 bp, Stenotrophomonas maltophilia
atgaccgctacatggtggaaggatgatggtgatctggttaaagaacaattggatattctagatgttccattggataagaatcttttgataaaaggtccgccgggttgtgggaaaaccaatctgcttctacttagagcaaatcatctgtacattgctgatcgtcccaacatcaatgtagtggtctttggctctgttctgcgtcagtttattcagctcggtggtgaggtctacaagtttccttcttcaaaaataataacgcatagccggctatttcttgacatcatccgtgaatttgacatggagtttaatgaagccggaatgggtctgacggagattcgagatcggagagtggaaatcattgaggggcttattaatgcgggcaaggttggggttgttagccaagcattgcttctggatgaatctcaggattatacgccgcgggaggtttcgctaatctcaaaattggctgaaaacataaccgctgcttgtgactctaagcagaaaatttatgagggcgatgatagtcagccggcgctggaatctgtcgtggatgaagtccgtgagctaacgtttaattttagaaatggaaagaagatatgccgcgttgctgatgccctgatggcaggtaagcctggatatattccgctttttaatacaagtcactacgatgaggctgagtatccatcgtctgtttcgtataagagtggtctatcaattgaagcccaggttgagctggtaatagagcaagttggattgcagcgggttgcttacccggatgaagtaattggggttctatgtccgaaagttgacgatgtcaattccgtcacggcgcttctaatgaaatccgagcttgtggatgaagtgactaggtgtggatctcaagattttgattctaagaaaaagatatgggtaggaacgatatcatcagccaaggggcttgagttcagagcgcttcatctggtcggtcttgatcagttggcggccgttgggaggggggcgcaaaagcggctagcctttacggccgtcacgcgtgccaagacagccttgtcgctctactgggacgcacatgttcctgggtatctagaggctgcagtaaggacggtagtgccgaccggtaagccggtatccagaaagatgctgttcggaaaaggaggatga

SEQ ID NO: 505298 - DNA, 1344 bp, Stenotrophomonas maltophilia
atgtggtatgcgaagcttaatcgaagagagataatggatgtgctcgtcactggctggcgtccagagctttccaggatggaagagggtggacagctttctttcttagacggcgccggtttcttggcagtctggcatgacagttcttcaaccagtgttgactcgcttccgtgtctaatcgcatccaatgagagctcgattgctccgctgctcgcagctttgctgtcagctccgcagcttccgtttcctataacttcactttcgaggctggtaacgaataagcagctttccgcgatggctgaaatgcgtgggtctgatacccgctcaagcttgctaaacggcctggcttgcctggcaatagcagaggcaacgatttacgccgggcaggacgctcaatcggaaaatataggcgtttcggtatgcagtcgcaccatctctcacgcatttgggaaggcgattcagatcgttcctgaggacgaaattcaggaattcttgagaaggtggatggaggttcaggcaattaccggcgctccgcttctggctggggctgggacttctgagactctttccagaatatttgatgtttgcatttccgttgacctgggaaaggacaatggagacacccttgctgatttggtcagtgatgcggttaagtatggggagccgagtgacgcaaattggaggaggattaccggagctgtcttagaggggtcgctgcaggacttttcaaacggcacccgcgaagagagggggactggctttcaatcaatccttgagaaagtcagaacgtcgaaggatccgccccaagagcttctggctgcttgcgcattagttgcgacccgaatttcgcccggaactatggatcacctcaatcttctactgagaaactctaatcccagcgtagtgctttggtacgccttctttgcaggaattcagcggttcggttctgctttgagacagcgccagggtcgaggtctcagaatcctaagggacatgagactgtccagtgatctgttctcagagccgagagccgatatcgcttatgacgagtttattctcgccaataagcttgagattgattccgtatcgaagcgcatgactcactcaaatgaaattgtcattgagctgtatccgcatgtcgatgtgagcttccgctacggaaggcgtagtgatcgaggggcggtatcagtacctcaagattccgaggtggctaagcaggagctggcaaatgagattctttctgcagcaaaatcactagagctgcttgcgggtcgggttttggcgccgcgaaacgttgattcgccgacgccgagagcaagaggtggacgccagaaacgactgctgtaa

SEQ ID NO: 505299 - DNA, 126 bp, Stenotrophomonas maltophilia
atgggcgtgccggtggccaagcggctcgaggagctgaagactgagaatacgcggctgaagaagcggctgtgcgagcactggctggagaacgacgtcatctacgacgcccttcgaaaaaagtggtga

SEQ ID NO: 505300 - DNA, 282 bp, Stenotrophomonas maltophilia
gtgaactacaagcgggtcgaacgcctttaccgggagggcaggttgcaggtgcgttggcgcaagcgggagacgatgctgcacggtgaacaccaaccgttgtttcgggcggaggcagcgaacgtggtggagtcgatggacttcctgttcgttcgagctgccaaaggaagtgtgctcaaggcgctggccatcgtcgacgatgccaccacgaggcggaggcgttcgcagtggagcggaccatcactggccgcggcatggtacgagtgctggataggctggtgctga

SEQ ID NO: 505301 - DNA, 279 bp, Stenotrophomonas maltophilia
atggctgcatggacctacgagcgaggtgtcctgctgcgcctgatccggtcaggcaagcccaatcggaacaactacattgagagcttcaacggccgccctccggacgaatgcctcaaccaacatcggttcccgacgttgctacactcccacaccgagatcgaaacatggcggcgcgaatacaaggaggagcgaccgaagaagattctgggtggcctgacgccggccgcgtatgcccaacagctagcagcaaaagccgctacgatggaacctgagccttaa

SEQ ID NO: 505302 - DNA, 639 bp, Stenotrophomonas maltophilia
atgtttcgacaaggaagatggttggtctgcctggccttgatactgtcaggttccctgctgagcggctgccgagccagctcggaggcggtacccgggccgcgtgctccggcagagaacgggaccctggtgcccttcatcaggccgctgccgctggtagcaatgaccacacccatggtggtcgagttcaccctgccgcccccagggaaaagctcctcgccaaccttgtttcttggaatccgggtgggtggagaagacgggctgaaatcactgaatacgagccgtgagatccgcagtatgggcctacccgccgaggtgaaactggagcggctggaggcgcagaagcgcattcctgttccgttggtgagggtggagtcggtggcaggtacgcccgcgcgtattgagcccatcggacccatgggccgggtggaaggcgggtggttggatgacgtcgatcatcagtctctgcagtcagcaggattggaggcgcctgacagtcaccacacacaacttgccctcgcttgggctcaggaactgcagcctggccactacaggctgagcatgcaggtactgaagcctgatgatcgattggcggccacgcaagccgagttgctggtggcctacgtaaacaagtcgaagtag

SEQ ID NO: 505303 - DNA, 939 bp, Stenotrophomonas maltophilia
atggacgacaagtacacagtcacaatcttcgttgccgctcccggcacgccgctgctggctggagggacatccagcgccggccacgtctactacaaagtggcacatggcaaggacgaggtgagctttggctttgcacccatcgagcatggcgtcgtcactgggcccggaatggtctacaacaatgacgccgagcagtacaaagacccgtactacacgcggacgatggagatcagcaagcagcagtacgacaagctggtggaattcggcgcaaagcccggcgagcatggattcaataccgagtatcacggtgtagagaacagctgtatcgactacacgtggggcgcactgaatcacgcggggcttcatcgaaccaaccttctcttcatgcaagacaagagcttcgaaggtggtctgaaaccgctcagcaatgtggagtacatccgcagcatccgcgcacccttcccagatagcgcgctgaataccgagcactacaacaaaatgccggagagaacgctgatgcagcgaatcatcagcgatgagcaactgccgcgcggcgatcgagatatgctcgattccatccgcaagggagtggcgagcatcgatgaggcgcatggccgttcctacgatgggaccagcgagcggatctcagcggggttgttggccaccgccaaggagagcgggctggagcatgtcgaccatgtggtattgggtaattctccaagcgatggttcggcgcagcgactgttcgtcgtgcggggggagctcaacgatccggcccatgtgcgagcttcgatgacggcggaggagggtgcgcgaacaccggtggagcagtcatttgccaaggtcgagcagatttcgctggcccagcaggagcgagcctcgttggcgccgcaggagccggccctggaacaaacccgggcgccgctgcagatgggctga

SEQ ID NO: 505304 - DNA, 1170 bp, Stenotrophomonas maltophilia
atgcgcccgattcccaccttgctggccctgtcgctggccgcgcttcccgccttcgcttcggctgccgatttcgacaactggccgaccaagtacgccttcggcgacggcaccgagttggccgctaccgccaacatcgcctacgactacaacgatttctcctcgggcagcggcctggaggacgacgacgccgtgcgccgcaaggagttcggtgcgacgctgaagaagaagggcgtctacgacgcgatggtctactacgacttccagtccgatacctggctggacgtgttcgtgcgcttcgagagcaaggccttcttcggtcgcgacatcggtcgcttccgcttcggctatatgaagaccccggtcggcctggatgcgaacacctcttcgcgcgccggcagcttcctggaaaccgcactgcccgtgcaggccttctacgaaggccgccgcaccggcgtggaatgggtgctggagcgcccgcagtaccttctgcaggccggcgcctatggcggcaaggacctgcagggtgacaaccccggcaccacccaggcagtacgtgcggtgtggaccccggtgaaggcgcccggtgacgtgatccacctgggcctggcctactcgcaggaaaatccgcgcggttacagcgatggccgtgacgtgcaccacgaggccagcgcgcgccttcgcgcacgcccggaagccggactgaccgacatccgctacgtcgattccggcgccctggtcaccgccgaccagatccgccgcaccggcctggaaggcatctggatccgcggcccgttctcgctgcaggccgaagccctgcgcgccacggtcacccgccatgacggcaagcccgactacaccggcagcggccagtacgcgatggccagctgggtgctgaccggcgagtcgcgcccgtacaacgcaggtgccgtggccaacatcaagccggcgcacgactacggcgcggtggaactggtggcccgttacagccgcatggacctggacgatggcagcatccttggtggccgccagcacgacctgaccctgggcgcgaactggtacctgaccagccacttcaagttccaggccaactacgtgaaggtcgacgccagccgtcgtggtgtgcacagcacgccggagatcttcgagctgcgcgcgcagatgcacttctga

SEQ ID NO: 505305 - DNA, 2595 bp, Stenotrophomonas maltophilia
atgaccgtgcttgatgacatcctgaattggtcgcgggatcgccctgcatggcagcgggacgccctgcggcggcttgtcgagatgggagagcttaccgaggacgacattgccgccttggcagaaatttgcaaggccgctcatgggttagccgaggcgcaaggcggcgtaccgctggatgcagcgtacctcccaagcaggaatgcagcgcaaggcgctgtagcccttgaatccatctttcaccgcgagggcgtcaatgccctcgcacaagaccagaccctaaagttcggccctcgccttaccgtcgtctatggcgacaacggggcgggcaagaccggttacacccgtattctcaagacagcttgccgggcgcgcgggagggagcagattcttggcaacgtcgcggcgggcgcggcgccgccccgtcaggtcgtcgccataaagtaccgtgttcaaggcgaaccggaggcgagggaatgggccggtcaggcagacgacaacttcattgcgcgcgtgagcgtcttcgacacgcagagcgcatcggtctatctcaaggaaaagacagatgttgccttccggcccttcggcctggacctcttcgacaagttggttcaagcggccaaagccgttcgcacacgactcgaagcagagcaacgggcgcttggcgagagcgccatatccgacctgttgccattggtgccggagggaaccgccgtagcgaggctcctcaacggcttgagcgttctcacagagacggagcacgtcaagactctcgcaacactgacggacgacgaggccgccaaactcgcgttgctggagaagtccattctcgatttgcaggcggctgaccctgcaaaattgctccagcagctcaagctgcgcggggcgcgcgtccaagccctctgccagcacgtccagcatgtcgacgccgcgctttctaacgagtccgtgtccgccatcttcgacgcgcgggcggagtggcggcgcaggaaggaagaggctgatcgcctgcgtacagcgacgtttcctgccgggcttctgccgggcaccggctccgatgcttggaagggcttttggcaagcggcaagcatcttctcgcaggaagcggcatatcccggtcaaccgttcccggttgttggtgaggccgcgcagtgtgtcctgtgccagcagggcctagaccacgatgccagtcataggctggggcgattcgccgccttcatcgcctccacgacggagcgcgaactgcgcgacgcgcgcgaactacatgatcggcagcgaaaggctattgccgcgctcgtcgtgcgccccgaagctgtccaagacaccatcaatgacctcagcatagagaatgaagccctcgctggccgaatcgacgcggcgcttgccgccgctgacgcgcgtcgccaagcggtgatggcggcattggagacagattccgagtttccgcaggacaatccggcagtcgcatccgtcctccctgacatcacgacactctcggcgcagcttgacgagcgcgtgaaggcgttgagcggagacgctaccgccgagaagcgaaggcaactcaatgccgaggcggcagagctgcgcgcgcgcgtcctactcgccaagcatgagaataccgtgttgcaggagatcgaccgtaagaagcggctcgctgcctatgaacagtccaagagcgacaccgccacgcaggccatcacaaggaagagtagtgaagtgacgcgtgctgtcgtcacgcagaagctcaaggacaccttccaagaggagttgcagggcctcgcgttccggcacatcgaagtcgagttgcaggaagccggcggtgcggagggtgttctttatcacaagctagcgctaacgcgcgcgccgggcgttcaacttccgaaggtcgttagcgaaggcgagcagcgttgcctatccattgctgcgtttttcgccgaactgagcactgctgacgatccatcgggaatcgtcttcgacgatcccgtgtcctcgctcgactaccgctggcgcgaaggcgttgccctccgtctcgtcgaagccgccaagacaaggcaagtcatcgtcttcacgcatgatgtcgtctttcttctctggctaaagcagtttgcggaggaacagcaggtcgagcaacttgaccaacatattagacagctttcggcgggcgcgggggtctgcaccgaggaactgccgtgggttgcgatgccaatcaggaagaagattggatacctcaatagcgagcatcaagccgctgccaagctgtcccgtgacgggcatcaggatgcttacgagaaagaggccaaaaacatctatggcctcttgcgcgaagcgtgggagcgcgctcttgaagaagtgctcttgtgcaagatcgttgaacggtatcggcccggcgtccaaacacagcagatcgcaaagcttgcggatgtcaccgaagaagactgccggcaggttgatgccgccatgagcaaatgctcccgatggctgcgcggtcacgatcaggctgctgctgctcgcgccccggtcccaggaccggacgaattgaaggccgacatcgacgcgctcgacagctgggtgaaagctatcaacaagcgccgtggttga

SEQ ID NO: 505306 - DNA, 1203 bp, Stenotrophomonas maltophilia
atgagtaactccgatcttgacgacctggcggcagagctggtcgagttcgctccgcttgagaagaaaagtggccgcccagccagcgaggagcgtgtcattgctggcttcgaggaaatccaacgcttcacagagcagcacgggtgtgcgccgcagcatggcgaagaccgcgacatattcgagcgcctatatgccgtgcggctcgaccgtctacgcgcgctcgcggattgccgcgccttgcttgggccgctagaccatcagggcttgcttgctggtgcagcgactgttgccgcttcggctgacgaaactgtcgacgtcgacgacctggctgccgaactcggggatgttgcccgcgcggacgacatcacggtcttgcgccatgtccgtaccagcgccgaaaagcgcgccgccgacgagatcgcggatcggaagccctgcgaggacttcgagaccttccggcccttgttcgagcgggtgcaagcggatgtcaaaaccggtatgcgtcagtcccagctcatcgaagcgggccgccgtgcgattgaagccggggactttttcgttctcgatggtcttactctctacgttgccgaggtcggcgagccgttgaaaaccaccgccggggaagtggaccgccgtctgcgcctcgtcttctccaacgggacagaaagcaatctgctgctgcgctcgctccagcgagcgttctacaacgaccctgcggcgcggcggctgacctcgcctgagagcgggcaactctctttcggcggtgagcttgaggccgatgatgttgaaagtggcacgatctacgtcctacgctccctctccgatcatccctatgtcgcgcaacatcgcgacattatccacaagatgggtgtgacaggtggcagggtggagacgcgcatcgccaacgccgaacacgactccacctacctgctggccaaggtcgaagtggtggcgacctacaagcttgcgggcatcaatcgcacccggatggaaaaactgttccacagactgttcgcgcccgcgcggttgaacatcacgatcaacgaccgcttcggtcatcctgtgcagcccgaggaatggtttctcgttccgctgttcgtgatcgacgaggccgttgcacgtatcaaggacggcagcatcaccggctacgtctacgaccctaaggccgcgaagctagtgaaggcggcggagggggggggggcatga

SEQ ID NO: 505307 - DNA, 1962 bp, Stenotrophomonas maltophilia
atgcaagagcgggtctatgagaggcgcggagagcaatatctgctgattaagtcgcctcccgcttcgggcaagagccgcgcactgatgttcgtggcactcgacaagctcgagaatcagggtttgaagcaggtgatcatcgtcgtgccggagaagtccatcggtgccagcttcaatgacgagccgctgtcgaagtacggcttctggtccgactggcaggttcaacccaagtggaacctgtgcaacgcgccaggcaacgacaacggcgggaaggtcaagtcgctgggcgcattccttgaaggcgacgacagggtgctggtctgcacccatgcgaccttccgcttcgcggtcgatgcctacggcgtggaggcgttcgatgaccgactgatcgcggtggatgagttccaccacgtttcagccaacccggacaacaagctcggcttgcatctgggacaattcttcgcgcgtggcaagacgcatatcgtcgccatgaccggttcctatttccggggcgacgccgaggccgtgctggccccgcaggacgagtcgaagttcgatactgtcacctacacatactacgagcagctcaacggctacgaatacctcaagcaactcgatatcggctacttcttttacagcggcccttatgtcgatgacatcctcaacgtcatcgaccccggcgagaagaccatcatccacattcccaacgtcaattcgcgcgagagcacgaaggacaagatgcgcgaggtggaacacatcatcgaggcgctgggtgagtggcagggcatcgacgctgccaccggcttccagctcgtcaagcgccccgatggccgcgtgctacgcatcgccgatcttgtcgatgatgatgctgccaagcgtgaccgtgtatccgctgcgctcaaggatccggcgcagaagaacaaccggaaccatgtggacatcatcatcgcgctgggcatggcgaaggagggcttcgactggatttggtgcgaacacgccctaaccgtgggctaccgcgccagcctgaccgagatcgttcagatcatcggtcgtgcaacccgcgacgcacctggtaagacccgcgcaaggttcaccaacctgatcgccgagccggacgctgctgaggaagctgtcaccgaggccgtcaacgatacgttaaaggccatcgcggcaagcttgttgatggagcaggttctcgctccgcgcttcgagttcaagcccaagaatcctgacagtggcccgacgccgggttttaactacggcgagggcggctacgactctgaccgctgtaatgtcggtttcaatgagcagacaggctcgtaccaaatcgagatcaagggcctcgccgagcccaagagcaaggaagcagcgcgaatctgccaggaagacctgaacgaagtcatcgcggccttcgtgcagaacaagcccaccatcgagcgcggcctgttcgatgaggagctggtgcccgaggagctgacgcaggttcgcatgggcaagatcatcaaggacaagtatcccgagctggattctgaagatcaggaggccgtgcgccagcacgccatcgccgctctcaacctcacgcagcaggccaagcggcttgtcaccgaaggcgagagcgatgggtcgccaaacactgccctgatcgacggcgtgcgccgcttcgcgatggacgtacgcgagttggatatcgaccttgtcgaccgcatcaacccctttggggaagcctacgccatccttgcaaagaccatgagcgaggacagcttgaagcaggtcgcggcggccatctcggccaagcgcacttgcctgacgccggacgaggcgaaagagatggccgttcgggctgttcagttcaagaaggagcgcggtcgcattccggcgctcgattcccaggatgcctgggagcgacgcatggccgaaggcgctgccgccttcatgcgtttcaaggcggagggacgttatgagtaa

SEQ ID NO: 505308 - DNA, 1014 bp, Stenotrophomonas maltophilia
atgagtggcttcgcacatgatccccaatttggcaaaacgacgatttcagagatggagcgagtaaggcttgctattgctgcaaatgaatttttcggatgttttgcttatgtaactcagtcgggctttcgagtgttcgagctgagcgtcgggaaggatttttggctgaaaacaagttctcgatggctgttcggaatcgactatggccggacggatccgcgcgcgctgcgtgctattgcagattgtgccaattcggaggtcagaatatttgacggacgctttgtcgtagatcggcctggctttgatcctcgtcgcgactttcatcccaaggtcgcgatgatgaagaacgcgaccaccaacatgcaagggattgtgcttggctccggtaacttctcgaataatggtcttcgacgcagcgtcgaggctggctcggcaattatttctacggataaagcttattttgatgagcacatcaaaccagttcggtccgtgttcgagaagctgtgggcgcaagcttgcccgctggccgatattttaaatagctatgaagatcgtttggcgactcttgttgattcgcgcgatgtgaagcgatcggtaaacgttgctggtccggttagtggattttggatcgaggcgggatacgtcacaaagaatcgcggacaagataagccgggaaatcagattttcgcccccaatgggttccgtgactattttgggctaaagaaattaggtgctgaatcaacgcagatcggcgcgattaatttcaggacagaggtgggcccttcggttacgaagatctatcgtgaaaatgataatggaatggagaagttggcattgccaatgcccgaagatcatggatttggtgtttatgatggaaaggttttggtcttcaggccggaaggtgagtattttctgttaactgcagtcgaacttgaggagtttgatgtgctttatgggcacagattagtaaacgtcaggaagatggttgggggaaggcgtttcggggggtttatctaa

SEQ ID NO: 505309 - DNA, 2730 bp, Stenotrophomonas maltophilia
atgaatgcagtagaaatcgaacaggccatcacagatctcgcggggcgtccctttgaccccgcagagtttccctatttgttccttgaagctttcggtaacaaggcgacgaccatcaagcgcctacgcgccggggcctcgaacaagtctgacttgggtggtgttcttcagacaagcaacatccacatcctgatctgcgatgcagggcaggtgacgcagaagctagccgccctcaaggcaagtccggcgactgccaaggcaaaatcgaggttcattctcgccaccgacggtataggcttcgaagccgaggacttgaccagtggcgagactgtcgcctgcgctttcaaggactttccggatcacttcggtttcttcttgccattagcgggcataagcaccgtccgccagattagtgagaatgccttcgatatccgggccacgagtcgcctgaatcgtctgtacgtcgaactattgaaggacaaccctgattggggtgaggcagaacgccgccacgacatgaatcacttcatggcgcggctaatcttctgcttcttcgctgaggataccgacatcttcgtcggtagggttggcttcaccgaagttgtggaaatgatgagcgccaaggactcggcgaatactcacgaggtcattgctaccctgttccgcgccatgaacaccaagcgcgaggatcggatggctgccagcatcccgcggtgggcggaggatttcccctacgtaaatggccagctgtttgccggcagcaattcagttcctcggttcagtaggattgcccggtcctacctgctccacgttggcggtttggattggaccaggatcaatcccgatatcttcggctcgatgattcaggctgttgccgacgatgaggagcgcggcgagctgggcatgcattacaccagcgttcccaacatccttaaggtgctgaatccactattcctcgatgaactacgtgcgcgactggcagatgcgggcgagaacccccgcattctgcttaacctgcgcaaacgcatggcgaagatcagggtctttgacccagcctgtggttccggcaattttctagtaatcgcctacaaggaaatgcgtgccatcgaagctgacattaatcgtcggcgcggcgaaccggaccgtgcgtcagagatcccacttacgaactttcgaggaatcgagctgcgcgacttcccggctgagatcgcacgccttgctctggtcatcgcggagtatcagtgcgatgtgctgtatcgaggccaaaaactcgcgctctcggaatttctgccgctacgcaacgagaattggatcacttgtggaaatgcgcttcgccttgattggctgagcgtctgtccaccaacagggaacggagtagagcttgctggcgacgatctgttccaggcgccgctggatcaggcgctaatcgattttgagaatgaggggggggagacatatatatgtggaaaccctccgtataggggtagcaagtggcaagatcaagagcagaaggctgatctcgcgtttgcgtgggctgagcatccgcaccttgccaagatcaccgacttcgtctcgggctggattgcagcttatctcaaatatgctcgcgcggtgccagacgcggtggcggcctttgttaccactaatagtatctgtcaaggtcagcaagcatccgagatttggcctgtagtgactaagcaaggaagggagcttcgatttgcgcacgctccctttacttggaaaaatctcgcagttcataacgccggcgtcactgtaataattattggtctgggtccagaatcatcttcgtcgaagcgtctgttcgaagataatggtctcgtccgcgagtgtgatgtcattgggccatatcttgtgcccaatatgcccgatgccatcacaaaggcgaacaggccgttaggacttcagtcccctatgttgttcggaaacatgcctcgtgacggaggacacttgttcctcacaccacgagaggcgcacgagcttcgtctgaatcctgatacgcgttcttatgtgcgcagattcctcggctcagacgaattgatcaatggaaagctccgcttttgtctctggatcaaggacgaagaggttgaggtcgcaaagagaagttcattcatcgccgatcgcctcgacctcgtcgctgataacaggatgcgatctcctgccgaatctacccgtgcattcgcggactcacctcaccgttttgtccagattgcgggaactgcgaagaggtcggcaattgttgtgccaagagtatcttctgagaatcgcgagtatcttccggtcgatcttgtgactgccgactgcatcattggtgatcgaaacttcgctctttatgatgcgccgctttggaatttagcactgattgcatctcgtctgcattgggtgtggataggtacggtttgcgttcgcatgcgtacagacttctcctactcaaataccttggggtggaatactttcccgattcccgcccttaccgaaaagaatcaggatgaccttaatcgggcatctgaaaatattctaattgcacgtgaaagatgctttcccaagaccattgccgaactctacggcgcgattggtattccggaagagctgcgcgaggcgcatcgccaaaatgatgaactggtggagaggatttactttggtcgccgaatgagaaatgatacagacagattggaaagcttgtttgcactataccgtaaggtggtggcgagatga

SEQ ID NO: 505310 - DNA, 1119 bp, Stenotrophomonas maltophilia
  misc_feature (829)..(853): n is a, c, g, or t
atggggttgccggccagcggccggcactaccgtgaggggaattgccggagccggcggttggtagtgccggccgctggccggcagatacggaaacgttccgacgtcatggggttgccggccagcggccggcactaccgtgtggggaattgccgaagccggtggttggtcgtgccggccgctggccggcagatatggaagcgttccggcgtcatggggttgccgcccagcggccggcactaccgtgtgggaaattgccgaagccggcggttggttatgccggccgctggccggcagatacgcaaacgttccgacgtcatcgggttgccggccagcggccggcactaccgtgtggggaattgccgaagccggtggttggtcgtgccggccgctggccggcagatatggaagcgttccggcgtcatggggttgccgcccagcggccggcactaccgtgtgggaaattgccgaagccggcggttggttatgccggccgctggccggcagatacgcaaacgttccgacgtcatcgggttgccggccagcggccggcactaccgtgtggggaattgccgaagccggtggttggtcgtgccggccgctggccggcagatatggaagcgttccggcgtcatggggttgccgcccagcggccggcactaccgtgtgggaaattgccgaagccggcggttggttatgccggccgctggccggcagatacgcaaacgttccgacgtcatggggttgccggccagcggccggcactaccgggtcgggaattgccgaagccggtggttggtagtgccggccgctggccggcagatacggaaannnnnnnnnnnnnnnnnnnnnnnnngtgccggccgctggccggcagatacggaatcgttccgacgtcatgaggttgccggccagcggccggcactaccgggtcgggaattgccgaagccggtggttggtagtgccggccgctggccggcagatacggaaacgttccgacgtcgtggggttgccggccagcggccggcactaccggtgcgcggtgtcggcgcgcggcggtgggcgagggggcctgaatcggggacaatagcgtccccgccgccccacgcccgctcccgatga

SEQ ID NO: 505311 - DNA, 447 bp, Stenotrophomonas maltophilia
atgaccacgctctaccccacctatccacgcctgcatgtactgctcggtgccgcaatgcccggcctgcagctctccaatgccgtagccgaggcgttggaagatgcgctcacagaagcccatgaacacgctccgccgccggccttcttcgcccggttgcacggcatcgcgcaaagccacgccgccgatggtcaggtctggcgcgaacggcagctcagcgatgtgcgtggccgggaactgaccgaggcgacgcgctgcttggcagcattgtctgcgtgcggcggggtactgctggctgcacagtcggcgcgcgagacggacgatgcgcaggcgcagtgtccgccgcaggtggaggaaggcctgctgcacgcggtggtggtgttggccgatcatgccggggcgctggtcgcgcccgagctgctgccgacacgagccaatgaatgctgctag

SEQ ID NO: 505312 - DNA, 363 bp, Stenotrophomonas maltophilia
atgagaaagcaatcagatcaaggccttgacgacaagagatatgaattacttcggaaattcgtgcaggcgctatcggatctggatagcagcacactgcaggaggactttgatctgacctcagtcatgattctggaaatctacgagcttctgccggtgtacttcctagaaggtgccgccatttccatccctctacctacgtacggcgcagcaggcgacttgataccgttgatgaccacgtatgactatggtgatggtgacattgcagttgagtgctatctcctcggggatggcgagcccagcgaagccattcttcatgtccatttcgagaaaggtaatctcatctacggattcatcaattcatag

SEQ ID NO: 505313 - DNA, 225 bp, Stenotrophomonas maltophilia
atgaagccgaggaacgagtatgtacgtcgtctggacgtgctgcttgaccgcggcgtggtgccggaggagctagccaacaccgaggcggcagcggagaatctgcgacgcgaacacgcctctcgatgccatcagcggcttggccggggcaagtgtcgcggtggtgtgcagtccgacccggcgcagccggtgttgcgggttcgggccagctatccagtcagcccgtag

SEQ ID NO: 505314 - DNA, 495 bp, Stenotrophomonas maltophilia
atgactcatgctgcagataagaagttcttccgcatcccccgccgcaaggccattctacttctgatagtcgtcgctgcgatcgcactcgcagcaagcacgttcgctttcgaacgcggcccctacttctgcaccgattgtcacgtcgaatcaccggtacccgacgcaagaaccctagaggtcattaaagactcgcgggcaccaatcgactatgtgccattctttgcgtgggcgactggaacaacgtaccagatatgcaatcccacccactgcaccgtctatcacgagaattttgaatccaattgggtgggcgaaggccggacccctcgcgagggtgttatgcccgagccaatctacgaaggcggcggcgtggagactggcggaggcggcaccgagaatgggggtggcggagttggcgtcggtggcaccaactttggcggtggatgtgtcggcaactgcagtggcaggatagatgtcggcccagtccagcaaatttga

SEQ ID NO: 505315 - DNA, 876 bp, Stenotrophomonas maltophilia
atgagtcgacggatcaaagccctgagcctcgctgtactagccatgctggcaggagcggcagtttggtacggaacaaccgcaccgagtacgcagccaaacaaagccgcctcatcgtcagagccgtccagcgctctggagcacgccactcgagggcccgcgatctccgcctcgcggccggtctcttcaagatccacaccagggtctgcggccaacagattagttcgtgtgcggcaactgtccggacgcgcgtacgcagtggaagactatggaccaatcccaccagggacagtgcacgaagtcatttcaagactttcgccgttggcattagctggtgatgcgacagcgtcctacggaatattccagaagctcaatgagtgtaaggacatcaatcgacgcgcgtctcgaggcgtcgcacttcacgcttccgagaatgtcgcgaccgcgtgcattgaactatccgctgaagatgaactgagttccagtagatggctctcgcttgcagcagagcaggggaacattggagcacgactcctttatgccgcggactcacaatccgcccttggaggaccagcggagctgcttcgcaatccagaccgcacgaaggaatacaagcagacagctgttggctatctgcaagaaatggcaaaccaaggcagtgcggacgcactcctacagcttggtaatgcctatcacgctggtgtacttgtcgacgaggaccgagttacaagcagagcttactttgaagcagttcgtctcgcagatccgtcgatagtgccagctcgacaagttagtaccttggacaaatcgctaagtgcagaacagctgaacttggcacttcgaaagggaaatcaactctatgactcatgctgcagataa

SEQ ID NO: 505316 - DNA, 423 bp, Stenotrophomonas maltophilia
atgaagaaccagaagggcttcacccttatcgaactgatgatcgtcgtcgcgatcatcgccatcctggctgccatcgcgctgccggcctaccaggactacacctcgaagtcgaaggtcaccgctgcgctggccgacctggcctcgcacaagacccagttcgagatggaagtcagcaacggcaacaagccgacgctggcaaccgctggcttccagagcaaggaaaccggtagctgcagtgttatcgatgtgaccgagggtggcatgaagtgcaccatccgtgatccgggccgtatcggtgagaattctacgatctcgctgaattacacgcaggcgtctggtgaaggcgaggatgcggtggcgggtggtttcgtttgtcagacttcggctgtcgatgccaagttcattccgaagggctgcaagtaa

SEQ ID NO: 505317 - DNA, 444 bp, Stenotrophomonas maltophilia
atgccaaacctctttcagaaaccgacggcaatccaggtcttctggctatccgcatccgttgtatggctgctactggcgttcgcactcatccatgccggcttcaagccagactactggcaactgcgtcacacccagtctggaacactgccttaccccacaagttcagtcgtcaccttaacgctgatcattctggtggagattgttgccctgggcctgatcgtgcagccatggcgatttcaccgtctgtggctgcgaatgcttgtctgcgccttcccctggctgggctggacaacactctggggcgtgaccgccatgcatcagtctcccgtgcgcgatgtgcacctgttctggttgcttgcaaccagcggcatccttcttctggcgctgctggtcgtggtcccggcctccgtctgcccgcgcctacgccgctggctcaacggctga

SEQ ID NO: 505318 - DNA, 834 bp, Stenotrophomonas maltophilia
ttgaggcaggttcatacgctgtcgcttctgctcgaagcggcggagctgtcacgcagtacgttctattaccagaaccatgtcctggcccatccggatcaggacgaggcagccctgtgcgagcgcatccgtgcaatctacgatcaaagcaaagggcgctatggctatcgcacggtgacgctggaattggccaatcagggtcatcggaccaatcacaagcgggtacagcgcctgatgggggagatgggcctgaaatcacgggtacgggtgaagcgctaccggtccttcaagggggccgccaatgttgtggttggcaatgacctcaatcgccaattccacgccgagcgccccaaccagaagtgggtgaccgacgtgaccgagttcaaggtacaaggcatgaagctgtatctgtccccgatcatggacctctacaacggcgaaatcgtggcttatcagatcaagcgccagcccgtgttcgacctggtgggtcagatgctggaggaggccatcaagaagctttcgccggatgagcgccccatgatccactccgaccagggctggcagtaccagcatgaaaactaccggcacatgctggaaaaacactcgctgaaacaaagcatgtcccggcgtggcaactgcctggacaatgcggcgatggagagcttcttcgggacgctgaagtcggagttcttctacctgaacagctttgacagcatcgagagtctggaggctgggctggtggaatacatccagtactacaaccaggagcgcatcaaactgaaactgaaaggtctgagcccggtagagtaccgggagcgggcccaatcggccgcctga

SEQ ID NO: 505319 - DNA, 915 bp, Stenotrophomonas maltophilia; identical to SEQ ID NO: 498397

SEQ ID NO: 505320 - DNA, 135 bp, Stenotrophomonas maltophilia
atgcggttgccggccagcggccggcactaccggtccacggtctcccaaggggaagcgtggcagggcgtccaccgcctgttccagccgcagcagatgcagcaggtcttccgcgccgtggccgaagcgctgggctga

SEQ ID NO: 505321 - DNA, 207 bp, Stenotrophomonas maltophilia
atgaatcgattgtgttgttgtgggcaggagcgcgcaagcggcataagcgacgtgcaggacgtggcccgcgtggaccatgcgatggcaccgcgcgaactggtgcggctgggcagcgataccgaatcgctggtgctggcacgcgcggttcgccgccatgtggagcaccgcatcctgctcaatgggcatcgcacggtggtgttccggtaa

SEQ ID NO: 505322 - DNA, 207 bp, Stenotrophomonas maltophilia; identical to SEQ ID NO: 505321

SEQ ID NO: 505323 - DNA, 867 bp, Stenotrophomonas maltophilia
atgaagcgtgtcaccggtacctacagcgccccccgcccgcactgggtgggcgacggattccccgcccgttcgatgttttcctacaacacccacggccagcacctgagcccgttcctgctgctggactatgccggcccctacaccttcgctcccagcgataccccgcgtggcgttggccagcatccgcatcgcggtttcgagaccgtcaccatcgtctatgaaggtgaggtcgcccaccgcgattcaaccggggccggcggcaccatcggcccgggtgacgtgcagtggatgaccgctgcctccggcatcctccacgaggaattccacacgccggaattcagcaaacgcggcggcacgctggacatggtccagctgtgggtgaacctgccggcacgcgacaagatggggttaccgggctaccagaccctgctcgacgcacagattccctcggtggatctgcccgatggcgccggccgcgtgcgtgtcatcgccggccgcttcgacggtcatgccggcccggcgcgtacccacacgccgatggatgtctgggacatccgcctgcggcagggccaccacgccgaactgccggtggccgatggctgcacgctggcgctggtggtgctgaagggctcggtgcggatcaacggcggccagccggtcggcgaggcacagctggtcaccttcgaccgcagcggcgaggacgtgttcgtcgacgccgacagcgacgccaccgtgctgctgctcagcggtgaaccgatcgacgagccggtggtgggctatggcccgttcgtgatgaacagccaggccgagatcgcgcaggcggtcaacgacttcaacagcggccgcttcggccagatcgcgcactga

SEQ ID NO: 505324 - DNA, 3120 bp, Stenotrophomonas maltophilia
atgccgtccacggcatccgcctgtcatcgtcgcgccaccgtcctggctcttgccatctccaccgcattgctgccgctggcctgggtgccggccgtgcaggcgcaaccggcggtcgtcgcgccgttgcgccagtacacgattccggaacagcccctggccgacgctgtgcgtgcctttggccgccaggccgatgtgcaggtggtgttccgcagtgacctggtggagggccgccgctccagtgcggtgaaaggcgagtacagccagatgcaggcgctgcagcagctgttgcgcgggagtggcgtgcgcgcacagcgcggcatggacggcacctggagcctgcgggccgcagtggaggcgggtgaaggggaaggggtgcgggtaaccgagactctggacgtggccggtcgcctgcagtcggaagggggcgaggcgcgtgatcggcgcggctacgatgatgtgttcgcgctggacctgaccacggcgtattcggggcgcgaccgggtggagcgctaccgcggctccaacccggccgacgtggtcaaggatctggtcggtgtgttcagtggcgatgcgcgcaacagcggcgcactggacatcaacatccgcggcatccagggcccggggcgggtgccggtcagcatcgacggtggcgaacaggcgctcacggtctggcgcggctacaacggcgtcagcaaccgcaattacattgatcccaacctgatgggtggcatccaggtcatcaaggggccagggctggtgcgcgatgtgcacagcgggatcggtggcgcgctggtgatcaagaccatcgacgtcgatgacatcgtggaaacgggtgagcgcttcggcggggagctgaagatcgaaggcagcagcaatgcggtggcgccacgcctgccgcggctgcacaccggcgaggattaccgcaccgtgccggggttcccgcagggctcgccgaactcgccctacgacgaccgcaccctggtggtgccggtgaagtcgcgcagtggcaacaaccccttcgatggcgaggaccaggcctggcgcctggcgctgggcgtgcgtggcgacaacgtcgacctgatggccgcctacgcctggcgcaagcgcggcaactacttctccgggacccggggcaacgcctactacgaccaggaccggcgcgagcagttcgagtaccagggcatcgactacatcaccacgctggcgcgctacttcaagcccggcgatgaagtgcccaatacttccagcgaacaggagtcctggctggtcaagggcagctggcagatcaacgatgaccagcggttgaaggcgacctggcggcgaacgctgtcgcactatggcgagatcatgccgtcgcgcatcctgtcggcaccggactatgggcgcatccagtggccgctcagccgggttgcgtccgatgcctggaacctggagtaccgcttccagccggccggcagccgctggctggacctctacgtcaacctgtggcgcacggagacagacagcgatacctacactgcaggcggcttcccgaacttcgcgccaggcaacccggcatggaacccggacgccagcccgatcctgcgcaacaccgcgttggccaatgcgcgcaacgaccgcaccggtctgaccctgagcaaccgcttcgcgctgcattccaccctcgacctgaccgtgggtggcaactggcaatacgaaaagctcggctcgcgcgacccgtatttcggcccgtccgacggctggcgcatgtacccgcgtgccggccgtcgccaggagggcgagggctacctcactctggaatggcgtccggtcgactttctgaccctcaatgccggcgtgcgttacagccgttactgggcgttcgacgacttcctgcaggcccacccggaactgcagacgacctcgatcgtgccgcgcgaagcgcagtaccgggtgaatgaactgccgccgcggccggacagcctgcagggcgagatcgacgcactcgagagtgagcgggaattctgggacagcatcggcatgggctggatcgtcgatcagtcgctggccgacctgctgcgcaagtacgagacacccagggaggtccagcacggcattccctggttgcccgatgcaaacggtaactacagccgagccaccaatccctgcctcaacggccaggtcgccgccatccccgggctgctgccgatggtcctcggcaccgacatccgctgcaggatcgggggcggggcgatgcagtcggtggccgggcgcaacgaacggcaccgcgatcacgcctggttgccgacgttctcggcgactgtgcgtttctcgccggccgctcgtgcctatctgcgctacagcgaggcggtgcgcttccccagcatgttcgaaagcaccattgcgttctccagcagcctcaatccgctgtatccactcaagccggagcatgcctacaactacgagctggggtacgtgcacaacctttccgggctgttcggcaacaccgccgatgccgacgtcaagctggcctactacgtgcacaagacccgcaatgtcatcgagcgtgatgcgtacttcatgttcgacaacatcgacaagcagaccatccgcggcatcgagctgcaggcgcgcttcgacaaccggcgcttcttcaccgatctgggcatcagccgcatccttgaaaacgaagtctgcgatgaaagctcggcggtacggctggatgcggaccaggggcgggtgcccaactgcgtccaggatggcttcgtcagcggctatctgctgacccaggccacgccgaagctgtcggtgaactggtcactcggcacccgcctgttcgatgagcgcctggagctgggcagccgcatcgtgcactaccagcggcacgacaatccggacctgcaggcctaccgcgaccgcctgatcgccgggggcagcagcctgctctggcagaacgtgcccttcacctggggaaacatcaccacggtggatgcctacgcccgctggcgtttcaaccagcacgccagcgtcgagctggtcggcagcaatctcggcaaccgctattacgtcgacccggcaacacgctcaacgcttccagcaccgggccgcacgatcaagcttggcatcaccgcacgcttctga

SEQ ID NO: 505325 - DNA, 756 bp, Stenotrophomonas maltophilia
gtgaaacagccccgcacccttgtagtttcgatcggcctgctggcttccatgccggtcatggctgccgacatcgctggcgggcagagcccggcccaggacggcgtccattacatcaacgcaggcgaatcgacactcaatgccggtccgcaccgttccggtcgcgcaggcatttcgttggggccgtatgccaacgcggcgcgagtggacgtggccagcctggcgccctacgccaccacggtggtgcgtggcgcaaccacggtccgcacgctgggcccggacgcaggcctgccgttcgccaccgctggcgtgggccacttcagcttcgtgcaggtgggcaatgcagatgtctggttcggtgaatggtcatccagcggcgcgcaggcgggcttcaatcaccgccaggtgttcttcgtcggtgaccgtgccggtacttcgctgccagcaggcatcgtgacctacaccttggctggcatcaaccgctttgatggcagcggcgtgctggaaggcgcactgcgggcgaatttcgataccggcaccgtcaccgccggcctggtcgggaccggatacaggctcgccgcgagcggcacgctggatcgcgccaccggtgcgttcagcggttcggccatcgccaatggttcgatcatcggtaccagcagcggccagttcttcggcgccggtgccagtgcggtgaccggcatcgcaacctttgccggcaacagccagttcgatacgtccttcggcggtcagcgcaactga

SEQ ID NO: 505326 - DNA, 660 bp, Stenotrophomonas maltophilia
atgccggtgccgagagggcagcgaccatactgcaccgttgcgtttccattgaacgattcacggccgcggctacgtgccctttcgaatctcatcccctgcgacggcagcccgtatccttcctgcatgcattccttctccgatcttcgcggtctcccggcagtccccgcgtcctccggctgggtgcaacgcggtgagcgctgggatctatggtggagcggccgcatcgtggccagcatcgtcccgcacgcagtgctcggcttccaggtgtacctggatgcacgcaggatgtccccggccaaggtggtgcacgcggtgaatgcgcggcaagcccggcgctatgccgagcgctggtgcgcggctcggctttgcccccggttgcggctgcgcgacgcggtcgcctgtcttgtgggcgccgcgccttcggcaggcgcggcgcggccgccgccgctcacacgggagcagcgccagcaggcgcgccgcctggccgaggccgggacaggggaggtggcacgcatcaagcaggcgctcgcaccgcggcagcctgccaggcccttggggcagttaacgtgtcaggcgtggtcggtacccggcaggacgcccgcagccctggcaagcgctacgccgaaagctcctcacgcacgatcctggccccttcgctga

SEQ ID NO: 505327 - DNA, 831 bp, Stenotrophomonas maltophilia
atgctgccggtggatgatgcgctggccccgctgccggccggtgaactgcactggctgagatgcggcgaactggaggttgcgctcgccgcaggggcgggcgggcgcgtggcgcacctgcgttaccagggcgtggagtggctggtggatgcgcaggcgggcggggcggctgcgatcgcctggggctgctacccgatggtgccctgggccgggcgcatccgccatggaacgttccgctttgatggcaggccgcatcggctgccgctcaacttcgacgggcatgccattcatgggttgggcttctcgcgaccgtggcagatcgaccggctggatgcggcggcagccaggttggcgctggcgttgccgcacgacggctactggcccttcggtggcatcgccatgctggacctgcagctggaggctcacgccctgcagatgcgcctttcggtccaggccggcgagcaggcgatgccggcggtgctgggctggcatccctggttccggaagcctgacgggctgctgttcacgcctcgtgcgatgtacccgcgggacggggaaggtattgccacgctgccctgtgtggctcccactaccggtccctgggatgactgcttcatcgccgacagcgacatcacgctgatacgcggaggccagcgcctgcggctgcgctcggaccacgaccattgggtggtctacgacggcacgccgcacgccacctgtgtggagccccagagcggtccgccggacggcttcacgctggcgccgcaccggctggagcccggccagcgcctcgcgttgacgttcgacctggcgtgggcagcggacagggcgtga

SEQ ID NO: 505328 - DNA, 450 bp, Stenotrophomonas maltophilia
atgcctatcagggcagtggtatacgtcagcgaagccagccccactgttgtgggcgacaacgggcgcaaggagggcaataggctggaccagctggtcgacgacgccgcacgtttcaaccgggacgccggcgttaccggcgtgcttctcttcgatggcgggcggtttctccagtacatggagggaccggaggacgggttgcgggtggcgtacgcgcgtgtgctgggcgcaaccagccacgcagggctggtggagctgcagcggggcagggtgggcaaccggcgcctgccgttctggccgatgcgctggcttccggtagatcccgggcagttgaagtcgctggcccacgcggactggatcggcttcgtgcagcgtggcgatacgtcggccggtgggcaatcagcaatggatctgctggtgggactggtggagccgtacgcccttgccgcataa

SEQ ID NO: 505329 - DNA, 345 bp, Stenotrophomonas maltophilia
atgcctctatccggaaacgaagcggcctctccaggcgtgctgcgtatcgagtgcatgccgctcgattgtggcggcgccgccattgtcgtggaactggaccgtacgcctgaacggacatggatgaagtcgctgaagcgggcattgcaggccgacgatgcccttgaaggcgcacaggccaaatttgatggccgatttgtctatgtcgtgggcgtggacgggggtgggcaccgcgctcaacaccgcgtgatgcaggccgtgatggcggcggacggcgggggcgcttcgaacacccgcccccggggccccagggcgggcgcggtcgcatcgagcgccctggcgacctga

SEQ ID NO: 505330 - DNA, 249 bp, Stenotrophomonas maltophilia
gtgagcacgcacctggagattgacctgatcatcgcgcaactggaggaaatgctgccggaatgggcggcgttctaccccgagcagcagttcatgcgcatgctcgccgaagcgctggactacattgctgccagtgcggacccgggggcccggctgtactgcgtgatgcgcaccgggcacctccatctgtgcagcggagagattccgtggccggcgggccatggaggccctggccgtttgctacgggtctga

SEQ ID NO: 505331 - DNA, 4641 bp, Stenotrophomonas maltophilia
atgcctggcacttggtttgcatacgcaaaccgcgagatcaaggtggggaggaggaaggcagcggagatcgacttggtcatcgtcggggatgataggctttacgccgtggacctaaaggactggtacggcaccttagagaacgacggaggacgctggctccagaatggaattccacacggccgatcggcggtccgaaagattagggaaaacgcaaagaagctctcgtcctatttcaagggaaagcttcctccgagggttgggagtattttcgttgatggcttcgtggtctccactggaaacctggactactctgcactaccagaagatgagcgggccggaattctgactcttgcggagtttgcaagtctggcagacccaaagctgcgcgagcagatcttagatgaggtgtcccgagaaaaaagctcgcgacctctgacggatttcagaagtgagtttgatctgctgatgcgaatcagcagctccgtcaaaccaaggctatttcgcccctttgggtttgagttgggagaggcgccggaatttgttcatcggagccaactctaccgtgaattctccggagtctctgggactggagacaaaggagtaatccgccactgggatttcacgactcttccaatcgagatgcaggaaatcaatgccaggacagaaattcttacgcgagaagcaaggattcgcgaccacttggcactgcactctacgcacttcgagactgatgagtgggccctaaagcggctcggggtggaagacgaccttgagcttcttgagttgccaagggcgctggttcgtgccaccaactacttcggtaaggccgcagcgacggtgagtacgcttgatcgattcgacaagctcaaggcgctagtggcaaccatcgccgaaatgcacaagattggctgtgcacatactgacctgagcccaagctctgtctggttcgggtccggcgtaagacacaagctttccaatctcgctgcagcccgtattccatcatcggaaactctcggcccacagcgattccttctcattaataatgaacctggacaaacgaagctcggcgacccctatcagatggacgtggttgcattggcagcgatcggagacgcgcttctttcgaattccgacggaaccagagacgagcagcttgatgctgttttcagcctgctcgattgcatcaaaaacgatggaatagctgttggatccagtgaatttctcgcccagttaaaccaattggatcctcgcgctcactgtggcgccactgcgacgcaggagctagcagagcgcgcagtcaccgccaccaatccatatgtgaaatttccaatctcgggggcacctaagattcgcggggaacagcttacgtacgaatccagcacagaggggatcgcagtcgttgtcaaaatttggaactcagtcagcaactcctcatcggtagacaaggtcttctccgcgatgccagctcttctaaaggcgcgcgctatcatggagagtcagaatagggcattcgcccctgtcatcgattgcggcatcggccaaggcgcctcattcgtcgctcttcagcgcatctccggcgaggattggccgatacagcacggctctgcgcaggaagcattatccacttgccgcgaactaatcgctcaaattgggctggcccacgaggcaggtttcgcgcatggagatctctcgccatcgaacttgaagatggttcatcatgaaggccgcttgattccaaccttcatagacttcattcgagtggagctggatccgcgcatcccaaaggactgtactcaaggctactccccaattggagactgtgacgacttccagcgcgacgcgtatgcagtcgccaaaatgattgtcgaggcgctctcgaccgcgcctcaagatggcctgacaaaaaccgcacgcggggctattgaggccatactcgatgacggctggcgagatgcatctttacttttcgcaaagattaaagccgccctgcttcctgagccagtcatccaggattcgaccactatagttgatctgcccgtgggaaccctcgccgcaagaattgacctggagtctgacggtggctgctactacctaaagtattttcccccaaggcctccccaacagggaaccctaatcgtgaacgggcttaggcaagcactaaagctacccgttgataatgaaggattcgtggcagcaacgcatgggcgattgggggcgattgattcatccttgctgagccgcctaaggatgagaactccccgcggcgctctactcagagacgtacaaattcgcctagtcccgttggctgcagccgcagactcggagtctacaagtgctgtattggcaaagtgggctgcgagagccagacaacctgtggaggatctattgcccaagaccttcgaagcgactgcctcgttagctcgagttccgataagccggaaagacgcctggaatgttttcgtccaagcggagagtgaggctcgattccagcttcgcatcactggggcgccgtccgaagagtcctactgcgtggtatttccggtatccggctggcaggtccccgaagacatagcctccccgcgggtggtctacagggtgaaccgacacggcgatgaagttgagctgggcggacttctatttaatcggagcggaccgaaggagattgcagttgatggcattacgctgcaagaccttccggcttccagccttccattgcttgtgatccgagatcgccgcaatgagtccgcgagggataagaaggttgccgcagcgaagcgactggcctcagacgaaggagctcgtactggcctgctaagcaagttcgacgcactcgcagctcgcgaatacgacctcgggagcgcgacggcttccgccccactgatcagcaaagatgacattttgacctattcactgaatctcgaccagcagcaagcagtgttgggcgcactgaatggcgacggattgttcctgctgcaaggaccgccgggaacgggaaaaacgaaaacgatcgctgctttggtgcacatcatcgccacgaaacttggaagccggcgaatcctcgtcgcaagccaaacgcatgaagctgtgaacaatgcagcctcaaagatcgccgagacatttgaggaactaaattcgcccttggatctagttcgagtcggcaacgaggatgacgttgctgacgacctgctgtcggttcacacagccgcgctcagacgagacttcgtaagcttatttgcggccgagtcagattcaagacttcgccccataggtagagagattggattaagcagttcaatcattgaagagttgatggatgtacatcgctcagtcgttgacccactagtgagagctgtgtcatgggacaaaggagggtcttcagagcgggcccgagttcgtcccgatgaattgaggagacttgcccagtccgagttctctaagcgcttcccaggcagagaactggtggccgatgatattgcttccgcccgagctcagattgcaggcctggcatcagccacgtccggcggtgcgagccccgatcaatgccttcgtttcttgaatgtcatttccgcagctggcgacacgattcgtcgattaggtggcggagcatccgacggtgcatttggcgaatttcttgttaagaccagagccattgcatgcggtacatgtgtaggcataggaagctctgcgttcaagctcgcggacaaggttttcgattgggccattgtggacgaggcggcacgctgcactcccacggagcttgcggttgcaatccagtcggcaaggcgggttgtcctagttggagaccatcttcagctgccgcccttcatcggcccagaggtaaaggtcgcgctacagagaatcctcgacgccaaggatgtctcttcgtggtgcacgagcgacttcgaggaaatgttcgatagctccgaagaagggcgcacgaactgtgcatcactctggggtcagtaccgcatgatcgagccgatctcgagagttgtatcggacctcgcgtatgaagggaaactcgagtgcaagagggggagggcgcccgaatgggtttcggtgctcccaatgattgggcaggccgcagtgacgcttgtcgacacaagccactttggcccctccgaatccagaaagaatcaatactcaacaagctttcagaatcgaagggaggcaggctggatcgttgattggctcaaggctgtcgtatccgatccagaagcattcgagtccttatgcaagtccactctcgacgaggatcaggcagcagtcggaattatctgcgcatacgcagatcaagtcgatttgataaaagaacggatctacagcgagggtattgaagaagcctgcgctgcatttgtaaaaaccggcaccgtcgacagctatcaggggcgggagaattccattgtgcttgtctcgctggttcggagcaattccagccataacgtgggtcatgtcagtctatttcagcgaataaatgtggctttgtcgcgagcaagggatcgcctagttgtgcttggagactcagcgacctggctcgatcaagtaaactccaccttcttggcgggtcaggcgtggagatatatcaatgatcgagtcgatgaagacaactataaaattatctcagccagcggggataagtaa

SEQ ID NO: 505332 - DNA, 1473 bp, Stenotrophomonas maltophilia
atgaacacaccccacgatagtcatgcttatgatttagtcgtatcctatccggccatggaattttcggcgcgcgtcgcaaggcgcggcaagtactctgcaccaataatagacgagttggtaattagagttgttcacgccgcgggggaaatctccgtttcaagcattggagggctgctccgcctcacgggagcgcagcttgaatcgtttactgagccgatgctcaggtcgggtttgcttacctttacggaggaggggttgctcgccctagggccacaggggcgtcaggccatgatgcaggcttcgggcgatcctccgaagctctctagagtggaggaggcgacggagcaatgctcggtcgatgtgtttgagaatgctttttcattcaaaccttcagataggcgacttccagcacgacttcttgaagtgtcgccaaaggagagttgcgaccgagcggaaattcgcgagcgtgttcgagaaagactacttgaagactattttgatcatttgcagtatctcgaactgtatggcttgcgcgcttcctccccaaagcaaattgagtacgtgatcgacctagatgatggctggggggatcacgggcagctttcggctcgaattaccctcgatgatcgcggaatgccatcgcttgagtaccctgacctcatgtcagcagaacaattgcagaagcgtcgagcgatgcttgcacatgtcgagtcagcacttggtgcattgaaggcatcagtgcccgcgctgtcccagcagttctttcttgacgccgccagggcggcctcgtctgagctccagcaggacgcatctctcgatgcggctcgggaccgtgagtattgggcggacgacggagtgctcctcacaggacgactggagtcacggagtcgacaaacagctgatggatttgtggaccgtgtaatcgcggagtccggactcctccgtggcgacaaagaacggacaataaagtggctcgttgcactcatcccagagccggacctgtttattgctggtcgcgcatatcgagcattccttgagggaaccatcgcgcgacttcgccggcgctctcctcagcttaaagtgattgcagtgtccgcatgttcggacacaaggcgcctcgagaagacgctgggtccattgttcaacgctcgtgtttctggatactttagcgatcagaatctagcaggaatagatggcctatttattccggacgagctggcatacctggcgtgttccgatgtttccccagcccgaggcagcaccgcgttgccacgaccaaggtctctgattacaactgggcttgatgctgttcgcgagctctctcgacgagtgtttagagccccctcactctcaaaagtcaaggtcgacgggatttcggaatccgaatggcaagagatctccgcatccttaaggaggctaactgagcggaaagagagtcgcgtgctgaaacttagtaagacgaaggggaactag

SEQ ID NO: 505333 - DNA, 669 bp, Stenotrophomonas maltophilia
atggtcgccacgccctcccgggcgccgatcacctcccagcgcatgaatggataccctgcaccgcgccgtctgcggctcgcactgctagacgatcacgaagtcgtccgccgcggcaccgccttgcacctgtgccgcgacgtccgcttcaacattgtcgccagccacacccacagcgacgcgttcatcggctgcctgcgcaagctggcagtggatgtcgccatcatcgatctcaccctggcgcttggcgaccgcagcagtgatgagctggttcccttgctgcgggagcgctttcctcatgtgcccctgctggccttcgccacgctgacgccaacaacccgcgtggaccaccttctggcggccggcatcagcggcattgtcagcaaatccgagccgctggagatgctgtccgaggccatcgtgcgtgtatcgcagggattgtgccgcctgccggccgattgcctggtcccggcctgccgcgacgaactcagtcgcaatgaacgcgaagtgctggacctgctcctgtccggcctgaccgtgtcggagatcgcattgcgccgccaccgcagcgtcaagacggtcagcacccagaaggtggccgccctgcgcaagctcgagctgcgcaatgacgtggagatctatgcactgcgagagcagcggaacctccgatga

SEQ ID NO: 505334 - DNA, 2325 bp, Stenotrophomonas maltophilia
atgaggcgccgtgttcgcctccggttgcatacctttgtcacctcgttgatggtcctgatcctgctgccagcagcctcggccgaggatgcacatctgcaggcgtggccggcgggtcgcgaagtgcgggtcgccaccgcgccatcattgcgcccgctgcctgcaccactggcggactcgatcccgctcccgaccctcgcccacggctatgcgcagctcgtggctgaccattccggactgcgcttccgtgacatcgcctacaccagcacgagggcagcggtcactgccgtctgccggcacgaggccgatctggtgctggtgatgggccgcccggcgcatcgcccacggccctgccccggcctgatggcatccggcgccttcgatggcggcaagacggtcctggccgtgcgtaaaggcgagcacgcgccacgtgacgtcggcagcgtgaaggcgcaggtgctggccgtgattcgcggcggcccttatgccagctggctggcaacccaccatccgcaggtccgcctgctgcacttgcccgatcggcatgcagccctggccgccgtggacaacggcatcgccgatgctgcgatcggcctggaagctacactgcacgcgatgatccggcggcacttcgcgggcaaactgcagcttcatccgttcgagagcgacttctccaccgatctgcacctgctcgtgcgccgcgaggaccagcagctgctgaggcgcatcgaccaggcactgcacgacatcacgctcgaagagcacgcgggcctgctggcattgtgggcgcagcagatgctgcccgcccccgtcgagaacgcgcttgaccgggtgcgcgccctgcacctgccctggctgctgtatgtggccgcaatactcatcggcctgaccatgttctggcaggcactacgttggcgaatcggtcgcacggaacaacgccttgggcgcgcggcaggaatgatcagccacgaagtgcgcaattccgcgcagacgatactggcttcgatcgacctgctgagccagtcgcgcctgtgcaggagagagcacgacctgctcgcggccgcgcgtgccgccggccacgcgctgcgcaggctgctcgaccgctcgctcgcgttctcgcgtctggccagcggcagcttcaggccccacgtcgtaccttgcgacgtcggccagctctgtgcccatgcactggacgcgatccggccggaggcactgcgcaggggattgtccctcaagcttgattgcacgcccgaccccgcgccgacggtcgcactcgatgctgacgggctgcgccagattgtcgacaacctgctgggcaacgcgttgaagttcactgatgccggtggcatcgaagtgcgcctgcagctgtcacccatcccgtctgccagggagctgttgctggatgtgatcgacagcggcatcggtatcgcccccgcgcaactgccgctactgttccgcccgttccagcagggagaggatggccagaagcgcggcggcactggcctgggcctgacgattgcgcgcgagctggccattgccatgggcggcaacctggccgcgtacagcgtacatgggcgcggcagtcgcttcaccctgcgactgccggtccgcgctgtccctcgcgatccgcccaccatcgagcgcccgcagcaggcgccgttgacgggcacagagctgctcctggtcgaggaccatgcactcagccggcgcgtcgtggcagagcaactgcgtcggctgggtgccgatgtgtgcgcggttgccgatgcggaaaccgcgttggccgaacaggcgctgcgaccgcgcggcacggtggtgctggatatcgggctccacggccgggacggctacggcttggcacagcagctgcgcgcgcgggcaaaggcgcccctgcgagtgattgccctgtccgcccgcatggggcgccggcacgtggcgcactgtcgccgggccggattcgacgccgtcctggtcaagccgctgcaggtggcagacttgctgcaggcgctgggccttccgccttcggcgcacgctgccgcgccttgtagcgcgcgcggcgccgacccggatttcgctgcggatatcgcccatgagctggccgggatcgaacagtccctgcaggacgccgatgccgcgacattgcgccatcatgcgcaccgcctgcagggcacgttgcagatgtgccgggcaatcgaccaggccggcaccgcggccgccctgtgggagttggggcagcaggccacgcccgactgggtcgaggcatggcgactgctgcagggattgcagcagtggcacggctcccgcaaggcggaagccgtgccttcaagctga

SEQ ID NO: 505335 - DNA, 1176 bp, Stenotrophomonas maltophilia
atggatcgtgagcgctcggcccttcatcgtaaagggccgattccggttcagatcagcccgatgaccagcgccgccctctgcctttcactcgctttgcagctcccggttgcttcagaaccgcttgccgtagatcccgactccctgctcgcccttcaccaagcgctccagtccttcggcgaatttcaacagccctactccgcacctgtagatgtgaccgatcctgatgcaggtatgaccgatgcaactgtcgagatctccgccgggtgtgtgaaggatggtccacaggtcatcatcctggacgcggatgtagacgaggcacccgagcgctatctggtgctgaacgagccgtggcaaagcctttcggcgggaacattgttgctcgtctctggaaacacagcggccatcatctcaactcaggaggcgaacaaggaagccacacaggccgagcgaatgctgacattcctgggttatctgccattcgacgccgggaggaatgcgttggtggaaccaggcatcgaagcgcaggaatcaagctttgaaaccagggcgttcatggagagcttcagtgcgagctcccggggcgaggcgctctccgaggcggctcttgccgcatggaagggcgtgctgcccgacctgctgctggcgctgtggcgacgcgacgggttcgcacgctatcgcgacgacaggctcatcttggtcgatccgcacctgtactcaggggttgtcgcagccttcctgcagggcactccgatggagggtgctgatcggttccatgcctatgcggtgacacctttcggccagatgttcttgtgtggagagaacacctccatgcatatcagcatcgacccgcacagcggacaggtttgggcggactcggatgtagcagccactgccgacgcgactgaacgcacctggaaactggagttcctgctgcacgtcctggacgcgcccgatctcgatgccaccgacgatgacgagcagcccctgtacgcacgcgcactcgatttactgggccacctggctcccaacgagatctacagcttctcaccctcggttgttgaaggtggctggcaggcagcgcacctggtcaagcgggatcgtctcgctgaattgaagtcactcgccaagcagacagcagcaagacggtccttgcggtctgatgctgaagacaggtaa

SEQ ID NO: 505336 - DNA, 1146 bp, Stenotrophomonas maltophilia
atgcccgccccgctcgccagcagcgccaacgcgcaggcacagactgccggcggcgctgcagcgcgcgcgccacgcagcgaggccagcaaggatttcagccaactgttgcagggcggcgcgccggacacgctcgccggcgccgccacgtcaccgcccacctcggcaccgaagccgcagacgagcgccgatggaaatggccaggcgccggaggaacgcagcatggatgcggcggcgacgggaaacgagacgtcgcccttgccgccgcaaactccgcctgcgggtgatcgggcgacggacaaggacacgccggtggccaccgaggacgcgccgtggccgccgctgggcctggccggcctggtcctggcgatgccggccccctccgatcctgccgccactgctcctgctgcaacgggtgcgggcacggcgctgccggccactgccggaccgggactgcctgccccgacgccgaccccggcgccgggcgcagccgtcgcatcgatggctgacagcacgccgccggccgccagcgccggcgatgccacgaccctgccactaccggagacggtcctgccgggcagcaagcatggcgaccgcgacagcaacgacgtgaccgcgatcggcgaccgtagcgctgccccattcctgcacgccccggccccggcgctcctgcaggacctcaaggctgcgctcgctaccggcactgcggtcttcaacggcgaaccgacgcccaggcccgtgttcggcgacgatggtttcgaccaggccattggcgcgcgcctgggctggctggccgaccagaagatcggccacgcccacatccgcctgagcccggacgacatgggcccggtggatgtgcgcctgcaactgaacggcgacaaggtgcacgccagtttcagcagcccgcatgtggacgtgcgccaggcactggaaagcagcctgccgcgcctgcgcgaactgctgggcgaacagggcttccagctggcccacgccgatgtcggccagcaggccccggggggtgacggcaatgcgtcggggcggcccggtggcggcggtctgcccggcgacggagaaccgacgccgggcgatggcagcgtgtcgtcggcgcagctgatccgccagcgcggattgctggacgcttacgcctga

SEQ ID NO: 505337 - DNA, 462 bp, Stenotrophomonas maltophilia
atgtccgggccggcatgcatctgtgccatcagctgcgtctgctcgctgaaacggcgcagcattgcggtcatttcggccgtggccgtaagcatcctgccggcttcgtccctgctggtggcctgggtgctgacgctgagatcgccgcgggcgaccgcctggatggcatgcacggccttgcccagcgggccggtgaccgcgcgcgagatgacgatggccagcgcggcggccaccagcgacagcaggatgatgcagccgatgatggcgatcatgctgttgcgatgggtggcgttggcgtcggcgatcttgccgtccatctgcccggcgatatgggcgcccagtgccttcatcgcagcgaacaggtcgcggcgcgccgggcgtgactgctcgtcggagatctgccgcgccaggacgccgtcaccggcggtcacggcgtcgcgcatcgccttgttggcggcgaagtag

SEQ ID NO: 505338 - DNA, 690 bp, Stenotrophomonas maltophilia
atgatcatcgctactgccggcggcttcttccgccacctggatgcggacaagtgggtggatatcggcaaggccaccctcgagacgctgctgatgatggccggctcgctgccgcttaccctggccatcggcctgccgatgggcgtgctgctgtacgtgttcggcgcgccgcagatgaaacgccggccactggcctatggcgcgctggcgatcgtggtgaacctgctgcgttcggtacccttcatcatcctgatggtggtgttgatcccggtgtcgctgtggttgatgggccagtcgatcggcgtgctcggcacgttgccggcgctggtcatcggtgcggcgccgttctacgcgcgcctggtggaaaccgcgctgcgcgaagtggaccgcggcgtggtcgaggccgcgcagtcgatgggtgccaccacctggcaactggtcacccgggtgctgcttcccgaggcgcggccgggcctgattgccgccgccacggtcactaccgttgctctggttggcttcactgccatgggcggcgcgatcggttccggcggcctgggcgacctggcgctgcgcgaaggctaccagcgcaaccgcaccgacgtggccctggttaccgtggtggtgctgctgatcctggtgcagctgctgcagatgctcggcgaccgcctggtcgcgcactacacccgcaagtag

SEQ ID NO: 505339 - DNA, 528 bp, Stenotrophomonas maltophilia
atggaacccaaggacgatgatccatttgatgggcgtagccgcgaggagcaacgctggctggatgaacacggctatccgaataccgcgcagtgggcttcctattccagcgcgcccgatgcgttgctggaacaagccgcccacggcggcgacaagcttgcgcgcaccatgctggactcgcgaaagctgcccgatcgaaccgccttggaccggatgatgtcgtccgcagtggacggcaactactttgcactgcaactgcttgcgactcatttcgcatccaccggtcgagcgggaaacatcaacgcatacgcggtttcgcgcgtcctggagatgcgcgcagacccttccgccgcgcttggcagggaaatcatgttctctgcatcgctcactatcgaagagcggatgcagggggaggccgaagcgcttcgtctgaatgccacattcaaccagctctaccaggaacgaaccggcgtcccgttcgttcccgattaccgcccgttccccgttgacaactcgcaaggatggcaatga

SEQ ID NO: 505340 - DNA, 513 bp, Stenotrophomonas maltophilia
atgaaacctgcaagtaaattcgtcctggccaccgctgctttcaccgttaccggtgttgctctggcctgcaccgttcttccaatgctcccgttctcgatatcggtcgacctgaaggatatcgcggcggccaagcaagccggtgcctcatccgcagatgcgcccaaccgggcattcctgaagaagctggatgagaccgctgaaaggacgttcggtgcggatgcatggcgcaacacgtccttcgtcggcaacgtcatgtacaaaacaaaaatcatgatgatgaccggctcaagcatgatcaccgtcagcaagccgtgcgggaagtcggcagaagagtcaggcggcaccgaggacagcttcgcctcgacgcccccgtctggcggtggtggtggtggcagcactggcggtggtggcgggatcggcggctggttccccggtggtggcgggtgcttcggcaactgtcagccgccgccgcccggtcgcgttggtcctatcgagaatctgccacgatcctga

SEQ ID NO: 505341 - DNA, 213 bp, Stenotrophomonas maltophilia
atgcgcatcctggtcctgtccacgtccctgctggccaccgtgctgctgtccgcctgccagcgcccgccaacgccgaacccggagaagccaccggtgcccaaggcgatggcgcgcgcgatgcaggagccgctggaccgcgccaagggcgcgcagaaatccgtcgatgacgccgctgcgggcgagcgcaaggccgaggccgacgcgacgcagtga

SEQ ID NO: 505342 - DNA, 312 bp, Stenotrophomonas maltophilia
atgaaagaactgatcattccagaagccgcacagcgcgatgaggattccatcgagatgatccgcgtgtggattgccgaacggggattgcatgcttcgctgaacgttggcctgtatggcgatcgtcctggcattcgagaggagcatgcgtggggacgcatcctggcagacgtcgcccagcatgtcgcagatgctctggtcgtgagtggcgggatggaccgcggcgcggcgatcaacgcgatcaaggatgcattcgatgaagagctgcgggcgccgtccagtgggcgctcggggggattcgtggtccgccactga

SEQ ID NO: 505343 - DNA, 267 bp, Stenotrophomonas maltophilia
atgaagcgcccagagatcgatgccattgccgaagcggtgttgcagccgggtgcacgacgtctgtgcatcgctgcacgccatcgccaggcggcacatcggcagcgacgtcagcgggtgggagccggcgccagtctgatcggcatggcggcgggcctgctgcttgcgccgatcacggagctgccgtgggtacagggcatgatcgcgggaggtgcgctggccctgctggcggcccacctgtggctgcagcggcgcgaggaccgcgcgtag

SEQ ID NO: 505344 - DNA, 771 bp, Stenotrophomonas maltophilia
atgtccgagccgaacccaccccgccgccccctggccaccttcctgcgcaagaccccggaaggtgaggttgcgcctgcgtccgatccgcgcatgcaggatcaaaccgggcagacaacgcctgtggagcaggtgcaggccgggcccagcaatctggcgcaaccaccggccacacaaatgcgacacgacgatgacgctgtcatcgttgctgaagctgcagccatcgaaccggcgctggccgcggtgcaggcaacggcggtcaccagcgatgcccccagcttcctcggcagcgcacgccagcgcacgctgccagccccccgctggcactggctgctggtcgccgggctggcgttgttgctggtcctgcagagtgtgctggccgaccgtgcgcggctggctgccgacgccggcaaccgcgtatggctgggtgcactgtgtggcgtgctgcgctgcagcctgcccgcctggcacgagcccgctgcgttcaccatgaccagccgcgagatccgccccttgccaggccaggccggcgtgctgcaggtgcaggccagcatccgcaatgatgcgcgctgggcacaggcgtggccggacctgcggctgtcattgtccgatgccgatggccgggtgatcggcagcggcgtgttcacgcccgcgcaatacctgggtgagaaccccggcgcagccctgctggaaccgggccagagcgcgcgcgtcgcgttccgggtacaggagcccgctgcgtccaccgtcgcattcaccttcgactttctctga

SEQ ID NO: 505345 - DNA, 2307 bp, Stenotrophomonas maltophilia
atggacatctggaactgggtcgaaaagctgcagggtgacctgcgccaggccggccaggcgcagaacgcgcacctgctgaaccgtctcgccgacgaggtcagtgaactgcagatcgaccgcgtcgatgcgctgctgcccgaagcgcgcgcattgggcaaggcgttggacaacccgtgggttgacgtctatgtcggccactgggcgctgcgcaaccgcgtcggcaaccgcgtggaaggcgaaagcgcactcggcgaagccgtagcgctgtttgaacgcgcgcaccgcgaggacacgctggaatgcccgcagtcgatctgcgtgacccaggacctggccgcctgctacggcaacatcgatggcccgggctgggtgcccgagcgcatcgaggtctgcgatgaaacactgggtcgcatcgacccgagctgggcctgtttccagtgcctgagctgcgagaaggccgatgcgctgcttgatgatggccgtggccaggcggcactggattacctgcaggtgcaggccgatgccgtggaggcctgtggcaaggaagtgttcgacagcttcccggagatgcagatcaagatcctgctgggcatgggccgtgccgatgaggcactggcgctgatcgaaaagcgggaggccgaagttgctgcgtccggagagtacgagccggccaactgcacggtgccgcgccgcctgtccaaggcctgggcgctggcccagctgggccgcgacgaagaggcgctgcagcagctggtgccgtggagcgaactgaccccgaactactggcggctgtgggcaaacaccgcggcagcgctctgtcagcgggatcctgcgcgcaacagctgggacctgggcacgcgcttcaacacgatcatcgagcacttcgcccgggttggttcgcatcgcctgctgatcgaagtcgcggcgctgagcctggagctggcgctgcagcgtggcgcgcgctgggtcgcactgcggcagctggaactggcccgcacccatctggcgcagctgcgccaggaccgtggtgccgcggccctggtggcaggcctggccgcgcgcatcgaggcattgccggacgtcgcgccgctgccggtgccggcgggcgagctgctggcatggctggacgcgcagggcgaacagaaccagtcgcgcgatcccgagcgcgaagcgcagtggttgctgcaggcgcatgccgagctgcccgatgacgaggcgctggccgacatggccgcctcggcactgaatgcctgcggcgcgcaggccgaggcgcgggcgctgctgtggcggttcgtgcgcggccatgcgcagcacgatggccccgcggcctacacgctgatgcgctggctggccgaacagggcgacgacgacggactgcgccagctggccgatctctatcgcggcagcgtgccggtgttcgcgcactggtgcgaggtgcagcgtgcacgccgcgtgtccgactggccggcgctggagcaggcggcccgatcgcttctggagctgtctccgggctcgcacggcgcgcgcggcacgctggcgcgtatgtacatggaaaccggccgtttcagcgacgcccaggcctgttatgcacagctggtggagctgctggaggagcccaatgccgcgcattgggaccacatgagcgcagccagcgcggcgcgcgactgggacgccgtgcgccgctcggcggcggcgcttggcatggaattgtccagccaggaaggtgtggtcgaggagccatggggctgggtgatcatccgcagcgaagaaaacggcgagccgatggagtactacgcccgtcgcagcggtccggtgaccgcgcgcatcgtcgagaacgcgccgtccaaccgcgcccagcaagtgggcgactgggtggtgttcgatgccgcgctggtgcatccggcacccgaggaggaggaagcgcgcgagcatttcatcccgacctactcgcaggtgcatgtgctggagcgcggcggcttcgcccgcagctggatgatcgatggcgcgcacccgggcgaagaggcgtggaatgccttcgtcgaggcggccgaagcacagggctggaaggtgtggtcacacagtcgaccggactacaccgtcaccgatcccgatagggaggagggcacgctgccgggcctgctgttcacggtggcccagccgcaggaccatgcaccgctggcactgcaccgcttcctccagcagcagaccgcgacgtggccgcatccgcattgctggctgcggcttgccgaggcctgtgaccaggaccgccagccgcacctggacgtgatcgagcgttacgggctgtaa

SEQ ID NO: 505346 - DNA, 1377 bp, Stenotrophomonas maltophilia
atggcaaaagcccgcaccgcctacgtctgcaatgaatgcggcgccgaattcagcaagtggcaggggcagtgcaccgagtgcaacgcctggaactcgttgtcggagatcgtgctggagagcgcggcggcggccaaggcgccggcctcgcggcgggccggctgggccgggaagatcgacccgccgaagatcaccgcgctgaaagacgtggagcagaccgagcatcgccgggtctccaccggcatcggcgagttcgaccgcgtgctgggcggcggcctggtcgaaggcgcggtggtgctggtgggcggcgacccgggcatcggtaagtcgacgctactgctgcaggcggtggcgaagatggccgctgaactgccagtgctgtacgtcaccggcgaggagtcgctggcccaggtggctggccgtgcgcatcgcctggagctgccgctggacggcgtcaatgcgctggccgagaccggcgtcgagtcgatcctgcagcacgcggccaaggccggcccgcggctgatcgtggccgactcggtgcagaccctgtggaccgaaacgctgaccgcggcgcccggctccgtaagccaggtgcgcgagagcgcggcacggctggtgcgctttgccaaggaaaccggcactgcggtgttcctggtcggccacgtcaccaaggagggcggcatcgccggcccgcgcgtgctggagcacatggttgatgcggtgctgtacttcgaaggcgagagcggcagccgcttccgcctgttgcgcgccttcaagaaccggtttggtgcggtgaacgaactgggcgtgttcgcgatgggggacaagggcctgaaggaagtctccaatccatcggccatcttcctgtccggcggcagcacccatcagccgggcagctgcgtgatggtcacccgcgagggcacgaggcccctgctggtggaggtgcaggcgctggtcgatgcatcgccgctgtcgaacccgcgccgtgtcgcggtcggcctggagcagaaccgcctggcgatgctgctggcggtgctgcatcggcacggcggcgtgctggtcggcgaccaggacgtgttcgtcaacgtggtcggcggcatccgcgtgcaggagaccgccgccgacctgccggtgctgctggcggtgctgtcgtcgctgcaggatcggccgctggcggagaagaccatcgccttcggcgaggtgggcctgtccggcgagatccgcccggtgcccaatggcgaggaccgcctgcgcgaggcggccacccatggtttcaagcgcgccatcgtgcccaaggccaacgcgcccaagggcggctcggtgaaaggcatggaagtgatcgcggtggagcggctgtccgaggctatcgacgcggcatga

SEQ ID NO: 505347 - DNA, 636 bp, Stenotrophomonas maltophilia
atggacaagatcgacttcaagaagcgcgaccgggcgctgtaccagcccccggcaggccggttcgtccaagtggaggtgccgccgttgccctacctgatgatcgacggccgcggcgacccgaataccgccccggcttacctgcagtcggtgcagtggctgtatgcagtgagctatgcactgaagttcgcgctgaaggccgagggccgggactacgtagtgccgccgctggaagcgctttggaccgccgacgacccggcgagctttgtggcacgccgcaaggacgagtggtcgtggacggtgatgatccgtacgccggatgggatcagcccagggcaactggagaccgccatcgccaaggcgacgaagaagctgggcgagacaccggctggccttcgtcatagggtgcttgaggaaggcctctgcctgcagaccctgcatgtgggcgcctacgatgacgaaggcccgatcctggctcatctgcacgacgaactgatgccttcgctgggctacacctttgccggcccccaccatgagatctacctgagtgatccgcgaaagaccgacgcggagagattgaagaccgtgctgcggcaaccggtgcgggcggttgggcctgacgagggttctcgcgcatga

SEQ ID NO: 505348 - DNA, 708 bp, Stenotrophomonas maltophilia
atgaagcggtcgccttccacacccgtggtattttccgccgtgctgctggtgctggccggcgccgccgttgccggtggtgcgctgcagacgataggcgaaacactggggcattcggtgcaggctgaccgcgcgaccgcgccgatcaccatgccgccatcgcgcgagaggcccgcttcgctcgccccgattcccgaaccgcgatcaatgccggttcccgaacgcagcaaccggttgttcgatgcggactacctgctggccgcccgccaggcactggaacagatgcctgcactggccgggcaccggttgacggtgttccacagcatccacttctacgacgatggccgcatcaacctggacctcgtcaacccgcagcaaccaacgcacgtggacagctaccacttcgagcacggccagtggcgcaagggcaatccagtgaacccacaacagttcgcccccaccatcagcctacagcgcagcagcacgcctctggccaacattgatttcgaggcagtaccgcgtgtggcgcaggcgctgcaggtacagcgcagtgcattgatgggcacaccgggtgacgtcagccacgtctatgtgatcgtgcgcaagggcggcaagctggtatggctgccggatgaagtcgccggtgatcgcgagtccgtgcgactctcgttcgacgctcagggccgttccggcaacgtgagccaccgatag

SEQ ID NO: 505349 - DNA, 516 bp, Stenotrophomonas maltophilia
atggcagacgcaccattgatcacgatgatgcgtgccctcctcgttgcagcgggcgcgatgctgtgcctgctgctgggtataggcaacgtcaacgcccacagcgggttcggcaccgcggtgatcgaggatcgggaaggaataccttgtttcggcctgccgccgcgggcactggaatgggtccgatcgccccgtatcctgcaagcggtgatcgtgtatcaccacgacacggtgaaggcatggtcgttcatgtacgacctgactcccgtagagcctttggcaccgggccagtgcatcgtctacggcgatctgccagcctcggccacgctgcgcacttctccacagccattgattcctgcaaccttgtacgaggtctacctcaacgctcccaccaatggcccaatcaggggctacacggcgaagttctgcctgaaagctgcgcctgacggatcgactcgggtgatccccatcaggtacgacaagcggacgggttggagcgcagctgtctgccaaccctga

SEQ ID NO: 505350 - DNA, 618 bp, Stenotrophomonas maltophilia
atgctggtctggctgtcggcccacgccgactggcgggccgacgtggctgcgcaggaaccgcgcctggcagcgtggttcgcgcagggtctgccggccatggtggcgcgccgcgccgcggatgaccccgacccgcgcctgcgcttgggcgtgccgctgccaccgggcgaaggcaagctgcgccttgcgctgcgcgtgccgcagcaggatgtgcagcgcctgcaattgccgcccgcactggacgcggtactcacccggggcgtgccaaccgactggcagcgggccctgcacgcactggcgagcgttgcaccggcacgcgtgttcggcgccttcgcctggcagcacctcagcggcctgccctatgtgcacgcatgctcggacatcgacctgctgtggcaggttgagagccttacgcaggccgatgcgcttgccgcacgcctgaacgcctgggagcacgcgcatgcccgccgggtcgatggtgaactgtgcctgcctgatggcggcgcggtgaactggcgcgagtttgccggtgacagccgccaggtgctggtgaagcgcctggcgggtgctgcactggacgtccgcgagcgcctgttcgagactgccggagcggcggcgtga

SEQ ID NO: 505351 - DNA, 858 bp, Stenotrophomonas maltophilia
gtgagcgcggtcttccagtcccggctgcaggatgcaaacgcgatcgacagcgcgcgtctgggccgcttggccatcaccagcctgcatgccgaactggcctgcgcgcccaagccagggctggtcacccccttcgataccggcagccatgacgacatggacgccggtacgttcctgcgcagcctgttctcgctgcgccacttcttcaccgcgattgccgacgccggtgccgctgacgcgccgttcgccatcctgcgcgcgcacggtatcgccgccgagcacgcgatgctgcgcgccactggcggtatcaatacccaccgcggcgccatcttcagcctgggcctgctggtcgccgctgccgcacgctgccgccgccagcagggccacgccgcgccggccgcgcaggtctgtctggccgtgcagcactgggctgatgcgttcgccacggcaccgctggatgcctccagccccggccagcgcgcgcgcgtgcgccacggcgtaccgggcgtgcgcgaacaggccgccgccggttaccccgtgttgcgcgacttggccgtaccgaccctgcgccacgccctgcacaccggcctgccgcgtgacgcggcgatgtgccagaccttgatgcagttggtcgcgcacgtggacgatctcaaccttctgcaccgtggtggcgccgacggcctggcctgggcgcagcaggaggcgcgccgcttcatcgaagcgggcggtgccttcgcacccggctggcagttacgcctgcaccgcgtgggtgagggcttcatcgcgcgccgcctgagtcccggtggcagcgccgacctgctggcctgcagctggttcctgctgctgcaggagggcgcatga

SEQ ID NO: 505352 - DNA, 333 bp, Stenotrophomonas maltophilia
atgctgatcgccgcccttctgctggtcctgctggtgctgggcctgaacgccgtggctaccgtggtgatcgccaagcgtgatggcctgtcgacgggcggccggacggtgcagctgctgatggtctggctgcttcccctggtcggggccatcgtgtgcctggcggtggccacggccgacggctccgggatccggggcgacaacagtcccggcagtggctacgatcatccgggcggccattccggcgacagctacagccatcacagccacagcagcttcgactgcagcagcgacggtggcagcggtgacggtggcagctgcggtggtggcgattga

SEQ ID NO: 505353 - DNA, 771 bp, Stenotrophomonas maltophilia
atggctgagtcgctggccatcgtgcaacggcgctgggccgatcatgtacgggacccgtcgatgcctgcgcccgatggcgtcgaggcacggcggatggcggtctaccgccgcctgtgcatcgacagcctggacacccttttggcaggcagcctgccgcgactgctggaacagctgggcgaagcgcgctggcgcggtctggtcgagcactactacgcacatcacgtctgccataccccgttgttcccgcagatcgcaagcgagttcgctgcgtggctggctgtgcagtatgcgttcgcgctgcccggctgggcggcggaactggcgcactacgaaagcatgcagcagacgctgcacatcgaggcacgtgatgccgggcattcattgcagtccatgccggcgggcagcgatgtgctggcgctgtcgccgctggtgcgggtattgggctaccggtggccggtgcatgaggacgccgcgctggacgatgccgccgccagcgagccgacgcttctgctgctgcgccgcctggcggactaccagctgcaggtcgaggaactggcaccactggcgtatgcgctgctgtcggccttcgctgatgacggtacccacgtggatgacgcgctgaacgcactggccgatgcgcatggcgtggccgccgacgaactgcgcgtggtggccacgcccttgctgggcgaactatgcgcggccggcgtgctggtcacgctggccgggttctgcgactgccggccagcggccggcactacccctgtctga

SEQ ID NO: 505354 - DNA, 876 bp, Stenotrophomonas maltophilia
atggccgtcctccgttacctgcagctcgatgtcttcgccgcccgccccggcaccggcaacccgctgggcgccatcctggacgccgacgggctctccagccgccagatgcaggccctggctacctggctgaacctctccgagacggtgttcttcctacgccccaccgcgcccggcgccgattaccacatccgcatcttcactccgacccgcgagctggcgtttgccggccaccccagcgtcggcgccgcctgggcggcggtgacctgcggcctggcccagcctcgcgacggcgccctgctgcagcagtgcgtggcagggttgctgccagtacgggtgagcggcccggccgaggcactggagatccagctggccagcccgccggcacggcaactggacacggccgcggacggagcacccgaaacactgctggccctcgccgccaacgggcacgtgcccgaactctgggacaacggcgcgcgctggtggctgttgccgctacgcgacgccgccgccgtacgcgggctggcaccggacatggccgcgctggccgcctggagtctcgccaccgacgctacaggcctggtcgtcttcgccgacgaggccagctccgaccacacccgcgtggtgcgtgccttctgccccgctgatgcgcccgccgtgcccgaggatccagtgaccggcagtgccaatgcgctgataggcgcctggctgcggcagcggaatgccctgcccggccgcgagggccgctacgtggccagccagggccgcgaagtgggccgcgatggccgcgtgcaggtgcaggtcgacgcgcagggcacggtgtggatcggcggccaggtgcagccggtcatcgacggccagatccgttggctgtag

SEQ ID NO: 505355 - DNA, 549 bp, Stenotrophomonas maltophilia
atgcgcaggttcctgatactgatcgcaccactggtgctgctggcctgctccaggccgccatcgcaatccgacgcagcggatgccgcaccgccggtagcggccagcacgactgccagcacgaagccacggaccgccgcagcaagcgatgcagcggctgcgcgggccatcgatgtcgatcccctgtttgccgccgtcgcggccgacgccgagctgcccgcggccatgctcaacgcgtatgtcatggccctgctcaatcgcgatcgcaaggccgccgacgccgcgtggactttcccgcccagcgatgcccggcgcgctgacgatgccgcattgcgccagctgacggacgtacgcagcctgcgcctgaccagcgagctgccgatcgcgcgcgacggccaccagccgcctcagctgctggaggttccggtgcggatccgcgcggtgactcctgagggcaccttccgcttcggcggctggtaccgggtgcaacccagcgccgacggcagcgcctggcagatccagtcggcacaactgcggccatcgctggactga

SEQ ID NO: 505356 - DNA, 195 bp, Stenotrophomonas maltophilia
atggtatccgaggcgggtgccgacaggtcactgcatactggacggcgcctgtacaccggccccaatacctacgtgcagtcgagcggcgggacctactgcgccagtctctacattgtcagggcctgcaacgccggtggctgttcggcatggtccgcagacttccccgtcacccgcggcttattgaattgggactaa

SEQ ID NO: 505357 - DNA, 306 bp, Stenotrophomonas maltophilia
atgcagtctggcctcatttcatatccgcgcgccgtaatggctgccaagtgtctgcttctcggtgtcgttgccctgtgcgtgctggcaccggtcggcgtttccgcccagatcgttcccacctggcggcaggagtacgacaagcgactgaagtacggggaccttgtcgagccgctgaagggcgagatcttcggcgagcaggtcaacctctatgacggttcgatcagcttcaaggccacggatgtttcgattccgggcaatggcagcctgacgatgaccttgggccgcagctatccgccgatccaatag

SEQ ID NO: 505358 - DNA, 696 bp, Stenotrophomonas maltophilia
atgcgcgcgctgctgatcctgcttgcactgctggcgcagccggctgcggcgcttgaggtgttgcctaccaccctgcagctgccggccgaaggcggccgcgccgagctgtggctacgcaatcccgggcccggccgctggcagggccacgtgcaggtgctggcctgggatcagcagctggacgccgaacgactgcagcccagcgaccagatccgggtcagcccggcgcggctggatctcgccccgggcggtacgcagcgcgtctggctgctgccacgcgatccggccgcggcaatgggtgaacaggcctacaggatcgtgctgacgccggcgctggcagggctgccgcgctactcgctaccgctgttccggggcgccgcggcgccagtgctgcacgcccgcctgcagggtcggatcgaggccctggggtcgcagcctgcgttgcgactcagcaactgcggtacgctgcacggccgcctgcacgacctgcgtttcatcgcggcggacggccaatcgacagtgctggtgggcgggctggccggctacatcctcgccggccatgaacgacgctggcccctgcccgcccgcgcggacagttacgcaggtggccgcttccgggcacgcctgcaggacggccgcgaggtcgatctggccgcatctgaccccgcaattgcagcgagcgcccgcagcgggctataa

SEQ ID NO: 505359 - DNA, 216 bp, Stenotrophomonas maltophilia
atgctggtcgccagtacaccggccttggccgaacccagcagctccctgcagatccggctgaccgtggtcgactcctgcagcgacgacaccggtggcgcgcgctgtacggcgccgcaccagcgcagcgatacaccccagctgccatcccaggtgcgcgagctcgcaccaccggcgacggacgagaacgcaacacccgccgtgaccctcatctactga

SEQ ID NO: 505360 - DNA, 357 bp, Stenotrophomonas maltophilia
atgagcagttccaacaagaccctgtccctgctgactgctaccgccctggccgccggccttggcatcaccgccaatgcctcggcgctgagcatgagcgacctggcccagggctatctggtggctggccaggctgccaaggccagcaccgatgccaagggcgccgaagccaagacctccgcagaggccgccaagcatgcagaaggcaagtgtggcgcagatggcaagtccgccgaaggcaagtgcggcgccgacaagggcaaggctgccggtgcggcagcaggcgccaaggctcaggccggcgacaagaaggccgccgaaggcaagtgtggcgaaggcaagtgcggtggcaagcactga

SEQ ID NO: 505361 - DNA, 2199 bp, Stenotrophomonas maltophilia
atggcaatgccgctcaacctccctcgtccctctctgctggccctggccgtgaccgcactgatgatcgctccgctggcacacgccgacggcaccgctgaatcttccgcgcgcacgctggacaccgtgaaggtgatcgccgatggcgagattccgaacagctacacggtgaggaacgcgcgcagcgcgaccaggctggacctgtcgttgcgcgagacgccacagtcggtgaccgtgatcacccgccagcgcctggacgacatgggcctgttctcgctgtcggacgtgatgggccaggtgaccggcgtcagcgtgtcggtcaccgacagcgagcgcatcaactatgtttcgcgcggctacaccatcgacaatttccagatcgacggcatgctcaacacgttcggtggctcggtcaagaccaacgccgacagcgtgatctacgagcgtatcgaggtgatccgtggcgccaccggcctgaccaccggcgccggcgatccctccggcaccatcagcatgatccgcaagcgccccaccgacaccttccagatgggcgccaacctcaccgtgggacgctggggcaaccgccgcctggaagccgatctcggtggtccggttgcctgggacggccgcatccgtgcgcgcgtggtcgcggccaagcagcagagcgattcattccgtgatgtctattcgctcgacaaggatgtgttctacggcatcgtgcaggccgacctgagcgacagcacgctgttcgaagtgggctacgaataccagtcgccgcgtaccaccggcgtgacctggggcgtggtgccgtactggggcgccgatggcacgccagccaacctgcctcgctcgaccaacctgtcggcctcgtggagcgcctggccgatcgtggagaagaccagcttcgcgcggctggagcagcagctcggcaacggctggtcggtgaagggcaatatcagccacgccgtgcgtgataccgacggcagcgtctggtacggcgccgccggcaatccgcgtgccgatggaaccggcgtcaccgcctacatctctcacttcaacgagcacagcacgatggacgtgttcgacgtcaacgtcggcggcccgttccagctgttcggtcgcgagcacgaactggtgttcggcctgggccagtcggtgcgcaagggcgagtcggaaggcatggacttcgactacgacgatgcctatgccgtggtgtcggactggcgccactggaccggcaatgtgccggtgctgccggtgacccgcctgggcaggctgtcttcgcagaatgaactgcgccagcgcgcagcctacgttgccgcgcggctgcgcctggccgacccgctgctggcggtggcaggcgcgcgctacggcagctgggaaacccgcagctgggcctatggctacgatgccaatggcaaccgcaatcgcaccacccgcaccggctacaggccggacgacatgctcaccccgtatgccggcctggtcttcgacttcaattcgatcttcagcggctatgtcagctacaccgacatcttcaagccgcagaactaccgcgaccgcaatggcaactacctggagccggtggtcggcaacatgtacgaagcaggcgtcaaggccgagttcttcggcggcctgctcaatgcctcggccgccgtgttcgagggcaagcaggacaacgtcgccgagatcgatgattcggtgccggtcaactcgctgcccgacggcagccaggcctaccgctccaccggcaagggcaacaaggtcaagggctgggagatcgaaacccagggcagcatcggcgagcagtggaacgtctcggccggtttcgcccacaccgtcatccgcaacaaggacggcgtgctgcagcggaccaccgccccgcaggataccttccggctcaacaccagctggcgccctggcggtatcgacggccgcttctggctgggtggtggcgtgacctggcagagcagcatctggaacaccagcaccaaacccgaccgcagcaaggccaggatcacccaggacgccttctacctggtcaacctcgccggcggctaccgcttcaacgagaacttcagcgcccagctgaacatcaacaacctgctggacaagaagtatttcaacaacgtcggtttctacaacggcgtgtactggggcgaaccacgcaatgtcaccgtgacgctgcgctggaagctctga

SEQ ID NO: 505362 - DNA, 642 bp, Stenotrophomonas maltophilia
atgactgcagtcgcgctgtcgtggtccgattcgccgaagctgccgcggatggcggcgtggctggtggtactgctggtgcatggcgggcttgctctgtggctgctggacagcggccggatcgaactgcgcagcgacgacggcccacggatcttgctgcgttggctgccaccggaactgccgacgccggtagccaagcagcccaccttgccctccgcacagatgacgcgtccggccgcatcggtgatgccccgccctgccccggttgcgcaggcagacagcgcccagcctgccgcggaaaacgcggctgcggtggcgccactgatcctgagtctgcctgcgggcagcatcgacggtggtgacggcatcagcgctgcgggtgtcgctccgcgtcttattggtcgccgcgagatacacccggcattcgcggcgcgccgcaactacttcccgatccgtcggcagatgacccccgagcagatcgtgcatggcgtcgcgcaactgctgggtttgtggccaccgggctacatcgtcgacccgtgcgagctgggcaagcaggacatggactatttccagaacgccgtcgaagaagccgaccgcgacatgctgcgtgcggcggtgctgcaggtgagcgcgcgttgccggtag

SEQ ID NO: 505363 - DNA, 387 bp, Stenotrophomonas maltophilia
atgattgccgctgccccggcaatcgcgggcggtccctcggattttcatggaaagccattggctacggctgggttggggcaggccagtccggctgcggtcaatctcagccaggaccccagctggcagctgtatggattccagcgtgatggcattacctatttgcaggtgaacgacctcctcggaaacgtgcagctgattatcggcaacgcaggggggacctactgggtgctgccggcaggcaacaatgcgaccaaggtttcgctgccccagcagaagatccagataccggcaagcgccagccgctcgcagatctacagcggcagcgatttttcgctggtgcgttatcgtagtggcggcgaggtcatctggtcggttgaaacaccgtaa

SEQ ID NO: 505364 - DNA, 1683 bp, Stenotrophomonas maltophilia
atgccgataccgtccctcagaaccgggtcccgcggcgaatggatgctgacagggaacgtactagagggagatgtgcgattgaactggtggaatgaaggcctgcagttgaagttgcgtatccgcccggcggggctggtccttgcgctgttgtacgccatcgcatgctgggcgtctcgccagttgtcgctcgaccagttctacctgcccgccggcgtccgcgtggctgcggtgctgttgttcccgcctcgatggtggccgtacctgctgctgggcgaatacgcctactttgcgcagatgcgcgtgccaatgatcgagaagtatggactggcctggatagtgcttggttcggcactgctgatgcctgcagtgatgctgatcgtgcatctgcaccggaaaatgatggtgaccacgaagaatgcatggctgatttcagtcgcggcggcttcggcactggtggtcacggcgctcaatctgatgttggcacatctcctgtggccgacaccaccggagatgccggtgcttgcgagcatcgcgcgcctggtcgttggcgacttcatcggcatactgacccttgcaccgcttgcgttgctgtggacacgccggaccggcaacgcccgttggacatcaggtttcgccccgcctgcactcgctgccctgacgctgatggccatcattggcctgtatgccgcacagctgcccttggacgaagccaacgccaagacatcgatgcagctgctgatggcgctgccggtcgtcgtgctcacctgtctgtatggctggcgaggtgcggcgatcggagtaccgtcgctcaacctgatcattggcctgactaccccaagcccctacacgggtgcgttcgatccagctgcgttcgcgacccagcagatcatggcggtcaccggcgctgcactgctggtgttagggtcgcgcatcacccactactaccaccgttcgcgattgggcgaagtgggtgaaagggatgcgctcaagcacgcgcgcaattcactggtggcaagcgagcttgatctccgtgagcgcgcgcgacacctgaggaagctgggggacggcatcgacacctcgctcagcgaggtggtgaattggctcaatgcgcatggccatcccacgatagcgaacagtctcctgcatatggcttcggtccattcgcgacagttccgcgaacaaaccagcatggtctatcccgcagcactggaacatcttgggctctacgtcgccctgcaggccggcggcgtacgcgaaacctgggacctgagccatcgcgtgatgcgccctcgattgctcggcgatccctgtcagctcagtgtcggcctgcagctggccgcctatcgcgccctcaccgatgccgtttcgctgttgatcaacagggaatccggtcagatcagcatccgcgtgcgttgcggcaggagaggaggacgccgcggcatcctgatgacggtcgcactgctggattcataccgcagcctgtcaccgtcaaccgtcaccgccacggtcgagcgcttggctggccgcacgattgcctatggtggaacagtgcagtgccatcggaatcggatacggatggcgatggtggagacgggtgactccgccgccatcggcattgcatcgttcaacgctatggatcacgtgaccacctccgggcagggaaactcgcagacccagatctga

SEQ ID NO: 505365 - DNA, 606 bp, Stenotrophomonas maltophilia
ttgcccgcactcatcgccgctcttctgcaggtaaccactgccccgggcatcgaccccgaccgggaacgaccgtcgccgttcccggccagcgacagcgcggccgacattgccgccaaagtcgccgaggtgcaggccttctttgacgtcagccaacagacggcccgccaggcggtcgccgaggcgcagcagcacgcattgatggaacgcttgagggcgcgccacgcggcacgcctggccggcatgtgggtggacaatgcgacgggttggaccgtcgtcgtgcgattgactggcccagcctccgaggcggatgagacccatccaggggcggacggcccgcaacgcgtgcgctatatcatcggcgcttcagtgaccgaagcggagatgcagcgccgtcttcaggcgcagcagggctggttcatcccgcagctgcccggtctgaccggctatggcctggacgtcatgaccggtgaactggagctggaactccgggataccgctggcgcgcgcgcaacggcggcgaccgtgcgcgaccacctgcaggcgctgctgggctacccggtcaggctgcgctggtacccagcggcatcgcagcgccgatcgccctga

SEQ ID NO: 505366 - DNA, 1191 bp, Stenotrophomonas maltophilia
atgcgcgcctcatgctcttcatctcgacacatgtcgggtctttccatggttgagctgatgatcgcactggccattggtgtgatcgtcatgctcggcgtggtgcaggtgtttgcagcatcgagggcggcctaccagctgtccgatggcctggcgcgggtgcaggaaaacagtcgcttcgcgatggatgccctgcaacgcgaacttcgcatggccgggcatttcggctgtgtcaatgaccaggcccgaaatacaccggacaatgcctcgctgttcagtaccttcgcaacggctccgcatccggcgctggacttccagacgtcgatccagggctttgaagctaccggaaccgcgccgggagcggcggttaccctgacagccacacccgcaaccggcggaaccgactacaagcccgcgctgcctgccgagtttgctgcggccatgcccaaccgagtcaatggcagcgacatcgtggtgctgcgttacctgatgccggatggtgtgccgatcaccgccattggcggcgttccaggcaagccgattttcagttttgacaaagcgcgccttgcggtactgcagagtggtgtctccaacccggggctgtatggtgcggccgactgcgccagcgtcacgatcttccaggcgcgcgcggtggacaagggcgccggcaccgtcacctttggggatgcgccgaacaatgcagggaacttcacccgtccggtcaccaccggtcaggcgatgctgcaccgtgcagaaagcgcgctgtactacatcggctatgacgccgccattgcccgttcttcgttgtatcgcgtgcgcttcaccgccatccccaatggcgcgctggtggccaatgcgccggaggcactggtggagggcgtagaaaacatgcagttgttgtatggccaggaccgcgggcttaccgacgtttatccaaccggtttcattgatcgccagggcactgccgaaacggtgcaggggtctaccaatccggccgcgaatggttggcgtcgtgtcggcgccgtgcagctggggatggtgatgtccagtccggatccatcggcggcgccgcaggccgaccagaacgctgcgctcacttcgctgggcgtgacgttcacggcgccggcagacggtcgcatgcgcgctgtctatcaaaccaccatcgcccttcgcaaccgcctctttggcaactga

SEQ ID NO: 505367 - DNA, 192 bp, Stenotrophomonas maltophilia
atgatcggaaagaaggtcctttcgtccgtcgccggtatcgtcgttgtcgccgcgctgtcgttcggcgcgtcccaggcctttgcgaagccaaccaaggctggcttcgcgccgggctgcacctacacgccgggctgcgttttcggcggcaacgggacaatcggtggtacccgcatctgctgccagccgaactga

SEQ ID NO: 505368 - DNA, 570 bp, Stenotrophomonas maltophilia
atgctcaagcgcgccctggttcctgttgctgccctgctgctgtcggcgttgatcatcgcgctgggatggcagaaccgccagttgcggcagatcaacgagcagatggccgcccagctgcaggccatgcagcatgaggcgcatggcctggcgctgggcacgcgtgccgatacgttggcattgaaaaccacccagcgcacccgggtgatgatcggcggcgaacgcagcactgcccagatcctgtacttcttttccaccgcctgccgctattgcctggcctcgatgccgcagctgcagcagattgctggcggacgtggcaccagcgagctggtcggcgtggggcttcctccctacgatgaactggccgactacgccggcaagcacgatctgcgcttcccgattgccatcgacagcgacggcgatgccgccagacgctaccgcgccacggtcacaccgatgctggtggtgctggctgcagatggcagcgtggcctacaaacacgtcggccagctcgatgagcaggtcgtgcaggccgccatgaagtcgctggcgcctcgccttgcattgcactga

SEQ ID NO: 505369 - DNA, 141 bp, Stenotrophomonas maltophilia
atgagcgagcatgttccggctccccggaccaatccattcgtcgagctgctgttcggcggcaacatgctggaaggcaccttcaaggccgtggtctgggtagccctgctggctgcggtgctggcctgggccaccttccgctga

SEQ ID NO: 505370 - DNA, 285 bp, Stenotrophomonas maltophilia
atggcctgcgtctccgcccccctcgaagcccatgcgatcctgtgtgctcccgacctggacagcgcagaacgtgcgtatctgggccttatgcccgatctggagcatgtggatgcgctggcccgccgcgcactcgggctttcgcgcgtcgccgatgcggcacgcacctacgcgctgtcgatgaccctggtcgggctgcgcctgcaggaacttgagatgagcgaagcgaccgcaaaggagcaccgccaggctacgctgcacagcctgcggcaggtcttcaacgcctga

SEQ ID NO: 505371 - DNA, 657 bp, Stenotrophomonas maltophilia
atgggtgtagctcgccccgaacccaggggacggccgctgctggcatttctcgccctcgtcccgctggcggcatgttcgccctacgccgatgccgagcgtgacgtcgccgcgggtggacgcggcttggccaagctcaacccggcgccgaagcaggcctacgaactggtgctgacactgaaggacgcgccgggcccgttcgcgatcgtggagggcgtggcccagtacgacgtcagcaactacgaagactgcgggcggatactgcctgccacaggcactgcgagccgcatgaccagccaagagcccgtcaccctgcacaaggccagcgagaacgagtaccgcggtacgttttatctggaccgcatgctggatgaggactactacgggcgtggcgtctgccattggacgctgacgggtgtcggtgcgatgttacgcgccacgaccagcaaggcggatacgcgattcctgacgttcatcgacaagaagcgcatggacacggggagccaattgacgcggtactacccacgcgccgactacccgcggatcgaagagatcaccggatacggagctagcggcaaggaagatccttccagctaccgcgccgatctgcgcaatgcgctgttctcaaccaccaccactgtgcagaagctcgtgccatga

SEQ ID NO: 505372 - DNA, 588 bp, Stenotrophomonas maltophilia
atgaaccaggaacgtgccgctgctgaagccgatgtcgcccagggtgggcgcggcctcgccaagctcaaccccagcccgcgcaaggcctatgaactggtgctgcgcctgaaggacgccccgggcgatttcgcggtggtcgaaggtgtcgcgcagtacgacgtcaccaacgaagaccagtgtggctatatcgagccggccaccggcacggctgcacggattaccagccaggaaccggtggaactgcgcaaggtcgctgatggtgagtaccgcggcacgctgtatgtggatcgcatgctggatgaagactactacggccgcggcgtgtgccattgggagttcactggcgctggggcgatgttgaaggcaacgggcgctgaagaagagacccgcttcctgaccttcgtcaaggccgatccactgaccgacggtaagacccacacgctttactatccggacgcggcctatccgcgcgcaccgcttgctgccaactacccagccaccggcaaggcggatccggctgactacgttgctgaacttcagggcaagttgttcacgatgagtctcagcgccagcgaggtcacccaatga

SEQ ID NO: 505373 - DNA, 444 bp, Stenotrophomonas maltophilia
atgttctcgatggcggtgctgtcggcaatggtgtccattgcattggatatggtgatccgcgtgtcttcctcgttctgggcgacggcgctggtgaacaggttcctgcttgacggggcttccagcgacggtatgaccagtcaggcgatgcagcagggcggcatgggcctgattctgacgaccttgattctgactgcgcccccaatggcggccatgttcttccagggcaccttgggcagcttcatggcatattctcagataggtggcagcccggtggcacaggcgccgggaccgagcggacagccgccgggtagttacaagccggcagctccaaccaattcagaggaatccgtgagtagccagagccttacgatcccgaaaatcgcgccgggtactagcaactcgctacatacgccggggtcgcttggtaacgccgcagttcggtga

SEQ ID NO: 505374 - DNA, 798 bp, Stenotrophomonas maltophilia
atgaacatcgtcaagcgtcgggccagcgcccgcaaggtactcaagccggtggccaaggtgctgggtgttgccttggcgctgtctgccaccaatgctggggcatttggtccggtgcaggaaaccggtccagcgctgatgcagcacatctggaaccagttcaataccctgcagtccaaggtgcaggagaagacccagttcgtcagagaaaatacacagtggcttcaggactggaaccagaccatcaaggagtatggcgagatgctggttcaggtgcagggtatcgtcaacaacttcggtcttccttccgctgcacagctgacgcccgtttcgcccaagtacctggtcgctgaaacctgtggcaccggcgcagatttgaaggacatgctgcccaacatcattttcaattcaaagggcgactggaagagccagcagacgcagatctgcgtgaacatccgcatgatgcagaatcgcaaatacaacgatgcggtttacttcatgcagacgaccgggcctgcgttcctgaagagcatggatgacatcgcgcagttgcgttttggtagcaatcggctcggtgacatgaacgcagtggcgaacgactcgatgcgtactgcgaacgaaatgaacgcaacgatcaagaactttgaagcccggatcaaggcatacgacgcctacatcgatgtgatggaggccaatcagaaggtcgtggcccagtctgcgctcaagggcgatccaaccaagaccgtcatcagtgacctggtcaagacagcagcgctgaagacggcgttgtccatcgactga

SEQ ID NO: 505375 - DNA, 498 bp, Stenotrophomonas maltophilia
atggacgtcactgcaagtgagtgccaatcgtcagtgagcgatgtgaacaacgatcaggcactgcttcagctcggggcgctgccgcgctcaggaattgctctcctgcaggagccaatcggacacgacggcacgcttggcatgaagcccgacgccggtgactttctgaaatgggtcagatctcagcaccccgatatcgctctggcgtttccatccaaaagccctaaagccgtgctacatagctcggacatctggctaccactgatctacttggcgggcgatacgtcggtgcagctgttcctcaacatgctatcgagttatctatacgatcgcgcgaagggggctctcagaggtgaagagtcccgcgtccatctttcgctcatctatgaggacaaagcatccaagaaggttaagcgcttcgaatatgaaggaagttctgctggcgtcaaaaagcttatggataagttcgatgcgaacaacttcttcaacgatgccccttag

SEQ ID NO: 505376 - DNA, 876 bp, Stenotrophomonas maltophilia
atgcgaacaacttcttcaacgatgccccttagttctccgcgtgcacgggcacttttaaggataagcagggttcaagtgctccagcaacttgcaatactggacgaaaatccgacgctcagaagcgatttgaagcatatgcgcgacattgtcgctcgcgctcgagaaggcagtaaacatgcctcggacgctacgctcgatgatcttttcgtactcgatcggtgcctggacttccttgaagcctacgcggccatttggcgcctgatcgcacagtcaaagtgcgcagattcctggtgctccctgcaggactgtcttgacttgctcaggcttatcaaacggtggtcatcgattcaagttgacactttcgaatcacaacttctccaactggaaaaggcatatccatacaagattttctttagcaagggcttggtcgtggagtacttcgaatgcagtatttgcggtcaggatatggacttattcagctgtccgcataggcggggacacctctatcgcggtgtgatggcacatggaattgccagaggcgagatggatttggatcacatctctgcggttgatcatccgcacgacaagcgatgtgtcccgatttgcagcgatgacgaacccggattcgcagcggtgaggaagatcggcgagcttattcgtgcccgaacaatgaaggtcagccagttccatagccttgagttttccacaatccagatttcacgctctgcggctgaacggccgggtcgaaacgaacattgccactgcggtagtgagaagaagtacaagcgctgctgccatggcaaggactatgttgagaaaaagcacgtcgagatcatcccggctcatcagatgctcgctctcgcagtctattcttga

SEQ ID NO: 505377 - DNA, 402 bp, Stenotrophomonas maltophilia
gtgatctcgcgccatggcctgctgccgttgccgcatgcgcatggcggcctgcctagcttcgaccccgccacgttgctgccgatgaacctgcgccagcgcctgtacgcgctgcgtggattcgcgtgccaggtccaggccgacggcctgccgtggcagggcgtgatggaccgtattcggccgcacgggcaggcgctgtggtgcaacctcgatgaggccgaccagcgccgcttcctgcgccatatggtgcgctattgggacgtgcatcgccaccgcatcgccgaagaggtcgacgcgcagctgcagtccctgcaggacagcggccaactgcagggactgcctgcagcgcgtctgccgcgaaggcgatgccctgcaactgtccggccgcgatgcctcgggcaatga

SEQ ID NO: 505378 - DNA, 246 bp, Stenotrophomonas maltophilia
gtgcaagttacctacgaccccgagttccaagataccaagcaggccagcgcctgggtacagagcctgccgaacgtgggcatgtaccgcgtgccgggcctgaacttcgacaagaactatgcgaccgccatcatgggcgcgcgcacggagctgttcgggctgcaaagcaacatcggcctgagcgcttcggccgaacagaagcgtgcccgggacatcgcactgttcgccagcttcagcggcagcttctga

SEQ ID NO: 505379 - DNA, 345 bp, Stenotrophomonas maltophilia
atgggcgtcatcctctacaaccttctgatgacctttttcctgatccccctgacgatcagggcgtacttgagcctgaagaacaatcggctaccgctaccgcacttccagaacaacgtggtggtcaaccgggtcaagctgcagaaggccatcggaatctggtcaccgatcctgttctgggtcttccacagcgcctggctgatgtggaacctgtcgatcgatgcgtggatcggtgtcctggcgacgatcgcctatatggtctctagcgccatgctgtcgggccagatcaaggccaagcagatcggtgtgatccctgagcaggcttccagcgggagcgaccaagcctaa

SEQ ID NO: 505380 - DNA, 225 bp, Stenotrophomonas maltophilia
atggcccgagcaatccatgaaacccatctggtcagcgtctttgcaggcaatgtgagacgcctcaggaaagctcttgggctctctcaggaagagctcgcagaggcagccggagtccacaggacctacatcggcatgatcgaacgcggcgagaagaacgttacgatctacaacatcgaacggatcgcccaagccctcaaggtccgaccagggacgctcctggactga

SEQ ID NO: 505381 - DNA, 258 bp, Stenotrophomonas maltophilia
gtggctgcggtctgctcgttccgctatcagcaggagtgcggacaagactacaaaccttattggcacggacagaccgatcaaggcaagaacccccagcgcctgttcgacaagggcctgaatggtgagcagccctatcagcatcaaggcgtgatgcagatctacttgaatcggttctacgagtatcgggcagccttcacgggcacaatgggcagctaccgtgcctggatgggctatcagatagctgcactggaggcttaa

SEQ ID NO: 505382 - DNA, 3852 bp, Stenotrophomonas maltophilia
atgaacattgcgatcaccggccctgagaaattcttgctccaggacatgatctgcgttgaagcagcattggccctaggccggaatggaaattgctcactggtacctgagcccgaggcaggagaggacgcacgtatcatttggccaggcgccacgccttgtacccttgaagtgcaggtgaagggaggctccgaggctctctcagcgtccaagcttgcagagtacttggcccactaccccgccagaaaagacactccatccctgctacggcggctgatggatgagagcgagacctacgccgcgttcgtactaagctccagggtctgtgacgacctagtggagcttttgacgccccagaaccgcttggacaggccacaggccaggcacgcgagccggcgcctagccaaggccgttcgtcaagcggtcatcaatcagtccgtctcgactctgacgaaagcagcagatccgaaggaaaaggtaactgcgctggatatcaagcgcgccgaagaacaagccgatgttgcgctccggagcgaggagcacttccgccaagcccttggaaagatagcgctggtcgagcgcgagacagcagagtctgtagagatccgactacacagaattctgcaggaagaacgtttcgacacgccctctatccgtggactcatcgccaggttcacagacatgatcgctcaggcaaaaagaagccagcaggacgttgtccccggcttcctagagctgcttagggtacatgccccaactcaacttcgcccagcaaactatattgatcgcggaaccgaggatgcgctgctgcaagttctgagggatcagcattgcttgctgctggccggccctccccgtgcagggaagacctggacttcgttcacaatcggatcagtgctccaagccgatggtgtcgcggtcagaaccggaagccacgttgatgaggccgagcgctacctcacagaccccgtggatgggcatcgagcatacatccttgacgaccccctcggctctcgcgaacctatcgagaaccccagtgccgtaatggcagatctggcgcgattgtctgctcgcctccgagctggacgctatctgatcgtcgcacagacagagaatgtgcttctccaagtacgcggcacaagcgagctggtcagttgtcgggtaggctcaaaatcctggacctcactcgcgcgcctacccacctcggtagcaacagaaatttggagatcctctgctgaagcacagggactctcagaagcaacgatttccgctgtggacaagatcatcgaagagagcgaccagctttgcgagccgggcgcgcttgcatacctggcacagacttggagcgagctcccaaacgcgccaaccgattccgagatcctggcacagtcacgccgagatgcaattgactttgcgcgatctctatctgaaaagcataccggtgcgaggagcgtactgatcgcagccgcgataggaactgagattcatcgacctatcagcgaaccagatctcgcgtacatgatcagctcaagcgaggagcgccctggcttcgtggaagagtttgcgtcgatttctttggggggagattggaaccccgcctctcctcccacctacgaggcccccagcgagttatcacagcaggcgcgggctgcacttaccatactccaaaggcgccgcgttctctgggccgaagagagtgacttcaatttcacgcacccctatctccgtgctggagcccaggcactggccgtaccggacattccacaggaccgagctctcctccttgagcaacttcagagagggcttggttgcgcttccccaatcacatctcttgcagcagcgcagaaccttcgctggatgcggctggccttccaaggtcaccatggtgcaggcctctttgagttggcgaagctcggaaccaggtcaaagttcccggcgacacgggacagctgctttgcgtttcttgttcagtttgtggatgaactaccccaagagctacgcgacgatctgccttggatcgcagaggacatggtcatcagtctggagcagatcgacgtagattcaggcatcggattcatttcgagtaactacaatttctttgaaacgccacctaccttggaatccgtccaaccctaccttgatgcgattgaggatggccgctccattgctctcgacctagctttgtcgaaaaggatcctgcaggcactggcaagagagcccaagcaactgacggcgagagcagctgaacgactgcttcgagcggacgaggcaacaattcgagcattcactgccaattgttggatctcgacagaccgccaggacgatgaaggtatcctggacctgatcgcccgcgatcgcactccagcaatgagtgcccgcctactgaaggcacttgctcactcatgggccacacttgatccttctcgccgcgagagaatttgttcaatcattgaagatcagctcagggttccgagctgcgcaagcgtcctctacacccgtcttgttctcttcaatcgcgtggaagaattcggcaagtcaccgccatgggagctcttcgccagactgcttccgagagcactagactgcatgccacataccatcgcgcttcgtgacggccgcctcaacgcggtggtagacgacgcaatgaagcagcttccaacatctgcaatgggcgatgcgctggaggcttggatcaacagaatcattcgaagggttgatgccttcacgctcgacgaatacgagctcagcgttacggagccgttacttgaactagcggccaatgagcgccgataccggttggtctcggctctattggctgtcagagatacagggctgcgccttgtcaccatctccagactgatagaaagatggactgagctgcccctccgtgaggccgtcctcgtgttgtcctcattgcgctcgggtgagcaggacttgctctggctcaaagctgtagcattgaccactcacaacgctccagctccagtgcttagatggtgcactgaccaaagctccattcttctcatgaatgcgaccgaagtagagcagttgcttggcaaagaacttttcgctgcgtgcatctatgtccattgtggctggccccaaccgctatggtggtacggcactcaccatcgaagcggcaaatgggcggatctcgtgcttgacattgccactaggccggatcatgaacttcactctctcgctttgattgaagtactaagccatcaggaagatgcagtttctgaactactgagcaccctccctcagaagtccctgtttgatacctatctaactctgctccggttccaagctggtacaaatgcaaactggcttcccgatgcctggaagatcatgatcaaccgtctccttgaggacagagatcttggagagctcacggcggcagttgatccggttatcgagggagtcatagagagcgtctttcaaatccgcctatggctcgccgactgcccacttgccgggtcagtatggaagttggttgagaatgactacaaggcggccggggtgattgatactttggacgtggcgctcagcgcgatcgatgccaagaggggagagttagctgctgagcagatgcgggcagcggacatgctacgtcagaggatctttgaaccgttcgtgtcggcaatagaaacatacaatccgcggctgcaccgtacatggtcggacctgaaagatgccctctcccgccgcgactgtcccgaagagccattgtctcgaatggaggacggcagattgcgtgcattcgagaagcaccgacgtgttagagatacacaggctgtctggccagcaaagccgactctgaccggctggcgcgacgcacaaacccctagttga

SEQ ID NO: 505383 - DNA, 1734 bp, Stenotrophomonas maltophilia
atggataagctcaactttggtgtcaactctcgtattgccaccttgcttagcaatgagtactcatcaacggagcgggcgttgattgagctgatcgataacgcctgggacgctgatgcaacgagggtacttgtggatatcccagagcctctctccggtaatcccatcgtcgtctcggacaatgggaacggaatgaccgttgaccagatccgtacccattatctgcagatcgcggctgacagaaggcgacgctccggcgacagctccattcggttcaagcggaaggtcaagggcagcaagggcatcggcaagttctctggtctgatggccgccgccgagatgcgcgttgataccgccgtaggagggcggcgagtgaagctgagcttcaccctcgagcagcttaaggatgttgatggaatcgatgaactggagattccctacacagtgtctgtagaggatgaacatgtgcagggcacaaccatcacgctctctcagctcaggcaagggggagcttatccagacgccgttgaactaaggcacttgttagtccagtcctacgggcggcgtcaagacatggttatcgagatcaacggcaaaccattagacgtcgacgatgttcaaggccattttgaggagaaggcaatcagtgttccaggtgccgcggacctgactgttcgattcgccctgagcgagcgaaagaccggcatgaagagtccgggaattcagatccgcgtgggctcgcgcattgtggggcggccttcactctttgggctcgaccaacgtggagatatctcgcctaagttgctgaagaagctctatggcgaaatcgacctagaaggcgtggtggacgccaatgttgctagctgggagacccttgttgctggtgacccgacgtgggctctcgtacaggatcgtgtcagggatgctctctatgagagctatcaggctcgcttcaagaggcatatgagtttggcccgagcccggttgcagcagcagttcaacaagaggatggccgagctccccgagtacaagcgtgagttcgctgataaggcgatcatgaaggtgcttaatcggtactcagacgagcctcacgagagggttgcccccatggtcgcggttctgcttgatgctctggagagcagcgactaccggcttctgctcgagcatattgcgggggcctcaagcgccgatgtctcaaaggttgcagactcactcaacgactttggtctggctgatatggcccatctggttgaccaagctcgagctcggacggctgttcttgatgcgcttgaagacttgtcccgggacaagagtacgctagaagctactatgcatagggcgctggagagcaatctttgggtgtttggtccggagttcgccttgttttcgtccaacaagaccctgcgtcgaatggtggaggaatacttggaccagaagtacaccggcgccaatgctaccgatcggccagatttgatgctgaagcagaactttgcgggagagtatctgctcattgaattcaagcgcccggcgcataccttgactgtctctgactaccagcaagcaactggctacaggcatcactttggtcccttcacatctaggcgtatccgtgtctacgtggttgggggggatcggggcgcctttccaacgagcaacttggaaccggacgtcgtaggtacttcattttttgacgtcatctcaatggcgcgaactcagctcgactggcagctcaagtag

SEQ ID NO: 505384 - DNA, 240 bp, Stenotrophomonas maltophilia
atggagtgtgctggtttcgacggtcagaaacgcatggttggtagacccaagaatgtgcacgcaatgttgggggttaccttgatgccaggagaagagcgagttgccactgtcttctatgaaaagggggtcgcccgcttggtatgcgtagatgtgaaggacagcatcccaacattcagtagggtggaacagctgattgccgaccctagtgccaacgacatcacctcagttcttgctctatag

SEQ ID NO: 505385 - DNA, 669 bp, Stenotrophomonas maltophilia
atggaggaggatggggatttcgcgctcttcatcgagagcttcggagaggcaactgaacacgatccggtgccagagaccagcttctccaagtggacgggcatcttgcccgaatcgctcttgagctactggcgtcgggatggatgggcgaactatggcaatggacggctgtggacggtgaatcccgaggactacgaaggcctgatgcacatgtggttggctggtactccatttcccctgatcgatacctaccatgtgtttgccagaagcgggtttggacggctctacctatgcggcgaagcatcaggcgctggggtgagcatcgatccgatccgcagtgaagtatttgctcttcagaactgtttgagacccaagtctctcgcacggcaggaggggggcatcaaggccttcttcgcctgcgcggagctcgacgattttgatctgatggatggggatgaagaactgcgcttcgatagggctgtgaacacttgtgggaacttgctggcggatgagatgtttggctttgagccagcgttggtttgcggcggagaaatcaccattgagaatgtgcgcaagctaaagattcagccgcacctgcacatgctcagagagttcgccacacctgcgtttccacgctatgcgattgatgttaaaccgctggcccggaagtga

SEQ ID NO: 505386 - DNA, 1437 bp, Stenotrophomonas maltophilia
atgtaccgcaccctggctgctgcattgctctgcacgctgtttgcgatccctcccgtttcggcgcttggaactgccggcgatctttccaatcagctcgacacccaactgcaggccaaccgcgagcgctacggcatcgccgggcaagcggtattggtcgcacacaacggcgaggtgctctaccagggcgccagcggcgagcgcgacccggccacgcatgcgccggccaccgtcgattccattttcactgcgcagtcgatggccaagctgctgaccagcacgctggtgatgcagttggtggatcaaggcaaggtggatcttgacgcgccggccagccgttatgttccggacctgccggccgcctggcggacgatcccggtgcgcgacttcctcaaccacagttcgggcatcggcgagtactacgaccgggtggagaaccgctgggtcagcaagggctacaccggtgtggcgcctaatcttgccgctgcactgaaggtggccggcgcggcgccgatgcagttcgccaccggcagccgcgtgcagtacacccaggcgaactacctggtgctgacggcgttgctggaagcgcgctatcgcaagccctacccggccatcgcacgcgaacgcatcctgcagcctttgaagatggccagcacctcgtggggtgtcaccagcgtgccagccacgcgcgcggcggtgccgtacatcggcaaggacggccaactgcagccggccaatgaagacccttggccggactacggctggggccatgccgacctgcagaccaccgtgggcgacatgaaccgcttcctgcaggcactggccaccggcaagctggtgcgcacggcgatcttggaagaactctggcagccgcagaaactgagcggtggcggcagcaatttcttctccaccggctgggacaccacccgcagtgacggctacacccaggtcggccatgatggcggcacccgtgtacgtgcgcgattggcctacaagggcacgctggccagcggctactgggtattcgtttacctgaccaacggcagcgcccgtaatgtctggtcgagcacgctggtggagagcgcgatggcggtggccgcgccgcaggagtttccgcacgctgtgctgtccgagcggttgatcggctatgcgctggatgacagcgccgatgcgaagccgctgatgcgtagctggctgcgcgacagtaatggcgttcccaccggcgaactggagcgcgcgatcaatgccgatggctatgccattcgcgaaagccttggtgctggcaaggcgctgaaagtgttcacgctcaacaccgagctgtatccggattcggccaacgcgtgggacagcctggccgagtgccatgcggcattgggcgaaagggaagcggctgatcggctgtatgcgaaggccaaggcgctggcgaagccctcgccctaa

SEQ ID NO: 505387 - DNA, 774 bp, Stenotrophomonas maltophilia
atgagcgacaccccccgcatcgctttcctggccagcaacaccgaaccggcgcagatggcgcgcgcggccatgatctcgcgttatggcgatcacgcgcctgagcaggccgacgtgctttgcccgctggggggcgacggtttcatgctgcagaccctgcaccggcacgggcacctgggcaagccggtgttcggcatgaagctgggcaccgtgggcttcctgatgaaccagtaccgcggcgacgatgacgtgcaggcgcgcatcgcccgtgccgaaccggccaacctgcgcccgttggagatggtggcgctgaccgaatcgggcaccagtaccgggtcgctggcctacaacgatgtttcactgctgcgccagacccggcaggctgcgcatatcggcatcgacctgaacggccaggagcgcgtggccgaactgatcggtgacggcgtgctggtcgccaccccggccggcagcaccgcctacaattattccgcgcacggcccggtgttgccgctggggtcgcataccatcgcgctgacgccgctggccccatatcggccgcgacgctggcgcggggcgatcctcaaggccgataccgaagtgcgcttccgcgtgctcgatccctacaagcgtccggtcagcgtcaccgctgactcgcacgagacccgcgacgtagtggaggtgaccatccgcgagtccagggaccggcgcgtgaccctgctgttcgacccggaacacaacctggaagaccggatcctgagcgaacagttcgttttttga

SEQ ID NO: 505388 - DNA, 918 bp, Stenotrophomonas maltophilia
atggaaagagcaccactacgattcttcagctgccctgccctgctgtttggcgcgctcttcgcggccagcagcatccaggacagccacgcggcaggcgtcctcgtctgcgacaactgtcgtgacccgcgcgcattggcgctttcctcgggtacggggccgaccatcgtcgccgacttccagcagcgccggatccatggtttcgatgtggaatacgatcgcgagctacggcgctatcgcgcaacaagggcgcagattcccgggccaatcaacgcatccttcaatcggatcatgggcatgctcgacaacaacgtgccaaccgtacagttcgcgccgcggcagcgggccggaagaggagtccagtacgaggttcatcctgatgacccgcaatacgccaacggcataagcttcccggaagagcacaagaacctcaacgcctacgatgtcgttcagatggccacggagcgatcaaggctggaaggtgacatcggcaaggccttcacgggggcgacaacatcgtcggccgcctggaacggcatggcaacattcctttcctcgatcggcctgagcttcgtcagcaagaccgtcggcattgacagcgccatctatcggatcacatggcgcgatggttcaaaaaccacgctggtcatcacgccttctgcggttgatcaagcccgctatgtgcaaggtgaaagccgtgacgccaagggcaacaagattccggatggtgcggcaaccgatccagagatggcccggagcttcatcggcaactatcgctttgacgatgccgacgagctcgaacgatgggttgactccgcccggctctacggcgtgaccatgcatccgggaatgccacgggagtcccttcagatcgtctgtgaatggaatggaaaggatatcgtttgccggttgccacgttga

SEQ ID NO: 505389 - DNA, 648 bp, Stenotrophomonas maltophilia
atgttaacccgcagcgtccgcacggatatcccgggtagatccacgccatgcgtggatgagcctgccagcaggaacagcatccacgcaccgcgcggatctcccgtgatccatctggaggaacaagcccctctgttgaggggctgccccgacaggggcggggagaggccggcaaagggaggggcccacgcgttgcgcagcaacgtgtggggcgacgcgcagagcgcgtggcgtcccgcgccagatcagtacagggtcactacggcgggatgcccgccgcgcatccacgcaccgcgcggatctcccgtgatgcatctggaggaccaagcccctctgttgaggggctgccccgacaggggcggggagaggccggcaaagggaggggcccacgcgttgcgcagcaacgtgtggggcgacgcgcagagcgcgtcgcgtcccgcgccagatcagtacagggtcactacggcgggatgcccgccgcgcatccacgcaccgcgcggatctcccgtgatccatctggaggaccaagcccctctgttgaggggctgccccgacaggggcggggagaggccggcaaagggaggggcccataccgttgcgcagcaacgtttggggcgacgcgcagagcgcgtcgcgtcccgcgccagataa

SEQ ID NO: 505390 - DNA, 258 bp, Stenotrophomonas maltophilia
atgaagaaggatatctcacccagcctgcgctcgctgttggttgaaatcgcagcgaagcacaatttgctcctacccgagaatggcgtcagatacctcgttgagcgtgatcgcgagtcgctgattgatgcgttgctggaagaactgtcagagagcggcttggggcctgacgatgaacctaatcaacgaggcattgagatcgaagaaatcattgacttcgtcggccccgtcgttgatcggcccgatgcgtcgggtgactga

SEQ ID NO: 505391 - DNA, 642 bp, Stenotrophomonas maltophilia
atggccgatgaactgctgctgctgcgcgcgggcgaatcgcttgtgctgcttggcgagcgcgcgctgtactggcccacacggcaggcgctgttcatcgccgacctgcacttgggcaaggccgacgtattccgccgtgccggcatcgcgctccccagtggtggcaccggggaagacctcaatcgcctgcaggcgctgctggacaggtatgcatgccgcgagctgtggatcctgggcgacatcctgcatggaccggcgcatcgcgccgcgtggtaccagcaatggttggcatggcgcgaacgcaacgcggcgctggacgtgcatgtcctgcgcggaaatcacgaccgccacctgccgcacgcccagctgctggtacagatccacgatgaagcacacctgcatccgttcatgcttcgccatgagccagtggccgatgcaggacggcatgtgatcgctgggcatctgcatccgcaggtcgccctgccgccgttgcgtcggcgcttccccgtattctggctgcgtgacgggatgacggtcctgccggccttctctgcgttcactgcgggaatcgtgcctgttcccgctcccggcgagcagagggtcgcctgcgtcgagggcagcctggtcgaactgcccgtgacgtga

SEQ ID NO: 505392 - DNA, 180 bp, Stenotrophomonas maltophilia
atgtccagccccgcctgcgccgccgtgctggtgatcaccgcctgcgtcgtgctgcaggcattgggcctgtccctgcagctgcgcacggacagtggccgcgcctgcctgcagcagcatcgccaggaactggtgtgcctggcctgggcaccggcagtcgaatccacggcaggcgccgggtaa

SEQ ID NO: 505393 - DNA, 651 bp, Stenotrophomonas maltophilia
atggttcgtacgtatcccgttgcatccctgcacttcgaccccgcccgcgttgccgcctggagcgcggcgatcgccctgcacctgctggccttcctgttgttgctcatccctgcgacctaccaggccgtgcaggccccgcgtgaaaagaccacggtcaggctgatcgagaagatcccgccaacgccgccgcccccggtgctggaacagcccagggaggtcgcccgggtcgtaccgaagccacagacgcagccggccgcgccgccgcttccagctcctaccgcaaccgtggaagaagcccagggcatcgcgctgccggccgccgaaccggccccgccccagcttgcaccgagcatcgatacctccgcaccactggccggtgcccagctgcagtaccgcagcgccccgccgccggcctatccgctggcggcattgcgcaaccgcgaacagggcactgtgctgttgcgggtagaggtggacacccgcgggcagccgacgggggtcagcatcgagcgcagcagcggttcgcgcagcttggaccaggccgcgcgcctgcaggtgctccggcactggcgcttcgagccggcccagcgtgatggcgtggcggtaccggccatcggcatggtgccggtgcagttctcgctgccggagtga

SEQ ID NO: 505394 - DNA, 426 bp, Stenotrophomonas maltophilia
atgggcgcatggggacacggttcatttgataatgacgatgcctgcgatctggcctgcgatctgacggaatgcacggatctctcgatagtggaggaagcgctgcgcgcggctatcaaccccaatgattacctagaggcacctgaagcgggcagggcggtcgcggctgcagaggtggtgctggcactgttgggccagccgacggctgccattgccgaggaagaagcgttactcgcttgggtcaaggcatgcaatcaggtgccatcgtcagcgatgttgttgcttgcacaactcgctgtccagcgtgtacaggccgaggactgtgaactgcgggaattgaaagaggaatccgactcgttggacgaatggatggccgaagtgaacaggctgcaggaaggcctgcgcgccgcatgcagcgtgatcggctga

SEQ ID NO: 505395 - DNA, 495 bp, Stenotrophomonas maltophilia
atgtgtttcgcatctctctgctatccagggcgtcgcatttggctctatggctgccactactgcaattgcatactgccgctgcatggcgacttgggctcgaaaatgaacactctgctcgacacacccagagatgcgtcgcagcttcgaccggaagaacgggacgccatccgcatgctggttgccttcgtccgcgaaggctgtccggatggccccagcccaccaggcttccccaatgatcgcaaggaggattttcggcgtgcggcgcttgagtacttctccgatccgcccgatcccgccaatcactttcggattgatgttcccagcgatgagtacatccgcacccaggcgcgaatatacaagcgcccatcgggtgcccaggtggaactggacctgttcgccgatggcgagatgtgtgatctgaccgccaccttcgaccttgatcgtgaaagcgtggtgttcggcggccccacgctgtacagcatccatgtgatgtag

SEQ ID NO: 505396 - DNA, 777 bp, Stenotrophomonas maltophilia
atgatcgcaggaatcgatctgggcaccacgcattcgacagggccatctgccgccgaggcgcttgccgaccgcatcgtccgcaacggtcagcaacgcgatccggcagacttcgcagcctggctgcagcagtccccggaactgcagccccctgcggatgctggcgcggtgaacctggcaacctggcaacggctgatgaagggcactacgccgttcccacaagcgaacttcgagcagctggccgaccgcttccagtggtatgaccgggacagtatccgcgagtgctacgacatggccgccctcggccacagcatgcacctgtgctggttgctggtgccaggcaacgagaccgcgctcgcccgttacatgcatcttgagaatgcgccggtttcggtggtgcaggcccgcacccgtgtcgcccggctcagtggcccctggcacccactgcgcgcgcgcatccaggcgctgtccgcgcgcacgcggcacgaaatgcgtgaaacgctgcattaccttgtcggcgtgcctgtgatggcgcacgtggcgctcccaccgccattgcagcgcaggcaggtcatgttttgggcggccgcatgcgacgccctgcaccattccgtgccgtcacgcagacgcttcacgcggcgaacggtcgctttggcactgcttctgacgtgcgccctgctggccgccatcgcaatcctccgcggggcattttccagctcccccggcaatgcagacagtgatcgttcaagcctgcagcccccacacgaggcaaacccatga

SEQ ID NO: 505397 - DNA, 1101 bp, Stenotrophomonas maltophilia
atgagcaactggatggacctgctgcagcgcgccaaatccaccgacccgcaacctttcgcggtgtacctgcagggtctgcgcagccagtggtccctggacgagcgcgctgaagccagtgctagggtgctgcaggcgctgcgcgcgcggcaggcgcccatgaacctgtccgaagccgcggcgctttaccaggccttcggctgggacgacgcgggctgcggcctggcaccaggcgaactgcgcgagctggccgaacacgcctggcaggactggctgcaactgcccgcgcagaccgatctgctggcccagcagatggaggcgcgtggcggacgctggaccagccacgatgacgctgccagccgccttcagcagctgcgcgaaccgcgttcgcacctgcgcaacctgatgtccgcgctgccgctgcgcgtgccgcgccaggccgcagcgttgatggacgtactgggctgccaggaggaccgtcctctgccgcccggcatcgatgcgggccaagcccgcttctgggccggcgccagcgatgtcacccgcctcaccgcggcacagttgtcattgctgcgtgcactgctggcaagcgtggcgctgacgttgatggccttcatcgcgttggccaccacccagatcgccaacacgctgctgccttaccagtcggaagagcagcgcagggcgatcgtgctgggcacggcagcgctggcgccactgctcggcacgctgctggccattggcctgcgtcatctgttcgtctggcagagcgcccctgaagacccgtccgtgccgccttcccggctgcgttggctggccctgccggtcgcctgcgcagccatcgcagtggtcggtaccgccgtctacctgtgggtgccctcgccttcgctgtggttggcaccgctgtgctggctgctggcctggaccgtgctggccacggcatggatccgctaccagctgcgccggggcaagcccgtccgcatggaattgccagtgtcattcctgatgatgctgtccgtgctcagcgtgctgccggcgctgctgggtgcgctgctgctgtggagcatggacctgtccgggcaccgccagcggctgcgccgcagctga

SEQ ID NO: 505398 - DNA, 795 bp, Stenotrophomonas maltophilia
atgggcatcctttcggtcttcggcaagcaccgctcgcttgccttcgagctgacccagcgcgaggttcttgggcgctaccgcggggccagcttcggtctgctgtggtcgctgatcagcccgttcctgatgctgctcgtctataccatggccttcggctacatcatgaaaggccgctggcccggatcgaccggatcgaccaccgacttcgccctgatcctgtttgccggcctgaccgtgcacggcttctttgccgagtgcttcacccgtgcaccgcagctgatcgtcagcaacaccagctacgtcaagcgcgtggtgtttccactggacctgctggtctggagcatggcgttctcggcgctgttccacctgctgatgaacatggtcgtactgctgatcctgtacttgtgcgtgaagggcagcgtcccacctaccgcggtgctgctgccggtggtggtgttgccgctggtcatcctcaccgtgggcgtaggttggatcgtttccgcgctgggtgtgtacctgcgcgacatcggccagatcgccggcgtcattgccaccgcaatgctgttcctgtcctcggccattgtgccgctggattcggtgccggccagctaccgcatcgtgttcgagctcaacccgctcaccttcatcatcaaccaggtgcgtgaagtagtgatctgggggcgcctgccggactggactggcctggccatctacaccgtgatcgcttgcgtggtcgccgtcatcggccaccgcctgttcaacaagctgcgcgtggggtttgccgatgtcctctga

SEQ ID NO: 505399 - DNA, 1359 bp, Stenotrophomonas maltophilia
atgtcctctgaaactgccctggccgagaccgtcatccaggtcaacggtgtcggcaagtcgtatcacatgtacgagcggccctcgcatcgcctgtggcaggccctggccggcaagcgcaaatccttctacaaggatttctgggcactgcgcgaagtcagcttctcggtccgtcgcggacagacggtaggcatcgtcgggcgcaacgggtcgggcaagtcgaccctgctgcagatgatcgccggcaccctgaaccccaccgaaggcagcatcacggtgaaggggcgcgtggccgcgctgcttgaactgggcagtggcttcaaccccgagttcaccggccgcgagaacgtctatctcaatgccaccatcctcggcctgacccgcgcgcagatcgaccagcgtctggagagcatcctcgccttcgccgatatcggcgagttcatcgaccagccggtacgcagctactccagcggcatgtcggtccgccttgccttcgcggtcatcgcccatgtcgacgccgacatcctgatcatcgatgaagcactggccgtgggcgatgcgttcttctcgcagaagtgcatgcgcttcctgcgtgagttccagaagaacggcacgctgctgttcgtcagccacgatgccgccgctgtcaccaacctgtgcgagaacgcggtgtggctgcagaacggacgcatgcgcctgtcgggcacctcacaggaggtggtcgaggcgtacatgaccgagcaacatgtggtcggccgtcgtgaagtgggtggcgaaaccatcgtggtcgagaagaagcagcgccgcagcactgctgaagctcccgatttccgtcgtgatcagttccgcgacgagggtgtcatcaaccgcatcgcgctgttcgaattcgatccggagaatgtggggcaggagttcggcgcgcagggcgcgcgcatcgtcgacgtggccatccgtggcgacgacggcggcgcactgaccctggtcgaagggggcgagctggttaccctgcaggtcacggtgaagctggaggagtcgctggacaacctcattgtcggcttctacgtgaaggaccggctgggccagcgcctgttcggcgacaacagctatttcgcctgcaaggatgcgccggtgggtggcgcggcagggcagacggtgcgggccacgttccagttccgcatgccggtgatgccgtccggctcctacatgatcgatgcagccgtcgcctctggcgacctgcatgaccacacgcagcagcactggatccacgacgccctggagttccgcgcgctggacgaaaccatgcgctttggactgatcggcatcccgatgctgaatatcaccttgcagaacaacgatgtctga

SEQ ID NO: 505400 - DNA, 3411 bp, Stenotrophomonas maltophilia
atggcagacgagttgatcattgaaggtgcggcggatccgaccgcagccatttttcgtcacggtgcaatgttcacccgcccggagtttctggagacatcgggctggctggagcatgttccgtttgcattctgggtgatccaggcgcatcggccgcgctcgcttgtcgagctcggttcccaccgtggcatctcgtatttcgcgttctgccaggcggtcaaggagatgggcctggacacgcgctgctatgcggtcgacacctgggaaggtgactcgcaggctggttactacgaaaacgatatccatcgcagcgtcgtcgagcgcaacgaacgcagctacgctgcgttctcgaccctgctgcggatgaccttcgacgacgcgctggacgaagtgcccgatggctcggtcgacctgctgcatatcgacggcctgcacaccttcgaggcggtctcgcacgacttcactacatggctgccgaagatgtcctcgcgcggcgtggtgctgttccacgataccaacgtgcatactgaaggctttggcgtccagcgcttcttcgcgccgttgcgcgagcgctatccgagcttcgagttcctgcatggcaatggcctgggcgtcatcgctgtgggcggcgacattggcgagaccatgagagcactgttcgccagtgctggcgtgccggccgccgaggccttggtccgtggtgcgttctcacgcctgggcgcagcctgcaccgatcgcgtttgtgccgagactgccgaggccgaagcatcgcggctgggctcggagaaggaatcgatctacgcctgggcactgtcgctggagtcggagctggaaggctccaagcgcaactaccagcgcctggaaggcgagttcgacgagcgcacgcgctgggcgctggagctggaccagatcgtccaggccagcggtggccacaacgccattgctgaattgcgtgaacgcaacgatgcgctggaggcgcagctggaacaggtgcggggcgagaaggcggacgtcgaagctgacctgcgacggcaccaggaggcatcgcagcacgaagcggccgagctgcgccgattgctgcagacggctcatgagaccgctgccagccgttcggaagtcagccgtgagctgcagcggcgctctggtcttgccttccggcccggtgcggaaggcacctccgagctggaagtgcagcgcgtcatccgcgaatacgacgagcagctggagagcctgaacgatgctttcacaaaagtgctcgcttccaagtcctggcgcatcacgcgcccgatgcgcttcgcttcgcgcctgctgcgcggggatgtgcccgccattatcgcgtcgctgcgtgcaagtggcttggcgcgctacccgctgctggcaccgctcgcacgcccggtgcggggctggctgctgcgccatgacaagggtcaggtcgagccgcctgccggccttgcactgccgtcagtggtggaagacccggacgaagtgctgaagaccctgtccttcccggagcatgaattgccggaagtcagcatcgtcattcccacctacggcaacctgccgcacaccctggcctgcctgcgctcgatcgctgcgcatccgccggcagtgagctatgaagtcctggtgctggaggatgcctctggcgatcccgagatcgagaagcttgtgcctgtgccgggcctgcgcttccatcacaacccgcagaacctcggcttcctgctgtcctgcaaccaggcgctggaactggcccggggccgctacacctatttcctcaacaacgacaccgaagtacgtccgggctggatggaccagatgctggacgtgttccagcgcatgcccgactgcggcatggttggttccaagctggtctaccccgacggccgcctgcaggaagccggtggcatcatctggcgggacggctcggcctggaactacggccgcctggataacccggccgacagccagtacaactacctgcggccggtggactactgcagcggcgcgagcctgctcatttccagcgcgctgctgcgtgagctgggcggcttcgatcccgagttcgtgccggcctactgcgaggactcggatctggcgttccgcgtgcgcaaggcgggttaccagctctactactgcccgacctcggaagtcgtgcattacgagggtatctctcatggcaccgataccggcagcggcatcaaggcctaccagattgccaatcaaaagaagctgcgcgagcgctggcaggacgagctggcacggcacgaagccaatggcgagcacgtggtgctggcgcgcgaccgtgcctggcagaaggaaacggtgctgatcgtcgaccactacgtgccgcagcctgatcgtgacgctggttcgcggaccatgatcgccttcatcgatgcgctgctggctcgtggctgcgtcgtcaagttctgggccgacaacctgtatttcgatccgatctacaccccgccgctgcaggcgcgtggcgtggaagtgatgtatggcggccagtgggtgggcggcttcgcgcgctacctgggagaaaacccgcacgtgcgcacggtgatgctgtcgcgcccgcatatcgccgagcattacatcgatgccctgcgcaagcacccggatgttcgcagcgtctactacggccacgacctgcacttccgtcgcatggacatggaggccaagcgcaacgggagcagcgatggcgatgcgcgttcgatggagctgctggagcggcgcatctggaaagccgtcgaccgcgtcctttacccgtcggccgaagaggctcaggacgtgcgcgtgctggagccatccgttgatgcacgcgcgatcctgccgtacgccttcgaccacttcaacgatgacgccgtgcccgcgcagcgtgccggcatcctgttcgttgcgggctttgcccacggccccaatgtggacgccgcacagtggctggtcgagtcggtgatgccgcaggtctgggcgcgccaccccggcgtgaagctgtcgctggtcggctccaacccgaccgatgccgtgcgcgccctggcaggcgagcatgtcgaggtgaccggcttcgtcagcgacgaggaactggcccagcgctacggggccgcgcgcgtggccatcgtgccgctgcgctttggtgccggcgtcaagggcaaggttgtcgaagccatgcagcagggtctgccgctggtcactacaggtattggtgcccagggcctggtcggcctggaggcggtagtcactgttgccgacgaggccgatggcctggccgcagggctgttgtcgttgctggaagatgatgcgctgtggctgcagcggtcgcgtgcagccgccagctactgccgcagtcagttctcgcgcgatgcactgggccgtgcgctggaatcggcattcgcaatggagaagaaggcatga

SEQ ID NO: 505401 - DNA, 699 bp, Stenotrophomonas maltophilia
atggccgctgacgaagtactgattctggccggcgggttgggcacgcgcctgcgggcggcggtgcccgatctgccgaagccattggcccccgtagccggtcggcctttcctggcctatctgctggaccgctacgaggcggccggcatgcggcgggtaatcctcgccatcggctatctcgggcagcacgtggagcaggcggtgggcgcccggtggggagccatggatgttgtgtactcgcgtgagtcggaaccgctgggtacgggcggtgcgatcgcccaggccgcgcggctctcatcgggcaatggcctgcatgtgtgcaacggtgatacctatctggagtacgagccggctgcgctggagagcgccgccgcaggccttccgattgccattgcactggcatcggtgcccgacgtagcgcgctatggcgcagttgatgtcgaagacggccgggtgcgcaggttccgtgagaaaggcggtggcggtccgggcctgatcaatgcgggcagctacttccttacccgccaagggctggaagcattgcctgtgcaggatcgctactccttcgagcaggatgtgcttgaaccgtgggtggtgcgggggggtgtggggatgatggctgagacctccgggttcatcgatatcggggtgcccgaagattttgcccgggcgcagcatctcttcgctcgcgtacagcgatga

SEQ ID NO: 505402 - DNA, 588 bp, Stenotrophomonas maltophilia
atgccgacgccgatcctcaacccgtgtagtgccggcggtctgcctccttcgcggcgcgccttgctgcttgaccgcgacggcgtgatcaacgtcaacttcggctacgtgcatacgcctgaaaccactgaatgggtggagggcattgatgccttgtgcgtggcagcccagagtgccggtttcggcctggtggtggtgacgaaccaggcggggatcgggcgtgggctctacaccgaagcgcagtttgctgactacaccgcgtggatgttgcggcagttgtccgcgcgaggcatcgatatcctgcgtgtgtactattgtccgcaccatcccaccgccggccagggcatttaccgggcgcagtgtgcgtgccgcaagccagcgccggggatgatcctggccgccgcacgggatctggggatcgatctggccggctcggtgatgatcggcgataaagcgtcggacatgcaggcggcgctggccgccggtgtggggcgctgcatccagattgatgatccattggatgcgcgtctgcccggggtggcttatgtacgcgatctcagccaggcgcgcgaggtcctgctgggcgcttga

SEQ ID NO: 505403 - DNA, 1053 bp, Stenotrophomonas maltophilia
atgaaccaggatcgccaagacgtgcccgagccagggcataccttccatccgtccgcggcggcgggggagctttcgccagcggacagcagcggtgaagccgctgacatcgctggcacggagggggcgccaagcgcgcatcacacatcgcaggcagatgactatcccgaagaagacagggagccggatccgccgttgattcaggcgccttgtccgctgtgccaagaggctgcaccgttatacacaacgatcgatgcggtggcgtatcacgcctgcgcgacctgcgatttcatttttgctgatccagtgctgctcgaccgcatcgatcagggcttggccgcccgcgaatacgatgcccagtactgggcagctgaactggcatcggcgcgacagcgctcatatggatcatccatggcccggctggcagaggcgctgctctactgcactgttccggttgagcgattcatcgatatcggtactggtcccggatatctcctggatgcggtttcccattatcttccgcactccgcacagcgtttctatggggtggaaaagtacccgccggcgcagcagtatcgcaccggcaatgccaattatctctgtgccgacctcgctgatgtccagatgacgttccaatgcggaatctgcgtggaagtcctggagcatctcaccccggcgatggccaagggcgtggctgcggcgatggccaacgtctccgggcctgggtcgttgttcctgttcaatacgggcctcaccgactatgtgcgcaacgaggaccccgggtatctggacccgtacttccgtggccatgtcacatgctggtcggtaaccgccgcgcgccggatctttgaacctgtcggcttccaggtccacccgttgcctgggaagacctgggcattcatcgtggaaatgccggggccatcggcacgcgcggcaattcccatgggtgatcgcatctggacacctgaaccggagaacgtggacatcctggtttccccgcagaccggggagctgatgcatattctgggcagggaaagcgcgcgcgcctacgcctga

SEQ ID NO: 505404 - DNA, 2418 bp, Stenotrophomonas maltophilia
ttggcgattttcggcacgttgctcatcggcgcgctgcgctggctggtgatagacggcgctcccgggcctgtgggcatcctgctggatgtattgtttgctggcctgttcttgttgctggtgcgtggcgctggggccagtcgtacccaggcggtggcggcggtggcaatctggctgctgcttttccagttggcacacattcttaagttatccgcactgggctcgccggtcttcttcagcgacatcttcactttgggtgtgctcgccagcgtgctcaagccgtggcaagtcgtgctcgctgccgtgacggtgctgttgctggcctgcgtgctgctgtacggcgtgtggccgaatcgcctgcggcgcttgccatggtcgatcgtggcattgctgctgcctttggcgctgtacttcggtgcaccttgggaagcacgcatcgtcgatgccgtgctgccggcgcccgccagcgactacgtcacccatctgcaacgacgtggtggcatgcagttcctgttggaccagcgggcgcgtaaatatgagctcgcgctcaagggccgtaacgtactggcagggctgcggctggacgagcgcccgcagttggcagcacgacggaatgtgcaccttgtgctactggaaaccttctgggaccccatggcattgaaggccttccagttcgaccgggaccccttcgatcctcggttccgcgcgatgctggagcaggggggcaattcggcggtgatgacgccgcacttcggtcacctcaccgccaatgccgaatttgaagcgctgtgtgggctgccggccaccgaggatgcggtgttccagagccgtatgaaggatgtgttgccatgcctgccgcgcctgctgcgcgagctgggctatgagacgctggcctcgcattccaatcatcaggattcctggggccgtgataccgcttataagtacatgggctttgcacagttcaatgcctatcaggcgttcgtgcgcgacgatctggacggcgtgttcctgaacgacgccagcttctttcggcagaaccgcgaggtgctggcgcggatggatcgctccaccccccacttcaactatctggtcaccatcagttctcactatccatatcagctcaaccacgagcggcggccgcctctggtacaggtcacgccgtccaattccatggtgcagaactacgccgatgcgctggcctactcaagcagggccttcatggattgggtcgaggcggtgcgcgcggacgatcctaatgcgctgatcgtggcatttggcgaccacgctccggccatgccgccggaccaggcgccgtatgcaatgtccggcatcaataccagcagccggccattcgacggtgccgatacgctggtggccatgtcgcgcacgcctctgattttcatcgacggccgcaagggcgcggtggatgtaggcaccatgcccttggagttccttccggtggccattacccgcgcgctgggtgtgatcccggggcggctgccctatctgaccgatgacatggtgagccagcgggcccacgacagcacccgcttcctgggtaatgttctgaccgtcgacaacggccaatggcagctatgccgcgaggcaccggccaaaggcacggcctgcgccgaggcggtgcagctctacgatcgcaagcgggcgttgcgtaatgtgctgcttgccgagtcgcgcgcgaacttcaatgcgttgggtggggcgtggttgaacatggctacgccgatgcagttcggcagcggtgaatgcctgctggaggtcagcgactggggcccgaaggatgccgtcgccggggcgccgttcaacaagcagaaggaaagtggcctgagcgcgacctggatgaaggttgcgcgtatccagggcagcccacagctgcgcattggcgcggtgaccactccggtggtgggttccggtgacatcctggcgggcttgtggccggcgcccagcgtgatcaaccaggcaggaagccagccagtccaggtgatctgcggcggcaaggtggtcaacgtattgggtgacatgcaagtgcgcgcagccccgagcgcggcaagggcgatgccggccactgttactggtcctttgaaggtggtgctggaggggcagggcatggcctcggtctcagccactgcggtatccggccagtgcacggcgcagggcatgcagcagggtgtggtgcgcgtccagtggtcgcgtacgccggttgccggtgacggcggcatgcgtgtcctgatcgagcaggaagggggcgagcgccagctctggagcgccagtggtccggggggcgagtctacgacggggccatgggcgacggaaaatctgaagctttggtttgaagatgccggtggtggcgagctggggtcggcggtgctcagcgcaccgtcctgcatggtagagccgtcttaa

SEQ ID NO: 505405 - DNA, 1770 bp, Stenotrophomonas maltophilia
atgcatctgtccgactattgggtgcggccccgcgttcagataattgtcggcgcgatggccgtgctgttctttgccattgtccaccaggtctatctgggcagggcgcacccggacgcgctgtacatggactcgctgcggctgctgttccagctggaccagtgggaagccggcaccctgtcgacgcttgacttctggggccagagttcgtcccatcgcgggtttgtcaaccagctgttcctgctgatcaatgtcaatctgttccaccttgacgtgctgttgatcaatcggatcacgggtctggttaccgccaccgtagccttgatactggtgcttgcgtggtgccgggacagcagtgcggcgcttcgtacgcgttccgatgcgctggtggtcatggcggtgtcgatcaccatcgcagggttgtgtcacagctgggccggcttcgagctcttcacgctggaccttggcttgcctctgtgggtaaagaatctgtgtttcgtcggattcttcagcctgcatgcgcgcctgctgtcaggggcctcgcggcatccacacctgttgagcgcgttgctggccgtgctggcggtggtggtggtgctggtggtcggcatgggctggaactatgccttcatcggcgcggtgctggccttgcaggtgctgtccatgctgccggcatggcgcgcgccggggcgctggtacggcctgcttccctgcgtgtcgatgctggcagcgttcgcgctgtacctggcgtcgggcacggtgactgacgccgccgtgcaagccaacaccttggcgatcagtggcgatacacccttgatcaccctgtatgcgctgggctccaccattggcaatcctgcggccatcacgcagcggttgccggtctgggtgattgcggttgccggcgcgggcattctgctgaccggactcattgccgtgctggcctggttgcgccgcggtgcgcctggctcgcgcctgccgatctacctgatcgcttacggcgcgctggtggccttctcggtcaccctcgcgcgcggtgccgacggtccagggggggtgatggcatcgcggtactacatggatctggtgttggggctgatcggtgtggtctggatcatcgtgcgtgaactgcgcgcgctgggaagcacgcggaatgcagcagtgctggtctggggcatgctggctgcgattggcgtgatgcatctgggtacctattactacgaatggcacgctgctccctatcgggcgctggccttcgcagacatgaaccgggcgctgttgaattccgtgcctgatgacaatgccgcagcgctcttgcagtctccgctgtcgcatgcgaggcagggcgtggaaatcatgcgcgagcgacagttgtcgatcttcgaaggtcatccggaactgcgttgttccggtgccgatgttgcgtttgcgcagggctggcgcaaaccggaaacgcaggggcgctggttgaagaccgatggcgagcttacgctgccgaagtcatgtgcatgcgaagttgtagccgatttctacgtgcccatggtcttccacgcgcgccgcgtcgaagttcgtcgcgccggccagatgcagagcgtgtcgatactgctgcccggacagaccagcagtgttgaactgggcaaggccggtaccgaggcaagggttgtgcttcacgccgcacctgcgccggaccacacccctgccgaggccggtactgcagacgagccggaactgggcgcgctgctgaccggcttctcggtgcgctgcgcggtgccctga

SEQ ID NO: 505406 - DNA, 447 bp, Stenotrophomonas maltophilia
atggccagcccgaagaagcccgatgcgccgttgttcagtggggaggctggcccgctgcagcggttgatcagggatcagcgcgtgctgttcctgctcgttggcggtgccaataccgccttcagtactgcgctgtttgcagcgctgagctggttgctggggcccagcgtgccctcggcggtcagcctgttcatcgcttgggtcgtgtccctggtgttggtgttcaacgtataccggcacctggtgttccgggtcagtggccatgtgctgcgtgactttctgcgatttgtcggggtcaatacgctcagtttcctgttcaacgcaggagctctgacgctgctggtggaaggggctggtctgccagccattccgacgcagatctgtattaccgtcgtggttgtggtgttcaactacgtcggccacaagtatttttctttcagaaggacgtga

SEQ ID NO: 505407 - DNA, 849 bp, Stenotrophomonas maltophilia
atgcaggctgaactggggcgggtgccgcgcgtgtcggtggttatcccggcctacaacaatgggcgtgatatcgccgcgaccgtgcgctcgatcctggcccaggattacctcgatttcgagctggtcattgctgatcattcttcggccgacgataccgctgcagtcatcgcctcgttcgcggacgacccgcgcgtgcgggttctggagcctaccccggccggaggtggggcgcaggccaactggaatcgggtcagccagcatgcacgtggcgagttgatcaagctggtgtgcggtgacgatctgctggcgccgcatgcgttgcgcatgcaggtggcggccttcgatgcgaacccgagcgcggtgttcgttgcttcccgtcgtgatctggtcgatgcagggggcaagcaactactcaaggcgcgcgggctggcgggcctatccggttgcattcccgggcgagaggccgcattggcgtccattctggctggcaccaacatcttcggcgaaccctgctgtgtgatgctgcgccgggacgcgttggagcaggccggttggtgggatgcgcgtttcccgtacttgatcgaccaggccagctacagcaacgtgatgatccagggggacatggtcgcgctaccggaagtgctggccagcttccggatcagtgccagccaatggagcgtgcgcttgatgcgccagcagtccgagcaggctatcgctttccatgagtcctttgcgcgcgaacatcctggcctggctacgtcggcacagttgcggcgtggcaacctcaaagcgcgcgtgatggcatgggctcgccgccttgcctacatgtggctgcggcggcgcatgtaa

SEQ ID NO: 505408 - DNA, 957 bp, Stenotrophomonas maltophilia
atgaatcctgaaatttccgtcgtcattcctgtctatggcagtgcttcgatcctgcccacgcttgtgcagaagctcgaacaatcgctacgtggcgtcgccggcgctgacggatttgaggcggtgctggtacatgatcacggccccgacaattcgtgggaggtactgaaggcactcgccgccgaccgcccttggctgaagggaatcaacctgcgccgcaacgccggccagcacaatgccgtgatggcagggtttgcccatgcacgggggcgctacatcatcaccatggatgatgacctgcagcacgatccgaacgacattccgcggatcgtcgaagcgctggaagccggcgcggatcttgtctatgtgcgcttcgaagcgcgccagcatgcattgtggaagcgcctgggcagccgcttcaacgactgggtcgccagccgtctgctgaacaaacccaccgggctgtacctgtcgcctttccgtggcattcgccgcgaggtttgccagaccgcgctgggttacagaggcccgttcgtgtacgtggatggattgctgctgcagtccaccagcaacttcacctcaatcaccgcgcgccaccacctcaggcaagacggcaagtccggctacagcctgcgcaagtcgattgcgctgtggatgcagatggctaccagcttctcgatcgtgccactgcgcttcgtgtcgctggccggcatcgccgcctcaggcgccgccttcctgttcgccctgatcgttgtggcccgcaagctgatgaatccggacctggccgtgggctggtcttccttgatcgtcgccatccttttcatgggcggcctgcagttgctggccctgggggccatcggcgaatacaccggccggatcctgctcaacgtcaacaaccgcccgcaattcgtggtgggtgagcgttgcaacctggacgccgaccccaccatcgatagctga

SEQ ID NO: 505409 - DNA, 690 bp, Stenotrophomonas maltophilia
atgatcctgggtagcggcttgatcgcgcgtgccttccatggctttgccgatgatccagacacccttgtctttgcgtcgggcgtgtccaactccggcgagcgcgacgcggctgtttttctacgtgaacgcaccctgctggagaccgcgcttgaccagtcaagcaagcgcctggtgtatttcggcagctgcaatgtcgtcaatcccgaacagaattccccctacttccagcacaagcgtgacatggaaaagcgggttctcgactcgggcaagggcgtggtgttccggctaccgcaggtagtgggccgcacccgcaaccccaatacactcaccaattatctgcgcgactgcatcgtgcaggctcggccattgacgttgtggacgcgcgcccagcgcaacctgatcgacatcgatgacgtggccgccatcgccacacgactgctcgcttcaagcgacgcccctgcgctggcctccatcgcctcgccatggtcgctggccatgccgcacctggtggagctgtttgaacaggtactggaaaagaaggcgatcgtgcagctggtcgaacgtggtgagcacatgcatgtggacagctcgctggccgaggccgttgcgcgcgacattgggctggatcttggtccagactatccccttcgcgtgatccagaagtactacggcacccctcatgaatcctga

SEQ ID NO: 505410 - DNA, 858 bp, Stenotrophomonas maltophilia
gtgacactaccaagggaataccagccgcaggccgacgaacttctctaccactattgttcgcccgagacattcttggctatctgcactggcaagaagattcgtttctgcgacatattctcgatgaacgactatctcgagatgcattggggctacaacatgtggcaggaagcagccactcagctcgtaggcactctaggacaggaatttctagatcgagtggacgctgtgataagtggctcaggcttcgctgcccttccacttgcttcctgcttttccaccaagggtgacacgctcagccaatggagagcatacgcaagcgacggcctcggcttctctattggcttcgatgcgcagcggattcttgagctgcctgcgagtgctctcgcggtctgctacagcgaagagcaacaggtcttcgagataatacagtacatcaaagccgctcactgggtgatgcaggaagaaccagagaacgatacaaagctgtttgagctagcgttccgactggcaatggacttgagctcttacaaaaacccagctttcgccgaggaaagtgaggtgcgactggtccacttgagccgatatgaagaatcggggaacggccgaaagctgatcgatatgcaaggatcagcattcggcgaggactacgccccgcagccgatcaagttcctcatgaaacaaggatctcccgtggcacacatcgacctcgacttcataggaccggccggcgagaaccccatccgcaccgtcatagtcggcccgaagaatcaaagcttgaccacctccatctccatcatgctggagacgctcgggctgtctggggtggacgtggtgaaatccaaggcatcgtatcgctga

SEQ ID NO: 505411 - DNA, 1041 bp, Stenotrophomonas maltophilia
atgggacggaaaccgagtaagccgggggcaatcccccggttcaggccacgcaagcagaaatcgggcgtgacccactattactatgaccacggcggcaagccgaggcgcgaaacacccctcggcagcgactacggcgtggccatcaagcgatgggccgagatcgaacacgcgagcactatccccgcagcggccgtcgtgaccttccggcacgttgccgatcgctaccgcgccgaggtggttcctaccaaggccgtcaccacccagcgcctcaacaatcgctgtatcaccgcgctgctgagctacttcgacgcgccgccggcgccgtttgaagccatccgcccgatcaacatccggcagtatctggattggcggaaggcgaaagtgatcgcgaaccgggaggtgtcgctgttctcgcacatctggaactgggcacggggcaagggaatcaccgatctacctaacccatgcgagggcattcgtcgcaacaaggagaccggccgcgacgtgtacgtggacgatgactctttccgggccgtctatgcacacgccgacgcagctctgcgcgacgctatggacctggcctatctcaccggtcagcgcgtcggcgacgtgtggtccatggacgtgcgtcaggtaacagcgcgcggcctcatcatccagcagtcgaagaccagcaatcgcgtcaccatggagatcacgggcgagctggctgcactgctcgagcgcattgcaaagcgtaagggggagaagtgcccgaacgggcgagagaaggtctacagcacgcggctgatcgtggacgatgacggcctggccctcggtcgggcggcgctccgctaccggttcgacaaggccagggaggcggcgggtattgcaaaaggggaattccagttccgggatctccgcgccaaggcgggcacggacaaggccgattcggcaaaggacattcgcgaggcacaggcccagctggggcattcatcggtcaccacgaccgagatctacgtgcgaaagaagcgcggctcgaaagcaacgcctacccgctaa

SEQ ID NO: 505412 - DNA, 294 bp, Stenotrophomonas maltophilia
atgacccaggaacatatcagccacccggaagggttgccgaactgcgccgccggccaccgcgcgcgccacatccacgacaagcgctgcgcttccgctggcggtggccacctggtcgagtgcgcctgcaggtcgaccagcaagcatgccgaccccgacaacgccatcgccgcatggcgtcggctcaaccgtccggcgcgcagcgcgcgggcactgtcgccggcagctgttgccgacaacgtcgtacagatgcgcctggtgatggcaggcggagggaaggtggccagtggcgtctga

SEQ ID NO: 505413 - DNA, 555 bp, Stenotrophomonas maltophilia
atggtccagaagaacaaggccgctctagcgcttccgctccgcctcaagctcgcccagcacggccgccaggccgcgattgctggcaatagctcgatcatgccgggtctccccgggctttcccgcattgagccattccttcgctcgcgtccgaagcaccaggtttgccgcttccagaacgacctgatggcgagcatttctctgcccattcgcgagccgagggccgaacacagtcagcagcgtcgcgcccggctccagaagctgttgcgcggcatcgccctccaggtgctcaccgtggtgaacctgcctagccagtgcgtccaacagatcggccagcgaccggtcagcgccaggagccatagccgcacggatctgctgcctttgccaatgcgtcgtcggcctcttggccaataccaagtcctgaacatcagcactcagtcgcagagcgcccgcctcagccttggcgcggagccacaactccgcatgcgtcgagttcgcatattgactcatgcactccagtgtagcgctagccatcccccacgtttccatcggagctga

SEQ ID NO: 505414 - DNA, 213 bp, Stenotrophomonas maltophilia
atgaccagcatcgttcgcaacaacctgctgacacgagagggatacacgccgtattgcgggcaaccgtcctgcagcgccggcatgccccgcactacctgggacggcgagcagttccgctgccgatgcggctggcggtccagcttccctgccgatttcatcgccgattacaaagcagcctggccgcagctgcgcgttgcgctgaccaggaactga

SEQ ID NO: 505415 - DNA, 207 bp, Stenotrophomonas maltophilia
atggctgaccagctgctcaccgctgcacaggccaagcacacagcgcgcgtcttcctcagcgaggcgcgagcccggcgcaatggccttggctactggttctcgttcaacgcggcacagcgcgcacggatgcgtgccgcagctcccgcccaattgccgacgccgcagcgcgcaccagcactgcccgcccaactggacctgttcgcatga

SEQ ID NO: 505416 - DNA, 195 bp, Stenotrophomonas maltophilia
atggccacgctcgctcttggcgtcttcaaggacctcaccccagccgccttcgcactgctcccgctgggccgggtgaaggcccaattcggaaacgtaagcgtccagatggatgccagcgaagccgaacagctcgctcaccaactgcaggctgcagccgaacaactgcgcgccgcgcagcagggcgccgccgcatga

SEQ ID NO: 505417 - DNA, 312 bp, Stenotrophomonas maltophilia
atgaaccatccagcccgctccactgatccgcagtccagccacatcgccgccgtcgacctcgctgccagcggcgcgctgcgcgtccagcacgccaaggctgaggctgcggtaatccgccatccaggccacagcagtctgcacctgtcgacgctgactggccttgaccgccacatgctgggccgtcgactgcccgagttggcccgagaggggcgcatttggcgcggcccaagcgcgccgtgcgcaaccaccggcaagcccgcatgcacctggtggccagtggcgccgggcgaaaacatgacgctggggctctga

SEQ ID NO: 505418 - DNA, 894 bp, Stenotrophomonas maltophilia
atgtcgaccatcatcatgtcccagtgctggccgctgcagggcctgagcgtcacgcagaaggcggtgctgatctcgttggctgatcaggcgaacgacgacggcgtgtgctggccggcggtgggcaccatcgcagcgcgctgctgcatgtcggcgcgcgctgtgcgcacggcaatggatcatctggaggccgttggcctgctgacccgtgaccgccggttcaacagcagcacggtctacaaggtcactccggccaaattcgacaaggccgctgcgccgtctaaggctggccggaagactggaaagacaggtactgcaccgggcgcaggggctgcgccccatgcagggggtgcgcccgctgcaggaggggatgcgccccatgcagggggggatgcaccgggcgcaggtctgggggtgcgccccgtgccgcctaaccgtcatataaccctcaatgaaccgtcaggtgaaccgtcatttccggcgggcctgccggccgcgccgctggcggtagattccgaaaccgacctgcaggcggcgtgccgcgccacctgggcggcatacgccaccgcttaccgcacccgccacggtgtggcgccggtccgcaacgcaaaggtgaacagcaacgtccgccagatcgtgcaaaggctcggccacaccgaggcgccgttggtcgccgcgtggttcctgaccgtcaacgagcgctacgtggtgcagaacatgcacgacctgggcgcgctgctgacgaagtgcgaggcataccgcacgcagtgggccaccggccgccagatgacgcaggccagcgcccagcagcaggaccagacgcaggccaacgcctcggccgctgacgacgccaaggcgctgctgcgccgcatgaaggaaaacgccaatgctcagtga

SEQ ID NO: 505419 - DNA, 672 bp, Stenotrophomonas maltophilia
atgctcagtgatgccgatcaagacaggctcgtcgaaatgctggtggccacggctgaggtgatgggcgagcagatccgccccgccgctgcggcctacatggtcgccgacctggcgacctatccgctgccggtgctggccaacgcgctgaccgcctgccgccgcgaggtaaaaggcaagctcagcctggccgcgatcatggagcgcatcgacgacggacacccggccccgaacgaagcatgggccgtggccatccgcgccgccgacgaggcggtgacgctggtgtggagcgagcagacccgcgatgcatggactgcggcgctgccgctggtggaggctggcgacaagatcgcaggccgggctgccttcctggaggtctacacccgattggtgaaggaggcgcgcgctgtaggtggctgtgccgtctaccagccgtcgctgggccacgacgctggtgcccgcgacgccgcgcttcagcaggccgtcaacgccggacggttggcccatgaacaggtcgctgagtacctgtcgctgccgccggccacgcctgcgttcaacccgctggcactgctggcgggccgagtggaggcgagcccggaagcaaacgagcgcacccggcagcggctggccgagatcgccgggctgttcggctccgctcaggacgctgcggcatga

SEQ ID NO: 505420 - DNA, 195 bp, Stenotrophomonas maltophilia
atgaggccggaccacgtcgagctggaagtgcgcccggtgtccgagccggtggcggtggcaggctggtatctggcgtacggatacgggatcaagccgctggtgctgtacgccacccgtggcacgcgcgtgtggcgcgatggcatgcgccagatcccgattacccgctatgccggcccgatcccggagcttcgctga

SEQ ID NO: 505421 - DNA, 717 bp, Stenotrophomonas maltophilia
atgggagtgaacgaggcacgcgagctgctggcaagccgcatggggccgaaaacgcagaggtttgacgcgtgcggcggcggtggacgccccgagctgacgacgcaggacattgccgccgccatggcgtacgtacaggacgggcttggccgggagctgatggaggcgctgtggtggccagagagcgcttctcgccgccgcgagcatctgcgcaaagcggtaatcgggctggtggccccggagttcatccggaagatgcacggtctcgctaccgcacgaactgagttcggcatcgccaaggcatgcatggggtggggtggcggccaggtgacggatgcgcagcggcgcgaactactgagggccgagagcgcgctggatgaggcgcgcgctgcggcctggccgaacaacaccatggagcagcttggggtgctcgccggcgcagtgattgcggaaatggccagctgcggctgctgcaagtcttgcgagggcacgcgggttcaggccgcgccgacggggagtggtgtcattgaatgcgaggcatgcggcgggatggggttggagcagctcagcgggcgcaagcgcggggtggcgatcggcgctgacgatgcggcgtatcgacggttctggcgcccggtatacgagtggatgcttgagcgcatgcgcagtgcggagcatgttgctgccgagcagttctcccgcgcgctgaatcgcgctgcgtag

SEQ ID NO: 505422 - DNA, 237 bp, Stenotrophomonas maltophilia
atgaagaagaccgcgctgcggccgagaccgtccctgctgctgttgtggctgacctgcgcgctggtcgtctccagttgcgcgacgacctcgccacctgcaataccgctcgcctgtccgaagccgtcgccggcgccgtcgaacgtgaccaggcagcccaactacgagcagaggtcgcgggcgctcttgttcaaatcggacgagacgccgacgaccatgtccgggcctgccaggccgtga

SEQ ID NO: 505423 - DNA, 291 bp, Stenotrophomonas maltophilia
atggacgttgcacagattcaagctctcgcagctgagctggccaccgagcgtgctgcgcgcgcggctgctgatgctgccttggctactcgcattgacggcgccaccgacgctcgtatcgatcgcttgattggggccatcgagacacagggcaatcagatcggcgagctggccatgcacgtggggctgctcgtgcaggcggtggcgcagctgctgggcgaggaggccggtgcaccggtgcaggacgaaggtgccgagcctgcgcgcgtcgatttggacgggaagccctactga

SEQ ID NO: 505424 - DNA, 474 bp, Stenotrophomonas maltophilia
atgggacaggtaatcaagtcgaagcactcccagctgttcgtcgccatcggcgcggccgaggtcatcaaggtgacccgcctgcgttcggtcggcttccccgatggccaggcatcggagattgatatttccgactacgacgacgactgggaccagttcgtcgccggccgcaagcagaccggcagcaccagcatcgagatcatctacgacagcgtcgaccacgagaagctggaagagctgcatgagaccggtgccgtcgtgaactggctggtgaccgcgccgctgtcggaaaccgaaggcgtggccaagccgaccgccgttgccggcaagatcaccccgccggacaccgtactgtccaagcagttcgacggcttcgtgcagaacttcgcggtgaccagccaggacaacgacgtctggaaggcgacgatcaccatccgcggctccggcgccgtcaccacgcaccgcccgacgccgtaa

SEQ ID NO: 505425 - DNA, 228 bp, Stenotrophomonas maltophilia
atgcgagacattcgccagttcgaagttgtggttgccaagttccagccgcggcgcctagacgacttggtgccgggagtgtcggagttcattggccaagaggcacggtggaaggcgtgctggctgatcgaggagggtgagtatgccggcgagtgggcgatgacgatgcttcccgataacgggaagctcagcccgtttgcatgggtgccgtcgggagatcttgaatgttga

SEQ ID NO: 505426 - DNA, 330 bp, Stenotrophomonas maltophilia
atgaaacatgcaatcagattagcgtctttaatgctgctgtcgccggtgatgggttgcacggctgcaaaggacgacggcgcgaaacaggccctgcttaactgcatgagcgcgattcaggctgcatcattggacccgagaagcgcgaaggtgccctacgtgaaagacatgggatcggcgggcgagcattacttcgcctggccgttgggctcgggcctgatcctacccacaaccgatggctccgagaagcctgcttctgcgtcttgcatcaccaacgcgacggggatcgtgacagatatgaccattaacggatcggagatcccgattcgctga

SEQ ID NO: 505427 - DNA, 300 bp, Stenotrophomonas maltophilia
atgcctgggggcatccagaccttcaatctcgacgggtcgctggagattgattacacgacccgcttggggctgttcatcggcacggttcagaccgacgccgtgcacggcaattcgacttgggtagggccgctgccaccaggggacttcctcttctacgtggtgcctccgcctgcgcagcctggccgcacgccgaccgtttggtactcagatgggcgtgtgtactggggcacggatgtggacggcaatgggcagccagcctttaccctggtcccagcaactgttctttacggggtgcattga

SEQ ID NO: 505428 - DNA, 744 bp, Stenotrophomonas maltophilia
atgggcagccagcctttaccctggtcccagcaactgttctttacggggtgcattgaaatgctagtaggagggtttgaggcatacaccccgtccgggacggtgcaggtccgaagcgatctgctcaacttccatctgcgccacaagtgggatttcaacgaggcgggagccgttgcctaccaggtgtcagggatcgtggtaacccgatacgtcacgcgggacttccaggccaagagtcccgtagttgcggtcaccggtccgaacaacaacttcgggctcagcgtgattctgaccaacctcggtggaaacaactggcgagtgtcggcctacacgggctcatcgattgtgttcggcacggtgtgggtatacgactcggttgtgactggaacgccgggcaagaccggcatcgaggtgtaccgagagcacaccggcgagctggcttttgcttcttgggcaaagccccttcggatcgtaggcgtgacaactgccccgttcggggcggccgagggtgcgtacgttcaggtcccggctggtcggcgctacgctgtgatctcgtctcgttcgtgtcagcggattgagcgtggcgtgggcttccgcttgaccgggccgcagggcgatggaacgggcgcagcgggggcgggacgcttttactatgccggggcgactgccctgatcccgcagtccgacaacgccacacagttcagtgcatccggccacttcgtgctgatcgacgtgaccggccattga

SEQ ID NO: 505429 - DNA, 666 bp, Stenotrophomonas maltophilia
atgtgcggccgattcgtccagctccccctgatcgacttcggccagccggggctggctgaccttgcccctggcctggccgagatccagcccagctacaacctcgcgccgacacagcgcgcctcagtgattctggaccggggcgaaggccggcaggtcactcggctggcgtggggcctgctgccgttctgggccaaggccaagggcctgcagggctcaaccatcaatgcccgcatcgagacggtggccaccaagcccgccttccggtcggccttcaagaagcgccgctgcgtgattccgatggccggctactacgagtggtcggtgagcacgatcgacgagaagaaagacccctggttcatccacgccaccaggcccctgctggccgccggcctgtgggaggacaccagccccctgctgcccgacggcaacctgggaaccttcaccatcatcaccggcgacagcagcggcgtatcggccgacatccacgaccgcatgccggtgtggctgcatgccggccagatcgatgagtggatggccgctagtccggacgatgcgatggcgatgctgcttgccagcgagccgccggcgatggaagcctatcgggtgacccgggcggtgaacacgccgcggaacaaccgcgaggatctactacaacccgtggcatag

SEQ ID NO: 505430 - DNA, 642 bp, Stenotrophomonas maltophilia
atggaatcgacccaaacctggaagttcattcagacaataacccctgcgctaattggctttgcgggcgtctgcgtcggcgcgggcatcactgcactccgggagtaccttgtcggtaagcgcaagagcaaaagcgacggtgcgtacctcgcggcaatcgttggaggagcattagacactcttatttccggttgcagcgacgtggtcggtgatatcggccaggtggattccgaagggtacagtcatccaagaaccgagcatccccagttcgatccgctaaaactagacgttgagtggcgcaccattccgccggatctcttgttcgacattcaagatttgccctaccagctgcttttcgccgaaggggctattggcgccgccagtgagtacgccgcaacaccgccagactatgaggagttctttgaggagcgccaataccagttcgcgcgaataggactgcactgcattgatattgccgatcgtttgcgcgcacacgcgaagttgaccgctaggtcaaaggcctatcaatgggacccgaaagcgtacttccagcaaaagatcgacgaaatcgaagcccggcgtgccaagcctaactccttccccgattttgcagttgcggcgactgagccaactccgggcccttga

SEQ ID NO: 505431 - DNA, 486 bp, Stenotrophomonas maltophilia
atgtctacaaagagtcagcgcttacagaacataatcaagctctataagcagcgtacgggcaactcgtctgtcgtcatgcaggatgtagcgaagttcgctgccgagatgggctggcagcttcccaagcctaaagatcctatcgatctcctggccgaggaactgtccaaggccgctcgagaagagatccgaaaggatgaggtcaccggccgtccgtatcgtgcgaatcttgcagtcacgacgaacaagcccgacggcacgcagttcaccttctggactgacatcgacgaagctccgcgccatgtcgcgcatcgttcgttcacccagcgccgcgatcagatgatcggtgacgctcttcagctgacgtttgacgcgacccattggaaccgcgtccatgcagatgaggagccgatcaacatggtgctggacttcaccgacgacgtcgcggaaaagatgtccgctatggatattgaggacgaggcggcttaa

SEQ ID NO: 505432 - DNA, 1122 bp, Stenotrophomonas maltophilia
atggaaccacgtactcccggacagctcgttaccgccctccttaaagagaagggctggaccaaacgaaccttggcgatcgttctggcggtcgacgagtcagtcatcacacgaattgctgcagataagaagccgattaccgccgatctcgcacttgggctggaagagcttttccacgtcccggcagagcgctttttggcacttcagaaagactatgacttggcccttgctcgaatcgcctttcagcccagtcccgaacgagcgatgcgagccgagatcttcgggtcccttccgatctccgagatgatcaaacgggggtggctgaatgtggagaatccgcgagatgtggccgctgttgaagctgaggtcgcgcgattcttcgatgtcaaagctattcccgacattgagttcatgcctcatgccgcaaagcggactcaggtagcagcgaccgctacacctgcacagctcgcatggattcaccgagtgaagtcaatcgcggctgaaatgttggtgccgaaatacacacctacgacagggaaggccgcgatcgagagactcaagccgctcctacgttccgccgaagaagctcgaaaggttcctcgcatccttgcggaagccggtatccgcttcgtggtcgtcgaaacgttgccatcagcaaaaatcgatggcgtgtgcacctggctggctgatgatgcgcccgtcgtaggcatgtccatgcgcttcgatcgaatcgataacttctggttcgtactgcgccacgagttggagcatgttcttaggggcgacgggaagcacacgcctgccctcgatgttgagatggacggtcgaacggacgccacggtcgccgaagaggagcgggcggcgaatttggcggcatctgcatttatggtgccgcccgagaagctggccggcttcatcgcgcgcaagtcgcctctgttttctgaacgcgacatcgtagggttctctgcgctcttgggcgttcatcctggtctcgtcgctggacagcttcagcacgccactgggaaatacgatcgcttccggagccacttggtcaaaattcgttcgatcgtcgttccgggcgcatcgaccgacgggtggggcgacgtcgcgcccttgggtcagtag

SEQ ID NO: 505433 - DNA, 549 bp, Stenotrophomonas maltophilia
atggtgttcgcaggatctgcgacagtcggtcgtatccttccggccatgcgctcttccaacggcttccgcaccgccccgatcccgtctggctgggtccagaccggcgagcgctgggcgctctggtacaacggccgcgagacggccagcgtcacgcccgacggcggtcctggggtccggctatggatggaaggccagaagatgtggcaggtgaaggaagtgcgcgccgccaacgtccggcaggcgaagcggtacgccgagcgctggtgtgcggccaggctctatcccgatctgcccctgcgccaggcggttgcccggctgaccgacagcacgccgatccagccggagccgcccttgcccggcctgcctccaactcgcgagcagcagcaacaggctcggcgcttggccgaggctggggcgaaggaggtcgaacggatcaaggcggcgcttgagccgcgcaagttgccggcagagacgaaaccccgagcgagggacgtccgcaccaaggcgtgggtgagggcaggactggagcagcttcggcggagcgtctga

SEQ ID NO: 505434 - DNA, 453 bp, Stenotrophomonas maltophilia
atgaagaaccagaagggcttcaccctgatcgaactgatgatcgtcgtcgcgatcatcgccatcctggctgccattgcgctgccggcatactcgaactacaccaagaaggccaaggtctcggaagtgatcctggctgcttcttcgctgcgtaccgacgtgtcggaatacgtggccagcaacaacaagttgccgggcaccgactggaagccggaaactcaagctactcagtatgtcgcttctgtgaagtgggatggcgcgaagatcattgccgaagctaagggcatcgatactgcaaagatcgacggcaagttcatctacctgattccggatggttccaaggttgccgatggcgtggttcctgcttggaactgcactggtacgatcgacgcgcagtatcgtccgggtagctgccagggaaccgctccggctactagctcctccagcggcagctaa

SEQ ID NO: 505435 - DNA, 1170 bp, Stenotrophomonas maltophilia
gtgattagtcgtcctcattccgctgtctcacagaaggtgggcttctgtggggcagtaggggcggttttgagctttgcaggggcatatgccgctggcggcgacactctcgtgcagtggctgtcgctcatgttaggtgctgctctaccaatgtggtggcttgagtttcgtggcgtcgctgcttcggttgcaacgctggatcgaaaacaagtcctgctcggagtagctacgattgcagcattgcagtcggtgattctgacattgcaaatggaattgggtggtaggacaggaggtgctgtcgcgcaagtcctgccggtgttactgtgcggaggcagtgttctgcttatgctggctatacttcgacctgaactactaggcgaaacagtgccagcaactggaagggctgcattttcattgttgcgtggacgtagtatggcaaacgatgagcgtttggcagtcctcggttggggggtgaagtgcttctttctgcctctaatgctcgcttggtcatggaactggatcgcagggctcgagtatcagtcgcctagtattggcctaatttacttttattcgattggtatcagcctcctgtatgcagtcgatactgcatttggtttgatcggctacctctcgaccgccaagtgtcttggaggtgaaatacgttctgtcgacggtaccatttcaggttggctgtcagccttggtgtgctatccacctctgagtgccttggtggtcgatacttggttgattgcccgcaatgcgaaccactggcaggactggcttgaatcgagtggggttgtgtccgggctgtgggcaggctgcatcctcttgcttactgggatctacacttggtcaacggtcgcttttggtcctcgtttttccaaccttacacatcgaggaatcatcacgcatggaccctatcgctggagcaaacaccccgcgtacataagtaaaaatctgtcttggtggctaatctccgttccatttctgtcaacgtcaggagtgtggcctgcatttctctcctgcttggcaatgctggcaattaatgctgtctattgggtgagggctcgcacggaagagcgacatcttcgccatgatccggtctattgccagtattcgtcatgggtgaggaagcatggcctaatcgcgaagattcggcctaatgccgattag

SEQ ID NO: 505436 - DNA, 816 bp, Stenotrophomonas maltophilia
atgaaacttcccatccccgctacaatcctcgccctcctgcttctgagcagctgcggccacaccccggaccgggagttgccggaccgaagcctatctcccagcaccgacgcaggcgtggtcaatgtggccatcaaagtccctactgagctcgaaacgatggacgtgcgagtcgtgtaccgttcaaagacttgcaccatcaccagctactctgcctccggaattccctatgatcgagatggctatcagcggatggacttgaagcccatccagcagcgagggagcagactgttcgaggccaaagtgccggtgaatggaggtggcacctgcaactggcaactgagcaatatcactttcggcgcggagtacaaagacacctccgcgtttggcgagggcattcaatccggccgtcccgccggcatgattgtcatttttgatgacaacaattcgccccacggcgggtgggatgtcaaggttgacggagatttggcaatcacgcgggactactacccctggctcaatgaatcatttcttggagggcatgcaagattcatcaacctattcacaggcagatatatatttattacctacaaagcaaccaatgcccgcgacgtatacttcgaacccattcttcattcgacgcttttaactcaatcaattcagccaaaggcaaagcacccagagagccaagccacttttcactacccggatggaagcagctcgctcgaacgtgacgtcgaacctagcttccagaaactgcaggcaatccggatggcaaccgaagcgcggcgccaggccctgtccgattccgaaggctga

SEQ ID NO: 505437 - DNA, 237 bp, Stenotrophomonas maltophilia
atggccgacagaaagtactggtttacagcgcgcagtcacggatggggctggggactgccctgcgcgtggcagggctgggtggtctatgcgatcgcctttgcgcttctgctcggcggtccgttcctgttctcaccctttcgcaaccctgttgccttccagatctacacttggacaatcgtagtcgcgcttgtgctggtctgctggcgcaagggcgcgccccccggcccgatgtggtga

SEQ ID NO: 505438 - DNA, 192 bp, Stenotrophomonas maltophilia
atgaacgcatcgatccgcaagttcctgaaggaagaagatggtgtcaccgcgctcgagtacgggctgctggccgctgtgattgcgggagtgctgatcgcactgggcagtacgcagatccagacattcttcagcacgctctttgagaatctcaccaagcttgccaacaaggcttcaggcagtacgcccgcctga

SEQ ID NO: 505439 - DNA, 387 bp, Stenotrophomonas maltophilia
atgtcgaatgcgttctggagcctgtgggtgtgcctgctgctgaccacggcggcgcacgcccggaccaacgtctacaaatgcgtggacgggccgcatcctgtctaccagcagacgccgtgccaggggcgtgcggaatggcgctgggaggtgccgccggagccgccttcgacaggtgcgaccgtggccatgccagcgagctcggcctcaagccgtccgcgtgtggtgcagcaggggcgtgcgcgggccgctctgatacccatcagcaccgatcccgccgcctgtgagcacgcgcggcagcaacgcgggaaggtgctcgccaaggccaagcgcctggacttcgtacagcggcggcagctggatgatgcggtgcatgacgcgtgccgttga

SEQ ID NO: 505440 - DNA, 333 bp, Stenotrophomonas maltophilia
atgcagcgcctgttcgtgatgttccctgatcgggggccgggcatcggcctgctgtggttccggctgtgcgtgaccgccgcgctgtgcgcgccggatgctcagggcagtgggtggtcggcgctgtgcctgcttgcagcggccatgcttgcactgggtatgttgacgccactggcagcgctcactgcggccgtgggcctgttcgcgcagcaggcgccctggccactggtggcattgccgccggcgctgctgcttgtggggccgggggcctattcactggatgcgtgcctgttcgggcgccgcctgctcggccgtcggcctcccccattcgggtag

SEQ ID NO: 505441 - DNA, 810 bp, Stenotrophomonas maltophilia
atgcaggcaatggccgaccatacgatacccactggcgccgccggttccgagccgggctggaccttcatttcgctgcgaccgcagggccagaattccgcgctgcgccgcgccgttgctgggctgggcgggcatgtggtggccctgccgccctggcgcctgcagcgcttgaacggcatgccagtggtgcgtcagctgcaacgcgcgctgaactgcgaccgggtggtgttcaccagcccggccgcggttaccgcggccgccaccctgctgccgctggccaaggcgcaacgcagcccgtggctgaccgtgggcgaaggcaccgcgcgcgcgctgcgggagcacggcgtcgccggggtgcatgcgccgcagcggatggacagcgaggggctgctggcgctgccggtgctggcggacgtccgcggcctgcgcatcggactggtcaccgcgcccggcggacgcggcctgattgctgcacacctgcgaaccgccggcgccgcgatcgaacgtgccgatgtctaccagcgtcgcctgctgcgcctttcgccccgcacgctggcgcgattggcgcattcagcgcagccgtgggtgctggcggtcagcagtggcgaggcgctgctgcatttctggcagcagcttccgccgacttggcagcagcgcctgcgggcgtctgcccgcgtggtggttgccagcgaccgcctcggcgaacaggcgcggtcgctcggcctgcggcacatctcacgcagcgccggccccactgctgcgcagctggtggccgctgcacacgccacgctcaccgtcccggcagcgaactga

SEQ ID NO: 505442 - DNA, 2031 bp, Stenotrophomonas maltophilia
atggctattgtgcaggatgtccgaaacaagctgttggcagggccgaccaccaggcagttcgatctcgaggtgtggttgagtagaggtacgcaggatgactgtactctcgatgacctcgaagtcgtcaccattggaatgactgttcatcaatctcttagggcgctccgagagaaactcgcattcattacacgaacggacttttcccccgggctcaggacacacgcttttgtcgcgctttgcaatcgcgagtgtcttctcgcggatgtgatcgctctagaaagtacgattcagttgactactgacacaggcctgtcgaccgatcaaattgccactcagaagatggagctgccaggaggctcctacaccgcagatgaggtctgcgaagtcgcggtcgacgtggctgaagcactgctccggatgtgccccggattgaacgccgaggcacttcaacctatagcagatctgccgtggaatgacatcgtgcgggacttcaggattgccaacgcctacgtttgtgttgaagacctctggttagacgtcatctggaatgacactcgacagcttagatcgcaacccacatacgcctttggcccgaccgatatggatagggaggcgtcgaaagttgttgctgatcaccgccacttcatgacgaccacgcaagctcacaacatcaactatctcgcgttcaaagacctgatcgcttccgggaacatcgctctaccgagcactcgccaactggagggcagcgttggccctgacggtcgcgtccagctggctttttcttcgggtggctcagaaacagctgcgcacttcagggcggtgcgatcgattgtgcctaagtactatcagaagatcgttgtggagcagggaccgcagggtctgaagttgaacgtgaatcgcgttctggaggcctatcttctattgggaacactggcagagtccactgcgcgatctgcgaagcagcagctgcagaaggagcggaatgacggtgtgttccgtgccgattgggccgccatggctccgcctgtttccagagttgaccttgtccttgcgttacaggaagggcttgcgatatcgggcgatgaagcagatgagctcattgagttcctgacctatcggcgtcccaagggtaattcgcccgactcactatcaggaggcctctgggctgcgccgttggtcaagattgatagcaacagtgttgccatctgctaccacactttgatccatccgaacttccggtggcttatggacgtttggcttaggaacatcggcttcccgctggatgtccggggaacagcgttcgaagaatttgctaggtcatccatccacgcgaagatcgaggcatccacgctcgcggaggtgtccgccatctgcagctcttctttcgagttctcgccgcctcatggtcgaaaagaggaagtcgatctgcttattgtggttgggaacttacttctgattggggaggccaagtgttttcttcagccggtctcaccggtggatcggcgcaatcatcgagaaaaggtactggacgcggtaacgcaagtagcccggaaagctgatgcagcccgctcagcgccagacgagctgaggcgaagagcaaaagagctgggcgtgattatcccggccaacgccgaaattttgcctgtagtcgtgttgaaccatgctatcggggccggggagaccatcggtggcgtacccgttgtggacctgcgcattttggagatgttcttcgaaggatccatgatgtggatggcggatatatcaccaacaggggcaattgagtcgagcatctcggaaagattctatagctcatcggcagatgcttccgccaaactggccccatacctgaaagagccaccacaggtccgtcatctcaaagaagcagtcaggccgcgctcgactgacatgttgctgccgttggcgccacatgacgtcgctacccgcctccaccttcagattgacgccaatctcctgtcaggcgctgccgaacggggcgtacacggagctacttgcgaagttgatggccaatga

SEQ ID NO: 505443 - DNA, 222 bp, Stenotrophomonas maltophilia
atgcgttcatgggcgttacttttctttccgcgcggaaagaaaagtaaccaaaagaaacgcgccgccatccgcgagccggtgctgcgcaccggtaccctgcgctcctcggcccgccgggggacggcgcggaactcgctgcgctcagacacccgcgcctcttcgcccccgccggacctgcggtgctcggctcgcttcaaggcggacccgacagccgcgcagtag

SEQ ID NO: 505444 - DNA, 585 bp, Stenotrophomonas maltophilia
atgatacggctttccttcctgctgttgctgctgccgctgtgcgtgctgccgagcgtcgcccaggcacagtccatgcgcctgaaccgctgtaccgatgcgcagggccaaagcgtgtataccgaccgaccctgcgacagtgtgggtgcacggtcgcgggtgccaccgcctgcgcccagcggcaacatcctgcagcgcgataccctgggggcacgctgcccgcggcggctgagtgaactggtggacgcattgcgcaacggcatcgtcagcaatgatgtgaaccggctgtcctcgctgtacctgtggggcgcggtctccgatgcgggcgcgcagcgaatcctcggtcaactggaatcgctggtgcggcggccgctggtggacgtcgtgccggtgtatccaggacagggccaggacgcagtgactgacgagggccagggccctgctgcgcagggatccgcccctgagccgacggctgttcgccatccggtcggcctgcgcctggagcagaccctgccaggcagcgtggcgcgtgcctcgacggtggtgggattacggcggcagtacgggtgtttctggatcacgttgtga

SEQ ID NO: 505445 - DNA, 798 bp, Stenotrophomonas maltophilia
atgatctgggacgacggcaccaacgtctcgatcagtggctgtcccggcagcgtaccactggagttgcaggtggatctgcaaggtgctgatctgcgctgggtcggcgatatcgacttcagcgcgtaccccgtcctgggaaaactgcctgtctatgaagccggcccgaactcggcgctgatgggatttgggctcatgaccggcggtgccgtgcacccgtttcgcctgggttccaatgcggtgcaggttcccggcgacggcggtgtggttcccttgttgttcgtgctcagtcgtggtgccaggatggcggactttcagacacaggttgccatgcagctaagcgcgcccgcacatccaacattgggggacacggtgcccatcagtctcaccatgcgtttcccgcctacgacgtgccgcatgcaggatgtatcggcggtgttgcaggacgtatcgctcgaacagctggccaatgccggggatacggcgatggagaaacaggtttcgctgttgatggactgtggcgttgtgaagccgcgcgccgacatcgtgctgaacgatgcgggagactttgccaatacgggaagcatgctgacgcccagtgcggactcgactgccgaaggtgtgcgtgtgcagttgctgaacggggccggcgaagtgcagtttggtacgccatggttcttcaatcctggcggtggtggcgtgcacgcattcacctacactgcgcgctatatccgcaccaacgaagcactgaagcctggcgtcatcaagggcgaggccgtgctgaatgtcgactattggtag

SEQ ID NO: 505446 - DNA, 510 bp, Stenotrophomonas maltophilia
atgaacaggttccaccgtgccacgctgtgcactgcgcttctggcggccacgccactggctctggccgacagtgccaccctcaccatcagtggcaaggtgctgcccggcacctgcaccctcaacgccgcgccgatagtgctggacccggtcaaggccagtgatctgaccccgggcgcggacagtcagatcaaggcaggcgcgttggagttcaccggttgcgtgggtgtcaacaaggcgctgctgtccttctccggcaccgctgccgatggcgacgccgagcgctggaagaacacggcggccagcgacccggccagcggtgtgtccatttcgctgctggctggtacaaccggtagcacctacctgaaggatggtgacaccggcatcgatgtgccggtgaccggcgccaccgcgcgatacgaccttcgggcggcctacttccagcccggtggttctgcgccaagcgcgggtgaggtctccacggagatcgtggtgacggccgactatgagtag

SEQ ID NO: 505447 - DNA, 1317 bp, Stenotrophomonas maltophilia
atgtccctgttcgagcgcctgttccagctgcagcagcacggcaccaccgtgcgcaccgagctgctggccggtgtcaccaccttcctgacgatgtcctacatcgtcttcgtgaaccccgagatcctcggcaccaccggcatggacgccggcgcggtgttcgtggccacctgcctggctgctgcactgggttcggcggtgatggcgctggccgccaacttcccggtcggcatggcaccgggcatgggcctgaacgcgttcttcgccttcaccgtggttggtgctgccggcctgccgtggcagcaggcgctggcggcggtgttcatctccggcctggtgttcctggtgctgtcactgaccggcgttcgggcatggctggtatcgggcattccttcgtcgctgcgctcggccatcgtggccggcatcggcctgttcctggcgatcatcgcgctgcagaaatccggcgtgattgtcggcaatgaagatacgctggtggcactgggaccgttgaacacggcgccgccgctgctggcactggccggcttcctgctgatcgcggtgctggaagcgcgccgcgtgcgtggtgcgatcctgatcggcatcctggcggtgaccggcgccggctgggcattgggcgatgtgcagtaccagggcctggtttcgctgccgccgagcctggcgccgaccttcctgcagctggacctgccgggcctgctgcaccacgacggtggtgcgccgatcgccgtattgctgcaggtggtgctggtgttcgtgctggtggaagtgttcgatgccaccggcacgttgtacggcgtggtcggtcgcgccggcctgctgaagctgcccggcgcgcagaagcgtttcggccgcgcgctgctggccgacagcaccgccatcgtggccggttcggtgctcggcaccagcagcaccacggcctttgccgaaagcgcctcgggcgtgcaggtgggcggccgcaccggcctgaccgcattggttgtgtcggcactgttcctggccgcgctgctgttctccccgctggcgtcgatggtgcccagctatgccaccgcaccggcgctgctgttcgtggccggcctgatgctgcgcgaactggtggaggtggactggagcgacctgaccgaatcggtgccggccgcgctgtgtgcgctggcaatgccgttcacctactccattgccaacggcctggccttcggcttcatcgcctatgccgcgctgaaggcgggcaccggccgctggcgcgaagtgcatccggcggtgtggctggtggcggtgctgttcaccctgcgctacgcgctggaatga

SEQ ID NO: 505448 - DNA, 621 bp, Stenotrophomonas maltophilia
atgaatgtcaggttcctggagtcgcgcggattcaaccagtccacgcaggtcgatctgttcatccgcctctgggatacgccgatcgatgaggtggtgtccgaacggctggccatcctggcgccgttacagcagatcagttctcccttcggcaacatgaacaacacgggcacgccgtatccgtccacgagctgcctggcgtcgcggttccatccggattttgaatcggtcatcgaaccaggcgtgaagggcctcctgttcgccatcgccatcgaccacaacctggtgacctacaccagctgcgagggccacgactaccgctccgatggtcgtgagccggatgagcgtcacgttggggttgtcagccgcgatggagacgaacactgcaaggtggtggcggccttcaccgaggtggcatcgcgcttcaatgcagggtacccctcggcggcgatcgaggcggcgctgatggtgcataccgtgcgcagtgcggcgcgcgagtaccccgccgtggatctgtatctgtccaagcgtgagcgggcgggatgggatgcctacttcgccgaggtggacgccgcgtgcgcgcaactggtggcggaactgggcaggattccggagatcagctga

SEQ ID NO: 505449 - DNA, 2133 bp, Stenotrophomonas maltophilia
atgtcgatccgcagtgggcgcaagacaccgatgatctaccaggccgagcacagcgagtgcgcgttggcctgcctggcgatggttgccggctaccacgggttggatgtgacgctgcttgctttgcgcgagcggttcccgatctcgatgaagggggccacgctgcgcgatgtcgttgaactcgcgcggcgaatcggcctggatacccgcactgtgcgctgcgagattccgtcattggccaagctgcagctgccggcactgctgcattgggatttcgagcatttcgtggtgctggcgggcatccgcggcacacgctacgtgatccatgacccagcccttggcgtggtggaaatgcgtgcggaagaggtgtcccggcactttaccggcatcgccgcccagttcaccccgcgtcccgacttccagatgggaagcgaaggcgggcgcctcaccctgcgtcgcctgctgcagggcagccgcggtgtctggtcgttcgtggcgcaggtggtgtggatcactgcgttcctggaactgtttgcgctgctcagcccgctggtgctcaagaccgtcatcgatacgggactgaccaaccgcgacttcgatttcatcacggccctggcgctgggctttgctggtgcggcggtgctgcagggcgtgctcgcgttctcgcgcgattacgtgctgctgcattttgcatcggccttcaacgcacagttctcgtccgtgctgttcagtcatctgctgcgcctgccgatgcaattcttcagcaagcgccgcgtgggtgatctgatcgatcgctaccaatctgccaatatcatccggcagacactggtcggtagccttccccgggtgctgctggatggcgtcatggcgatcgtgttcatttccattctcttctattactcgctcgcgctgggcgggctggcgctgggcttcttcctgctctacacggccgtgcgcgttacctggcaccgcagtacccggcggctggccgagaatgtggtgaagatgcggtccgaggagaatggccatgtgatcgagaccctgcgtggcatgcagccgatcaagatctttgccaaggagcaggagcgcctgggcaactggcacaaccattacagccgcctgataaacgcggagctgggccatggcctgtccacctcggcacagtcggcatcgaaggtgatgctgctcggcgtcgacgcggcggccagcatctatgtgggcgcaacacaggtagctgccggttcattgaccattggcctgctgtttgcactgcttgtctacaaggcgcagttcgcgcagaaatcgatgacgctggccgaacaggcgatggaactgcggatggtgtcgctgcacctggatcgcctgtccgagatcgcgctgtcgcccccggagcaggatgcccaggtggcaataccgctggtccccgccgacttcgacggtttccggcttgaggtggacaatgtgtccgcgcgctacggcccaattgatccggccgtgatctccggtgcgaccttccagatcgaggcgggcgacttcgtcgcgctgatcggcccctccggcagcggcaagacgaccttgttccgcctcatcctcggtctgatggagcttgccgaagggcaggtgcgtttcaatggccggcccatggcggatttcgagatgcagagtttccgccgccgcatcggcgtggtgatgcaggacgacatgctgttgtcgggcaccatcctggacaacatttccttcttcgacgccagccctgatgagtccaaggcgcggtggtgcgccgagacagcgatgatcttcgatgagatcgaagcaatgccaatgaagttcaacagccgcatcggtgatctgggatcggcgctgtccggcggacagaagcagcgcatcctgctggcgcgcgcgctctatcacgatccgcacatcctgctgctggacgaaggtaccgccaatctggacgtctcggtagaaaagcagttgctggacaacctggcgatgcttggcatcacctgcgtatcgattgcccatcgccccgagacgatcctgcgtgccaacaaggtgctgcacgttgaaggtggccgcgtggtcgaggtgcgtcgcgccgatgccgaagccgtcgtggatgtcgccctggcgtga

SEQ ID NO: 505450 - DNA, 525 bp, Stenotrophomonas maltophilia
atgtcccgagcttctccccttgatgaccgtccgttcttccggccggaggccgaggcccatcgcctgcaccgccatctgggtgaagtgcggcttgcacggcctgtatcggtgcgcctggtgtacctgattcccttgctagccacagcgctgctgtctgttgccgcgtcgctggtgacattccgaccgcgtgtggagctgacccacgtaccggtggagctgggtaacggtgatgtgggcctggtgctcccggccccgcgtgccgcagtgttcccggtgggcagggccgtcgagctgctggggggcgatgatcgtccgctcgccaccgccgaagtgatcgccgccggcgcggtgccctgcgttgctgcaccggcctccgccacgcccccggacggctgcacacagctgcgcgtccggcccgccgtcgcgacgacggatgggcgccatggcgctgttgcaagcgtgcgcggcgcgccgcgtcattacttctccttgtttgaccgtgacccgcctgcaggggagaagtga

SEQ ID NO: 505451 - DNA, 1224 bp, Stenotrophomonas maltophilia
atggatgtcttccgctatctttcgcaccctgcggtgggcgatttccgcagccttgctgccgagctgtgcaccctgcagttccacgcattcgtcagccgcacccgcgatcgcctgacgcagctgcagcacgccgcactgttggacgaagtgctggctggccttgcggccacaccccctcaccgcggttactggacgccggaggtcagctggatccaggccggcgaatcggcccgcgctgggtacgcccgccttgcgccgcacgaagagtggcaggtggcgcagatcgccacagcagcattcctgaccggcatcctggaccgcattgcgctgcgcgtgacgcttgaattccctttgcttgtggcaggacgcacctttctgggcgaagtgctgatcgaggggcacggcgacctgctgcggatccagtccggtgtctccacgctcgccaccttcgtggcggtgaccgcgtgcgagcgttgcaccgtgtggatcgacgccaggattggtgtgcagggcgtaatcaatctgcacggtgaatctcccatccggtgcgttggcagtgattggcaccgctctgactggatcggcatggactgccaggacgcgtcgatcgctgatgcgacccaccagctccaggatgcgctggagctgctgcgctcggtctgcccggagtaccacgcatgggtgacctgcctgctgaaggaagtgaccccgattcggcggcccgccccgcgcatgcttgccagcaactcctcgtcgctgcgcatgggcgggattgatgtgtcggtaccggcaagcgtcaccgagaccgtggaaatgctggtgcacgaatgtacgcaccagtacttccacatgtgcgcttggctgggatccaccgtggtgccgggtgccaagccgcacttctcgccgctgaagcagtgcgagcggcccttggacaggatccttctgggctaccacgcattcggcaatgcgctgatcgtgttcgacaggctggccgcgctgggcaggaccgaggagatacgcgtgcgctggaccgccgttgccgcctacatggacaagctggtcgagccactgcaaccgccggacgagctcagcgagctgggcctggcgctgttctccccgctacgcgcgcgccttgattccctgcaccaccagcgcccacccgcctcggcctcagccgggtcccgcatgaaccggcacgaccatgtcccgagcttctccccttga

SEQ ID NO: 505452 - DNA, 1230 bp, Stenotrophomonas maltophilia
atgagtaactcattcggtaatcagatcgacgtcgttctcaagctggccgagcgctgcaatcttgcatgtccctactgctattacttcttccaggaaaacaagctctcagaaatcagtcgcccattgattcctgagaaaactgtccacgtgcttgctgccttcctcaagaagggcgcacaggagctggacatcaagcatatatacctggggctgcacggtggtgaaccgacgctgctgccgaaggcacgtttcgaccgcctgtgtaccgtcctgcgcgaagcactcgatggtgtcgccgaactgcatcttggaatgcagaccaacggcacgctcatcgacgatgagtgggtcgatctgttcgcaaagcaccaggtgatggtgggtgtcagcatcgacggcccgaaggatgtccacgatgcatcgcgacccgatcgtcgcggtcggggcagctatgacactactgtgcgcgggctgcgcctgctgcaggccgccagcgcgcaggggcgcattccgccgaccggtgtgctgtgcgtagccaacgcggatctggatgggcgtgaggtgctgaggcacttctccgaagagctgggcgtatcgggtctcaatctcctgttgccgcggcagggacacgacgatgcaacgctcgcgccgcaggcgcagtggacgcgatatttcagcgagatcatcgactactggatgaactcggcgcagaccaagccgatccgcgtctacatgatctccgagatcatgaacgccatgatgtccgagcagaacgcgcagcggctggacttccgccgcgccaaccggcacaacgtcatcaccatttccgccgagggctacctggggccggacgacaacatcatggcgctggacgaggcgttctgcagatctgacgtcaccatcgagaacaccagcctgagcgagttcttcgccagcccgatgtggcggtccctggtggaggacgtggattcgtcaccacagaagtgcaccgattgcgaatggttccggacctgtcgctccggtgacctgttcaatcgctacaagagcggccagggcttttcttcacactcggtcttctgcgagaccttggactcgatccactccacgctggccaagatcgtggtcagccgcgacggattggaaaaggtggcagggattctcgccgcaccgcccaccatgaaggcatcgcagttcatgaacccgaccgtcggcgcccaggtgatggcctag

SEQ ID NO: 505453 - DNA, 186 bp, Stenotrophomonas maltophilia
atggatctgaagctccgtagtctgtctgatcgtctcaagtccaagattgaaagcagcccgcaggctgtgtctgatctggacggcatgagtgacctggtcgatgctcacctggaactggtgagcgcggcccatggctcggcccatgcatcgggccacctgtcggccaacccggaagtgctggagtaa

SEQ ID NO: 505454 - DNA, 1230 bp, Stenotrophomonas maltophilia
atggacgtagcacccatcgtttcagccatgcgccggcacaagattgccgtgtcattgatcgtgctggagatcgcgctgagctgcgcgatcatctgcaatctgctgttcctgatcaacgagcgcctgcagcgcctgcagatcgacagcggcgtggccgagaccgagctgatccgcatccaggcagccaacccccggcagctggaaggtggcggggagagccaggaccgcagcttggcactccagtacctggccacgctgcgcgcggtaccgggcgtcaatgctgctgcgctggcctcccaggtagctttcagcagttccagcagcaccagcaccgttcgcctcagcgccgatcagcaggatgagagcctgactgccagcgtttaccttgacgaaggcggactactgcaggtgctgggcacgcggctgattgccgggcgcaacttcaatgccgatgagtatcgcgacatgagcgccttggaggacgccggcggcgaccagggcgtgccagcggtcatcatcaaccgcagcatggccgagcagctcttcccgggccgcagcgcgataggccagtccattttcagctggggcacctcaccgacacgggtggtcggggttgtagaggagttgatccggccgaatggattcgccgatgggacctacacaatgatcctcccggtgcgcaaatacacggcaggcatgcacatcgtggcgcgcgtgtcgccggcccttaggggcggggtgctgcaggcgggtgtcgcagcgctcagggcggaggatccgaacatcatcatcttcaacagcgacacgcttagcgagatgcgcagtgattacttccgccaggatcgcgcaatggccgtcatgctgtcggtggtggtgacggcgctgctgattgtcacggcactgggcatagtgggcctggccagcttctgggtgcagcagcgcacgcgccagatcggtatccgtcgcgcgcttggcgcgcgtagggtcgatattcttgcgtatttccagaccgagaatttcctcatcacctccgcaggcataacgctgggaatgctcctggcctacgccttcaatctggtactgatgaaggcctacgagctgtcgcgcatgccctggtatttcctgcctgcgggcgcgctgctgttgtggattctcgggcagctggcggtgctcggtcccgctcgtcgcgcatcgcaggtcagtccagcagtcgcaacgcgtggcaagtga

SEQ ID NO: 505455 - DNA, 1299 bp, Stenotrophomonas maltophilia
atggtgggttactacataggccttgcactgcatagcctgagaagaaacaaagtactgacggccctgatgatccttgcgatcggcctgggcattgccgcctcgacaaccacgcttaccgtgctgcacgtcctgtctggcgatccactgcccggaaagagcgaccgggtgttccgcgtccagctggatgcggggagcctgcagggctatcagccgggccgcgaacccgacgaacaggtgacccgcctggacgcagagacactgctgtcgcaggccaagggcgcgcgacaggcgatgatgtccggcggcggcgccagggtcgatgccggtgtggacgggcgtgcaccgcagcagaccgatgtgcgcttcactaccgccgacttcttccccatgttccaggtgccgctgcgttacgggcgcacctggacggcggccgaagacgcgtcccatgcccgtgtggccgtcatcagcgaggagctcaacgccgcgctgttcggcggtgccgacagcaccggccggaccatccgcgtcgccggcggcgaactgcacgtgattggcgtgctgtccgcatggcgcccggtgcccaagttctacgacctcaacacaggcaagttccgcgcggtggaagggctgttcctgccgttcaccacatcccgcgatctggccatgaagttccagggcagcagcacctgctggggcagcaacagcgacatgtacgacctcaacgcgccctgcgcgtggctgcagtactgggtcgagctcccaggtgtggccgatgcatcagactacatgcgctacctggaaaactatgcagcagtgcagcatgaaacaggtcgctacgcgcgcccggtgaatgtacgtctgcgcagcgtaagcgactacctgcagttcaagcaggtggttccaagcgatgtgcgcatgcaggtctggctggcgtttggcttcctcgcagtgtgcgtgttgaacacggtcgcgttgctgctggcgaagttcctgcggcgcacttcggaaatcagcctgcgccgggcgcttggcgccagccggatcgatgtgttcgcccagtgtttggtcgaggcggccgtgatcggtgctgccggtggcgccctgggtctgctgctggcatggctggggttgtgggccgtgcgccagcagccggtcagctacgccgcgctggcacatctggatatggccatgctgctggtatccctggcgatcgctctggcaagcagccttctggcgggggcgctgcccgcatggcgcgcaatgcaggtcgagccggcatcccaactcaaggccgaataa

SEQ ID NO: 505456 - DNA, 717 bp, Stenotrophomonas maltophilia
atgctcgaaatgacaggagtttcaaaggttttccgtaccggcgaagtgcagaccagcgcgcttcgatcgatggatctgaaggttgccgagggtgagttcgttgctgtgacgggcccatcgggctctggcaagagtacatttctcaatattgccgggctgctcgaggatttcacctcaggcacataccggctcgatggcgaggatgtctcccggctgggcgacatcgcccgcagccaattgcgcaatcgcaagatcggtttcattttccaggggttcaacctcatcccggatctgaacctcttcgacaatgtggatgtgccactcaggtatcggcgcatgcccgcaggcgagcgtcgccaacgcatcgagcaggcattgacccaggtcggcctgggttcgcgcatgaagcacttcccgacccagctttccggtggtcagcagcagcgtgtggccatcgcgcgcgcgctggccggtagtccacgcctgctgctggccgatgagccgaccggcaacctggacacggaaatggcccagggcgtaatggcgttgctggagcagatcaacgccgctggcaccaccatcgtgatggtgacccatgatctggagctggcgtcccgcgcacgccgcaatgtccacatcatcgatggccaggtgaccgatctgctgcggcccctgcaccttgaacaggaattctgcgagctgtcggtcaacggctaa

SEQ ID NO: 505457 - DNA, 1080 bp, Stenotrophomonas maltophilia
atgcgcgtgaacatcacaattgtcgggctgctgctgatggcagcggcgctctccgcccacgcaggcgacacctggaaagccggcgagcgccatggcaccacgacggtggccagtgccgccgtgcgcgatgcgcagcaccgcaacaccctgcgctacacggtgtggtatccggcaccggccgatagcagcgaagtcgaggtgaccatcgggccgcctggcacgcccctgttcgatgttggtcgctcggcgatggatgcgccgcccgcaggcgctcgcctgccgacactgctgctgtcgcatggcaacggcggcagcgcgcgcatgatgggctggctgggcaccgcgctggcacggaaaggttatctggtgatcgcggtcgatcatcccggcaacaatggtgccgaccagatgaccctccatggcagcatgttgacctggctgcgcgcggatgatctgcgcgcggcactggcggccgtgcaggccgatccagtgctgggcccgcacgtcgatcctgaacgcctgggtgttgccggtttctcggccggtggctacaccgcgctgttggcggctggggcgcaaccggacctgcagcgactgctggcgttctgcacggcgcatccggatgacggcgtctgccggcctcaacaggaagcggcaacgcacacgatggaggcgcgtgttgccgctgcggcgtcggccgagctgtcgccgtggatgtcccacgccaacgactcacgcgccattcccggcgtgcgcgcggtgttcctgatggcaccggcgatcatccaggccttcgcgcccgagcagctgtcctcgttgcggctgcccgtgtcgattgtgcttggcgaggctgacacggttgcgccgccacagaccaatggcgcggccgcgcgtgcagtgattgcgggcgctgcactgcagctgctgccaggtgtcggccattacgatttcctcgccgcatgcaccccgaccgggcagcagcggctgcaggacctctgcagcacgtcagtgccaaaggcaaagacccacgcgcagacagtggacgcagcagtgcggttcttcgaccattcactgcgctag

SEQ ID NO: 505458 - DNA, 450 bp, Stenotrophomonas maltophilia
atggccctgagtctcgatgccgaactggaagaacgcttccttgcaattgccaagcgcggcagaaccgcttggctggccggcgatattgcggaggcagagcattgcttccttgaaaactgggacatgattccagagcccaagtcatcctatgaccacgcccagagttcatcgtatggaatagcagttttctatcgcgataccgcccagtttgagaaggccagagcgtgggcgatggtcgccagagacatttatggacaaggagaagcctcaagcgagtacatggacgagctccttgcaacgattgagttcgaatcgggaaaccttgatgcagcctacgcgctgttcgaaccgcagcaccgcaagtacggcagacgtgcctttgagggccatgagaaggggttcattgatttcatcaagagcaggaagaaaactggaaaagtggttcagtga

SEQ ID NO: 505459 - DNA, 237 bp, Stenotrophomonas maltophilia
atgaacatcacggactttcttgtaatggacggtgatggagatgaaatatgggccgacccccatggcagcaacattgcctttacgtgttttgattgtggatatccggtggtggctgatgcctcggagaaccaacgtgggagcgatgaggattgtcccgctgcctgccgcgggtgtggtgtggagtacttcctcgatttgagactggactcgaggaagctgtatatccacatcgtctga

SEQ ID NO: 505460 - DNA, 675 bp, Stenotrophomonas maltophilia
atgtgtcgatccggccggcaccccgccttcggccaaaaaagtgcaatttttcagagtgtattggctggggtaacgattggtgcaggaaatgcgctgagccagctccagcagatgactgaggtcgatacaacatctgaaactgagttgtggctgaggttcagcccctcagttcactatacgcgctacttcggggagcatggcccggacgtcaacgtcgttgccggtgaagatgtcaacgaagatgatgcgctggttgatagcactttgatggcgatcatctggagaatttcgggagacggagtgaccccgaagccgccggtgtccctctcctgccggtgcaatgctgacgaagtgccggcagacaccattgcttatgtgcagtcaggtgctccatacgtaattcacgcatgccctgtattttggtccctatctatgctgcccgccaatcacattggtgaaccctcaaaggttggcacgatggtccacgagttcactcattttactgacgacaagggcatcgcgctgcggcatccgccggtccccggcgagaatgtctcatctctttcgtacgcactagagttggcggccagctcacatccaggcgctgttcgattcccgaacgcgtacaagtttttcgttttgggtcaagcacacggtttttctccgccggaatag

SEQ ID NO: 505461 - DNA, 207 bp, Stenotrophomonas maltophilia
atggaaccagcgctgcctgcgcttgacgtcctggaagcgtgcgatgctggccgaatcctggcgacgccaacggtacgcggcgcgctgcacgctgccaatggcttctgggccacggcctacccgctggacgcgcaggaacgtgccagcgcattgaccatggccgaacaggcgctgaaactgagcgcaatgagctggagcggtcaatga

SEQ ID NO: 505462 - DNA, 2211 bp, Stenotrophomonas maltophilia
atgaaaaccaattcccgcaccacccaggaagacggaagcgacgagctcgatctgcgacagcttctgggaacacttctcgatcatcgctggtggattctggcaagcacgctgctgttctttgcggtggccgcagcctacgccctgcttgctgctccgatctatcgggctgacgcggtgatccaggtggaatcgaagatgccgtcgattccaggtttgaccgatctgagcaaatccctgggactcggatccggatccggcgaggccactactgaaatcgccttgatcaagtcacgggcggttgtcggcagtgccgtcgatgcgctgaagctggatatcgagattgctccgaagcgttttccgttgattggtggatttctcgcacgtcgcgccgaggcggtcgatcctgctggcctggcgtcgccgattcttgggctgagccgttatggttggggtggggatactcttcagattcaccgtcttgacgtgccacgcggactggttgaagaagcgctgacgttggtcgccggcgaaaaaggtgcgttcgagctgctgggcccagacggtgagaagatccttggcggtcagctgggacagcctgcaaaagcaaggggagtgactctggaggtcgccgcactgcgcgctaacccgggaatgcgtttcacggtgatgaagcggcgccagctggccgtcatcaatgagttgcaggagcgaatcggtgttgccgagatcggcaaggattcgggcatcctgggcctcttctacgagaatcgcgaccctgtggcggcggaggcattcctgcatcaggttgcgctagcctatgttcgccagaacgtagagcggaattctgccgaggcatcggcccagctgagcttcgtgaaggagcaattgcccggcatccggatgcaggtggaaacttcgcagaaggcgttgagcgagttccagatgcgcgagaactcggtggacctctctctgcagacgaagggtcttcttgatcagggggtggccgttgagaccagtatccagcagttgcggctgcagcaggcagagatggatcgcaagtttacccgtgaccatccggcctatcaggcgctgatgcgtcagatcggtgaccttgaggccaggaagaacggcttccaaggtgaagtgaaacagcttcccaaggcacagcaggagctgttgcgactgaccagagatcttacggttgcaaacgagatgtacaccgtcatgttgagccaggcccagcagctggatgtggcgcgggcgggcacggttggcaatgtacgcatcgtggatgctgcacgtgttgatgacagcacgcccgtcaagccgaagaggaaggtaatcgcgttgatcggcgcatgcgctggtttcctgctggctgtgcttgcgattctgttgcgccagatgattaaccgtggcatcgaggatccaggcctgatcgaggaactgggcatcccggtgtacgcctccatccccgcgagcgagaaccaggccaaggactctgtccgtggcaagttccggcaggatggcaatctgcacctactggccgtaaaggatcctgcggatctggccatcgaagcgctgcgcagcctgcggacgagtctccacttcgcgcgattggaagccaagaacaacatcgtactgatctcaggcgcgagcccgaacgccggcaagacgttcgtttctacgaacttggccacggtcgttgcccagtccggtcagcgcgtactgattatcgatgccgacatgcgcaagggcaccatgcacagggccttcggcgtcactcagacgccaggcctgtccgaggtaatcgtcggtgcggcacagatcagcgatgccatccgctcctttggtcctgtcgatggtctggatttcatcgcccgcggtgaggttccacccaatccgtccgagttgctgatgcatccgaacatgacgcgactgctggaggaagtctcctcccgctatgacctggtcatcgtggatacgccgccgatcctggctgtcaccgacgcagccatcctcgccgcccaggcgggaacgtcgctgctggtggcccgattcggtctgaaccagcagaaggaaatcgcactggccaggaagcggttcgagcagaacggcgcggtcatccgtggtgcgatcttcaatgcggtacagaagcgcgcaaccggctactacagctacggttactacgagtacaagtcgaccgagtaa

SEQ ID NO: 505463 - DNA, 1494 bp, Stenotrophomonas maltophilia
atgatctgcaattggcaggagggcataaccgaacacgccccgaacgatctttccatgaagcttggtcacaatctgaagtggacatcactggcgcagatctccaagctctgcgcacagttcgttgtcgtcttcatgctcgcgcggctgcttgagccgggcgagtacggcgttgtggcgatggcaacggtggtggtcaatttttcgctgatgttccgtgacatgggtctgggcgcggcgatcatccagaagcaggatcttggcaatggcgacattgacgcggccttccgcgtctcgctcgttgccgggagcctggtgtgcctgctggtgctgctcgcagccgttccgctcgctacgtacttctctgccccagggctggcgccattgctcgcggtgctgtcactgagctttcccattgcgggctgtggaatcgtccaccaggccttgcttgagcgagcagggcatttccgcacgattgcccgcatcgaaggaagcagcaacctagtgggtggggcgctcggactagtgtccgcgctggcgggtgcaggtgcctggagtctcgttgtccagctcgcgttcgtttcgattgcaaccagtgtccagctttggcttgcctcggaatggcggccgactgcctcgcgcgggctcgggtaccgcgggttggccgagttcggctcgggcgtgctcggcttcaatctggtcaactacttgtcgcgcaatctggacagcatccttgtcgggcgcttctattcctcgaccgtgctgggaaactactcgctggcctataggctgatgcttttcccgttgcagagcatcacgctggtggtctcgcgatcgcttcttccggtcctttcgcgtctccagtcagatcgcaggggcagggttgaggtctatcagatcgcggtaggcggaatcactctggtcgtcgctcccatgatggtcgggttgtacgtactacgcgagccgttcatcaggttggcttttggcgaaggctggaatctggcggtgcagctgcttgcctggttcgctcccaccgccctgctgcagtcggtcatgagcgtcaccggtgtggttctgatggccgcgcgtcgcaccaggacgctgcttcaccttggagtgatcggcgcaatgctgcaggtaggcgccttcgcgttgggcatcacgcacggcgtcgtggtgatggccgcactgtatctgctggccaacctgctcaacttcattcccgtcatgctggtctgcgcgcgggtgctgggggcccgcccgtctgaggtgactcagccgatgatcccaccactcattgcggcgctgatcatgggaggcacgctcgaactgtacatgcggtacggagatttcgcgcaggacgcggtctcgctgacgctcgccatcatggcatcggcagcatggtacgtagttctggcgcttgcattctcccgggagtggcggcgacgggcgctctccgcattgagtgtcttcaggcgcgccacgaaggcggcctag

SEQ ID NO: 505464 - DNA, 1107 bp, Stenotrophomonas maltophilia
atgaagattgtctgcgtacaccagagtgccgagttgtacggctctgaccggagcttcctggccgccgtcgaggcgattgtccaacacgcgccgacgcctgcggaggttgaagtcattcttcccgagcatgggccattggcggctcgtatttcagaggccggtggctcggtgcacttcgaatccgaaggttacctgagaagaagcctgctgcgcaggcctctcacgttcgctgcggggctgctggctgctacccggcgccttctgcatcgcttccgtggcgccgatgtgatctatgtgaacaccctggtctgtgcgtctgccctgctggcatgcgcgctgtccacgcgccgcgcacgccgaattctgcatgtccgggaaatccccgggcgcaaggagcttgccttctttcgcgtgttgatcaggctgtctggtgtggaggtcgtgtacaactcgcaggcaacccggcttgccattggcctgcccggcactgtcgtctacaacggcgttcctggtcctgcggcatgcacgcaggagcttggcggggatgatggggtacggttgctgatgatcggccgcatcaatgcctggaagggacagaagttccttctccaggccttgctgcgcagtcagaggcgcatccggctgagaatcgtcgggtcggcgatcgatgcgcaggtacatctggtggaagagctccatcacatcgcccgttcgctgccagatggcgtgacctgcgagttcttcggcttctgcgaggacccctcggagcactatcgctggtgccattacgtggtcgttccctccaccagtcccgagccgttcgggcgggtggcaatcgaggggttctcgtatggtaagccggtgattgcggccgcgcatgggggcctgaccgaaattgtgcagcatggacaggatggattcctgttcgaacctgccagtcaggtcgcgcttgcacagacgatcgaggaccttccccatgccctttcacctggccacctggcactcggcaggcgtgccttcgacgcgttctcctcgcgcttctcggtggagaactacgcagagcggatttcacgattggtgtttgcttcatctggatctacgacatga

SEQ ID NO: 505465 - DNA, 1410 bp, Stenotrophomonas maltophilia
atgatcttcctgttggtatgcatcggcgcgttgctgatcatcctctactttcgaaaagccgtgctcctcatgccggcctggatgatgctcacgcccaaggcgctgctgctggtcgatgtgcccggcattccggtgctcagtctctatcgctttctgatggcgatggtactggtcatgtatctgatgacgctggcgcttgcgcgcaagggctcggtcaggaaggggccattcttcagtggtttgatgttgttcctgggcgtggcggccgtttcggtcttgatgaacataggcagcgcctccgccgggctgcttacctggattgcgctgtgcctggaagtgggtgttccggtcctggccttcagtcactttgccggcggattgggcctggcagaagccaagcgcctgctcagggtctacgtggtgttcttcagtctgctgtcggtgtatgccatcgcggcctatctggtgaactggaacccctatatcgacttcatcaattcgacgacccagaccggccgcgtgatggcaagaacgtatgccgacacactgcggggcatgcgcgcgcagggaaccacatcgcatccgatcacctatggcgcgctggtcgcgatcatgcttctgacgtactacgtcgcccgcctgtgtggccaggtgcggatgcgcgacatgatggcaatggctgctgtctcagggtgcatcatcatttcgatgcttttcaccaactcacgcagcccactgatgctctatttctttgccctgctggtgttcggtgtatcggtaggcatcgtcaggtcgctgaagtactcgctgctgggcggcatggcgttcgtgatcgcattggcaacgtcgaatgtgttccttgagaaagtcctttccgtggtcaatatcttcgatgcctctgtaggtgccgagcagaacggttctgacctcgccatgcgggctgggcagttcgccgtctcgctctcctacttctggcagtcccccatctggggcctgggtctggacgcgactcgcgaactggtggccggcggcgcagcggccgatctctacgatgccgaaagcgttgtttttacactgctgatcaaccaggggttgctgggcttcatcggctacatcggcttgttgcttgctgtgcttcgaggcgtgggacgacttttgccgacggtgagttcgcgtcgaatgttcaccgggctcgtgctgggctacgccttgttcaccgtggccaccggagtaatggacacgctgcagttgttcctgctcctgtcgctgtttgtgggtgcctatggaagggcattcgctgcttctgatgccacccatcaccgcacgccggatggacagatggttcaagcagcagcgatgccgggttcggcgatgcaggatgcaggtcaactggaacgaggtggtgtgtga

SEQ ID NO: 505466 - DNA, 1149 bp, Stenotrophomonas maltophilia
gtgagcaagcgcgtgttgaggattctgggtattcgcggcgttccggcggcccatggtgggtttgagacgttcgccgagcatctcgccctgtatctggtgtcgagcggctgggaggtggtggtgtactgccaggtcgacggcaccgggggtgtctggcgtgacgaatggaacggcgtgcagcgagtccatattcctgtctccaccgctgggccggcaggtaccatcatctttgactggaaggcgaatgttgatgcggccaggcgcggcgggctgtgcttgacgcttggctacaatacggcggttttctctgcgatgcttcgtctgtgcagagtcgtcaatgtcatcaatatggatggcatcgagtgggcccgcgcaaagtgggggcgaatcgcaaagacctggttctggctcaacgaacgtttcggttgctggattggcgatcacctggtcgcagatcatccgcgcatcaaggatcacctttccacccgcgtcaggcgcagcaagatcaccaccatcgcctacggaggtgaagcgatccattcggcggatgcatcaatcgttgaggagcttgggctcactccgaacgactattacaccgtgattgcgcgcgcagagccggagaactcgctgctggagatcgtccagggtttctcacggcagccgcggcgcagaaagctagcagttctcggcaagtatgaccgcgacaacgactatcaccggaaggtgctcgaggcggccggagagggcgtggtgttcctggggccgatctacgacaagaaggtcgtccaggcgctgcgttacttcagcagtgcctacgttcatgggcatcaggtaggcggcaccaatccgtcgctggtggaggcgctcggtgcctccaatccagtcattgcccacgacaatccgttcaatcgctgggtggccgggccaggcgcgtgctacttcaatggtgcggcttcgtttgcttcgctgcttgacgagcttgaaggtgacgcgacccggctacaggcgatgtccgcagcgtcggcatcgcgccaccgggaggcatttacctgggagcagattcttggtcagtatgagcagctgctctcgcgctttgcagcaggatccaacgcacgcgcgacggcagtagcggaagcggagcgggaatga

SEQ ID NO: 505467 - DNA, 834 bp, Stenotrophomonas maltophilia
atgagtcagccaccagcgcagcgtcacgtgcttcggatcgtggtggtgctctacggtactgcacccgatcagtcacttacgctggaaactcttcagttggccagcaggtcgaacgaggactttgttggtgagatcgtcgtctgggacaacagcccgcagtcgttcggcgccgcctcgctcaatggcttgagcttccccggcttttcggtgaagtacatggcgtgtcctgagaacctggctctgtcgaaggtctacaacaacgtcgctgcaggcattgcgacgggccattttctgattctcgatcaggattcgcagcttccggcagactatttctccgtgctgcggtcgcagttggacgcccatcctgcgcaggacctgttcctgccagtggtgctgtccagtggtcggtgcgtaagcccgggggaactctggtacttcaagggaaggcatctggcttcaccgcgacagggtcagcaacgttcccgcagaatgctggccattaccagtggcatggtcattcgatccgcctatcttcaagagcctcgcttcgatgagcggttgagcctgtacggcattgatacgcgcttcatgctggactacgcagacagcggtcgaagtgtggtcgtgatgccgatcgttctggggcacgacaccgcactgtggtccgacatcagtgccgatcgcatgcttggccgcgtgcagacactggtgcgctcctggccgatcgtcttcgagaagaggccgttcgcacggctgctcgcgcgatgccatgcacgtctcatgttgttgaagctcgcgatcaagtaccgcgatcccagattcctgtttgcatga

SEQ ID NO: 505468 - DNA, 687 bp, Stenotrophomonas maltophilia
atgacactactcagccgccttggctcgctcctttcgctgcgcatacaactggatgaacgcgttcctctttcctacaagctacgactctcgctggagtacggcatttgtctgatccggggcgcgctcacgttgggtgtgcgtgagtcgtggctgtcgccgttgtttcgcgggcgaggcgtcgtggtgcgctgtgcctcgcgcatccgcctggggaagggtgtgcggctgggtgatttcgtcgtgcttgatggccttggcgcttccggcatcaccttcggtgatagcgtgaagatcggtgactttggtcggctgatctgctctggcagcctgacccacctgggtgagggcatatccatcggccatcgcgtcggtattggcgagttctgccggattggtggctctggaggcgtgtccattggcgaggacacaatcgtcgggcagtacttcagtgtgcatccggagaatcatgagttctccgataagcagcgcctgatccgtgagcagggtactgcccgggcgccggtggtggtcggcgccaactgctggatcggcgcaaaggtcaccctgcttgccggaagcgaagtggggcactccagcgtcgtggcggctggcagcgtggtcaattcccgcttcccgccgtattcggtcatcggtggcgtgccggcccgcctgatcaaaagctactga

SEQ ID NO: 505469 - DNA, 2178 bp, Stenotrophomonas maltophilia
gtgatccatagtctccgcaacactacgggccgcaaggtgcgtgccacgctggccctgtccctgctatcgatgtccgtctgtgccgcactgcgtgcgcaggaagcaccaccaccgacctccagcgaatggggtggcatcggcctgctgcagacaccgaccgcgcgcatggccgacgacggcgacatcgcgatcaccgcttcgcacaactcgccgtacagccgctacaacgtgacgatgcagccgcttccctggctggagggttcgttccggtacatcaacgtcgccaacctccgctacggcattccttcggtcagcggtgaccagaattacaaggacaagtcgatcgacttcaaggttcgcctgctcgaggaatcccattggattcccgaggtagcctttggtgtccgtgacctcggcggaaccggcctgttctccagcgaatatctggtggccagcaagcgctacggaagcttcgatgcatcactgggtgtagcaaccggttacatcggcaatcgcggcgacttttccaacccgctgggcgccattgacgaccgcttcaaggagcggccaatgccgaccagcgccattgtcaatgcaggcaaattcggcgccagtgcaatgttccgtggtccggttggggtcttcggcggcgtctcctaccagacaccgcttgaacagctcatcgtgaaagtcgaatacgacggcaacgactaccgccgggagccgcgcggcgccaacctcaaccagtccacccccatcaacgtcggcctcgtctatcgccccagcaaggtggttgagctgacggccgcctgggagcgcggcgacgccgccatgttctcactgacgttgcgtggcaaccctggcggctcacgtagcgcgccgaaatcgttggaccccctgcccctcgcccttgaaggtgaccaccaccaggcaagagaactgggcgcggccccaaccggagcagcgccgacaccgcacgactggggtgcgatcacggcggatctgagatccaatgcaggattcaacctgcagcgggcctccgtgcaagggaaggaactcatcctgatcggatcgcaatcgcgctatttcaacccggccaaaggcctgggccgctcgtcgcgtgtcctctcccatcatctgggcgatcagtacgactggtacacgctgcgcaccgaacgcctgggcatgcccatcgccgacatgtccgtcaagcgcgatgcatttgagggctatgtgaacggcagcgtcgacgaagcaaccctcaagcggagcaccgagctcagcgcgccagggaccaccgaggggcacgagctgttcaaaccgaagcgttcgccctttggaagcggcttcagcttcgggtaccgacagaaccttggcggcccggatggcttcatcctgtaccaggtgtcggccaactacagcgccagctacttcttcggcaagaacgtctggttgactggcagtgcaagccagaacctgctcaacaactacgacaagttcaagtacgacgcaccgagcaacctgccgcgcgtccgaaccgacgtgcgcaagtacacgcgcacctcggacttcacgattcccaatctgcagttgaacctgtcgcgacggctgtcccgcgacgtctacgccatcgcctatgcaggctacctggagtggatgtacgccggcgccggcagcgaagtgctgtatcgcccgatggatcagccttgggcgatcagcgccaacatcaactgggtcaagcagcgtgacttcaaccagcgctttggcttgcgcgactactcgaccaccaccggtcacgcgacgctctactatgctttcggagatcagcagcgggttattgcttcgctgagcgctggccggtacctggcaggcgactacggtgccaccgccaacgtggcgcgggtcttccgcaacggcgtcaccatgggtgcctacgcgaccaagaccaacgtcagctccgccgagttcggcgaaggcagcttcgacaagggcatctacttcagcatcccgtttgacaccctgctacctcgatcgactccggccagggctacgctcacctggaacccgctgatccgtgacggtggcgccatgcttgcaaggaagtacccgctctacaacctcacgggcgagcgcgacgagcgcttcttctacgagaatatccagggtatcgctgattga

SEQ ID NO: 505470 - DNA, 762 bp, Stenotrophomonas maltophilia
atgcacagattcaccctgcagattgccgcattggtggcggccatcgtgatcccctcggcgaacagtttcggcgcagacgccgcgctgttcagcggagccgtgcaacagcctggaatgcaccgtggcgacgatggcggacgcctcgcagccgcgcttcttgctgctcgacccgcgcccgatgcgttcctgccggcaacactgtttgcccggcagggcgctcggctggcgcaggttcgattgaaggcaggcgtgctgcatgatctgcagacactgagcgagggtggcgacgacgcgctccgccagctctctgaacgcctggcgcgctggatcgaggacatgccggtcaccggacgtgtcccgcttttggccgacccccgcctcatgcagctgcaaccccgatggaacccgccgatccaagcaggtgattcggtgcgcctgttccagcggcccgccaccatccaggtggtcggagcggttgccgagcactgcaccctcccccatcagccattgcgcagcgcattggagtacgtgaaggactgcgccgccacggcctttgctgatgccgacaccgtgctggtcatccaggtcgacggcaccgtacagacgctgggcgccgctgcctggaaccgcgctgacccgcaaccggtttcgccgggcggggtggtgctggtgccgttcgcaacgaagtacatccgatcggtggacgccgaattcaacgcagaccttgctgctctcattgcgacccaggccgccacaccgtga

SEQ ID NO: 505471 - DNA, 699 bp, Stenotrophomonas maltophilia
atgcgatggatgacgtcggtggccgctgctggccgcctgccaaggaacggcacctgggcgcgcgccttctggctcgcgcccccggcactggcagcactgctgtccggttgcacgaccgcgagccgggcgaccgctgacagcatcatgcagctggtgcatcgccagccgtcctatacgacgcaacaggtgctgcgcacgccctatccgcaggcagatgtgcagaccccggacatccgtggcctggtcgtactgggctacgtggacgacggccagcaggtgtggatggcgggcaagcatgccgtgctgcgcctgtcggccaccggcgtgctcgtgtccctcagcaaacaggacgcgcagtacgccaccaccgtcgaggacgaagcactgttcgccgaccttcgcagcaccgccgatggcgccagcgtcgtgcggcactacgaccgcacacccggctacgcgatgggcgtcgaggttgtcggtacgatccgcgcgaagggcgaagacacggtcaccctcctcgacaagcgccgcacgctgctgcgctttgacgaacagctcagcgggggcgacatgcgcgcgaccaacagctattgggtcgaccctgccgacggcttcatctggaagagccggcagtttctcgccccgggctatccggtcgaccttgtccatctaaagccctatcggccggcaggacgctga

SEQ ID NO: 505472 - DNA, 1107 bp, Stenotrophomonas maltophilia
atgaccaagaagcactttcgaatcgctgccgcgctgctggcggcctcagccctgcccggctgcatgtggtcccccgggcaacatctgcgcagctctgaactgatccgctcccagaccagcgacgacggtcagctgcagctggtgccgatcactgccaagctcatcgcgatggatgccgcgtccgaaagtgagcagtcactgcccgaagcccttctgaattatgtccccggccagtaccgcatcggcatcggcgactccctgtacatcaccgtttgggatcacccggaactgaccgtgccagcgggcccccaacagacgcctaatctggccgggcgcaccgtgcagagcgacggctcgttcttctatccctacatcggcgtggtcgaggccgatggcaagacccccagccaggtccgcgaagaagtagcacgccgcctggccaaatacatcgaatcgccgcaagtggacgtctcggtgctgacctacgccagcaagcgtgtatgggtaaccggtgcagcgcagcagtcaacgccggtgacgctcggcacggcaccactgaccctgtccgatgcgatcagccaggccggcctcagttcggccggagccgacctgtccggcgtgcagctcagccgcgacggtgccagttacacgatcgatcttgaagcactggcatcccgctacggcggtcgtcagatctacctgaaggatggggactcgatctacgtgcccttcctggatcgcaaggagatctttgttgtcggcgaagtcgggcagcccggcgccttcagcttccgcacaggcgacgtgacactgaaccaagccatcggccgtgcgcgcggactcagccagaccaccgccaacggtaaggccgtctacgtcatccgcggatcgcgcaatctgctggagcagccctcggtcgtctaccagcttgacgcgcagtcaccggccgcattcgctgtcggcagccagttccacctggttcctggcgacgtggtgtttgtcggcgcggccggcgtaacgcgctggagccgcttcgtgaaccagctgctgccgttcacctcgatcctgagcaatgctgcaagcgcacgcaacgatctgagcaactga

SEQ ID NO: 505473 - DNA, 591 bp, Stenotrophomonas maltophilia
atgcccgacgtctggcgaagcctctccgccctcggcgacagccgctggctgctgccgatggccttggtgctgctgatcacgctggcccgcgcagacgcacgcctgaaatggcgatggctggcggccatcgcggtcaccgccggcctcacgctcgcttcgaagctggccttcatgggctgggggatcggcatcaagagcgtgcacttcaccggcttctccgggcatgcggcgatgtccagcgtcatctacccagttgttggagtgttgctcgctggccccggcaggcgcgctcggacgttcggcctggtcatcggtgtgctgctggccaccgccattgccgggtcacgaatcccgctgcatgcacatagcctgtcggaagtcgttgccggcctggcacttgggctgagctgcagcacattggcactgtgcgccgcatcacccatcggtcgcccgcctgcgatggctgttttcgctgccgtagttgcggggatagtcctaccctttaccctacccgaccttcatacccatcagctcgtgatcgcactggcgaagttcatctccggcaggtctgagatcttccaacacttctga

SEQ ID NO: 505474 - DNA, 474 bp, Stenotrophomonas maltophilia
atgaacgccatgagcccccagcttcgcgccgtccagccgtcgcactacgccatcgtggccaactggcctgaatcagccgaggcgacccggcgctgggcaggccccggtgtgccgtttcccctgctgccggaacggttcgcgcaggtgctcgaactcgggtcgcgcccaggctgggcgctgctggacgagcagggtacctgcgttggattcggccaacactggatgactgacgcccgcaccgcacatctgggccgcatcatcgtttccccgctggcacgcgggcgcggccttggccggctgctcatgcaggcattgagtgcacaggccctgggccaagcggatgtgcagcagctcaccctgcgcgtctatcgtgacaacacggctgccgtggcgctgtaccgggacctcggtttccagcaggttgaagcgttctcgacccccgaccttctgttcatgcagcgcacctcgggctga

SEQ ID NO: 505475 - DNA, 360 bp, Stenotrophomonas maltophilia
atgaccgatgaaccgatccgcgtactgatggtggaggaccagaacgatctgcgcgagatgatcggcatggcgctgcgcgatttcggcatcgaggtatccaccaccgccgacggccatgaagctgccgcgttgctgaaaggcgacgcacgcttcgacgtggtgttcagcgatgtcagcatgcccaacggcatgtccggtatcgagctgagcgagcatgtggcgcgcgaacagccgcaggcgcggatgatcctctcatccggatacgcgcgctcgcagctgccgccactgcccgatcaggtggaattcctgcccaagccgtatcgtttgcgccagctggtggagctgctgaagcaggattga

SEQ ID NO: 505476 - DNA, 438 bp, Stenotrophomonas maltophilia
atgaacctgccctggggtgcggtcaccggcggcgccttgatcggtgccgctgcggtgctgttgctggccagcatcgggcgcgtggcgggcatcagcggcatcgccgcgggcagcctgcgggcagccgaaggcgagcgtggctggcgctgggcattcctggccggcctgctggcatcggcggggctggtgctgtggtggcagtcggtgcccgcggcatcgccacgcgcactgctgcgtgatgcattgccggcctggcagttggtcggcgccggcctgctggtcggcttcggcacccgcttgggcagcggctgtaccagtggccacggcgtgtgtggcctggcgcgcggttcgaagcgatcgtcgctggcggtgctgttattcatggcgttcgcgatgctgacgaccttcctggcccggcacggtggagccctggcatga

SEQ ID NO: 505477 - DNA, 414 bp, Stenotrophomonas maltophilia
atgagtcgtccgagggctgctgccgctgtagcgggtgcgctgttcggcgcaggcctggccctttccggcatgaccgatgcgcgtcgcgtgctcggcttccttgatgtcaccggggatttcgatcccaccctgctatgggtgctggggtcggcgctgctggtcagtgcggccggccagcgctgggcgctgcggcgcgcgcggccgtggttcgcgatgcgcttccagttgcccaccgcgcgcgatgtcgatacgcgtctactgctgggcgccgcactgtttggtatcggctggggatgggccggctactgcccgggcccggccatcgcggggctggcggcggcatcgcgcgaggcgctgtggttcgtgcctgccatggtcctgggcttctgggcgcacgatcggttcgtgcgctga

SEQ ID NO: 505478 - DNA, 1242 bp, Stenotrophomonas maltophilia
atgactgagctgctcgacggactgtggcaggccagcctgtggctggcggtgggcgtgatcctgctggcagtaatgcggccgctgctggtgcggatgagcggtgtgggtctggcctaccgcagttggtggctgctgccgatgctgctggtggcactgatgctgccgttgccgcaggttgcgttgttgcagcaggtacccacgctgccgctgaaagtgatgcccggtgccatcgatgctctgaacgggccgtcgttgccatgggcagggctgttgttcgcgctgtgggcgctgggcgcgggcatctgcctgctgcgcgacctgcgcgcacaactccgtttcgaacggcggatgggtccactgacgccgcgcaccgatggcagctggcaggccagcggcgatcccggcctgcccgcgctggtgggcctgtggcgaccgcgcatcgtggtcggcccggcattcgaccagcagttcaccgcacaggagcagaacctgatcctgcagcacgagcgcaaccaccgtcgcaacggcgatcactgggccaacggcgcgctgctgctggcgcgcgtggtgttctggttccacccgctgctgccatgggccgcacgccgcttcctgcgcgatcaggaactggcctgcgatgcccgcaccatcggtccgcagcctgcgctgcgcggcctctatgccagcacgctgctgaaggcgcagctggtccacccggttgcgcccgcggtttgccattggcgcagccaacccgtgttgaaggagcgtatcgccatgttgaagcagtccaagcggaaggcattgccgtgggtgtccgggcaggtgctggtggtcgggttgtgtgtgggcatgggggcggtggcatgggccagccagggcggtgcggccggtggcacccggatcggtgtcgagccgtttgaacatgcgcaggacgatggggccaaggcggggttggaccggccgatccaggtggacaagatgccgccgccgtcctatccgaagtccgccgtcgagcaacgccaggtaggcgtggtcaatctgcgcatcgaagtggatgcacagggccatccgaccgatgtgcgggtactcagtgcgaccaatccgggggtgttcgacgccgtctccgtcgccgccgcgcacagctggacctatcgtcccgcggtgaagaacggcaagccggtggccggtgccgtacgcattccgatcacctacgccatggatgacaccgaggacgcgaagtga

SEQ ID NO: 505479 - DNA, 4875 bp, Stenotrophomonas maltophilia
atgaatcgaatctatcggcgtatctggaaccgggccaaggggtgctgggaggtagccagcgagctggctgtagtaaaaggaagcaccagcggcccgcgcaggctgattccagcactggtcgtcgcgttgacggctacagccgccatgcagaatgcgaccgcaggagttgtctactacggatgttcagtccttgactctggctccgactatctccgctgcctgccacacttcggtcagaccgatggaaagttgtgggccagcgcggcggccggtgcgaaggagtacctggtcatcggcggcggagcttatatcaacggcaactggggaagcggattcggtcatcaaagcctgatcatgggaaactatggatctgcgtttggctacaagtccaacatcaacggggtagacagcgttgccgttggctacaacgccagtgcccagatggggcacagtacggtggtcggtgccaacgcctacggcaagggcatcggctctaccgcgttcggtaacaaggcctcggccacccggcagaactccattgctattggcagtggatcactttcacaaggtgagaattccgtggcgcttggtgcgaattcccttgccaccgaagtgaatacggtttcggtgggtagtgacaaagagaagcggcgaatcgtcaacgtggccgatgggcgaatcaatgcgaccagtgccgatgcggtgactggcaagcagctgcatgccaccaacagcaagctgggtgccgttgaggcgagcgtgggtgcggtgaaaacagacgtggcagccgttcggacactcgcccagtcggccaccaaccgtatcgatgccaccaccctggcactgggcaagggcgcgatcgccgaatcgggcagctacggcatcagcaccgccatcggcaacaatgccaaggcctacaacggtcgcagtgtcgcactcggattcgatgcactggccggcgttgacgcagagggaaatcgagtggccgggcagaatgccggcgtttccatcggcgcgaacacgcgcagcgcgaacggcgcggtcgcgaccggcttccgggccattgcaagcggaaacttctccattgccgtgggaaccgacgccaatgcggccgaagagtacggtaccgccatggggtacaagagcatggccaccgccgtgcaatccaccgcgctgggtcgtggcagcgaggccacagcgcagtccgccacagcagtgggcaatcttgccgtctcggccaataccagtgctgtggctctgggggaccgggccaatgcccgccatgacaatgcggtggcactgggtgccggctctgtcacggcgtccgtcgactccgtttcggtgggcagcgctgccaccaagcgcaagatccagtacattgccgatggcgcggtcagcaatggcagtaccgatgccatcaccggcaatcagctgttcgcgaccaaccaggccgtgtccactgcgcagaacacggccacgagcgcgcagacggcggccaacgccgccaaggtcgacgccgccaaggcgctgaccgagacggccgcgctcgccgggttggtctctcagaccgccgccagcggcaatgtccgcttgggcgagaagaacagcggtaccgtactggacatgcgcaacagcgccaacgccagccggaaggtcgccggtgtggcggatggcacggtaagcgccagcagcaacgaagccgtcaacggcaagcagctcaatgccaccaacgtgcaggtggctgccgtggaaagagtggccactgccgcgcaggcggatgcaacggttgcgaaggcggacgctgccaaggcgttggtcagtaccggtgcgctggaggggctggtcagccagaccgccgccaacggcaatgtccgtatgggcgagaagaacagcggaaccgtgttggacgtgcgcaacagcgccaacgccagccggagggttgccggtgtagcggatggcacggtaagcgccagcagcaatgaagcggtcaacggcaagcagctcaatgccaccaacgtgcaggtggctgccgtggagaaagcggctacggcggcacaggcggatgcgacggttgcgaaggcggacgctgccaaggcgttgatcagcacgggtgcgctggaaggtctgatcggcgaggctgccgttaacgggaatattcgtctgggtgagaagaacagcggaactgtgcttgacgtgcgaaacagcgctaatgcaaatcggaagatgactggaattgaggggggctcgttgaacgcgagtagcactgaggcagtgtctggaagtcagctgtattcaactaattcccgagtgagtgaattggagggtgtcgcgcagtttgtaagtatcggatcggccccaatcagtgggcgcgcagaggccggcgaggcaggtgtcgcggtaggaaactttgcaaggaccgggctggaaggaggaaccgcagttggcaccctcgcggaggcaatgggtagaaactccactgcaattggccgaggcacgactgtctctgtagggtccgataacgggtttgcaatgggggccggcgcagaagttggcggagacgctggtggcgcgaatggcggcgtcgcaatcggagctggggcgagagtcgaaagcggcgctcacgaatcgcttgcttttggtagcggctcccaagcgaatgaggtcggcgtcgcatccttcgggaacacaggtatgcagcgtcgcctcgtgaacatcgcccgtggcaccgccgatcacaatgccaccactgtctcccagctcaaggactccctcgccactctcggcggcagcgcaggcatggacgccaacggcaacattattgccccgacctactcagtgcagggtggatcgcagaacaccgttgaggatgcattgatggcactcgatggcgctgtgatcaccgcaggccgccgtgcggacaaggtggaaggccagctcaactcgatcttccaggattcaccctcggcccgtggcgatggcatgaatcagatcgcgctgagtggcgcgaacggcatggtgttgaccaatctggctgacggtcgggtggcgcctggaagccgtgacgccgtaacaggcaatcagctgcacgccgcagagcagaagatctcgcagaatcggaatgatctggaggcgatgcgcaatgagcgggagatgggccagcacgcaatgcgtggattgcatgcgagcggtccaatcgatttcggcggtgcgcgtttgactggtgtgtcggacggagatgtgtcggtcggcagtcgagatgccgtcaatggcgcgcagctgaacgagacaaacgcaaacgtgatcgctgctcaaagtacagcggatgttgcgagactggaatcgagcagggctctggttgaaacatccacgctgagtggtctggtcgggcaggtggcagaaacgggaactgtccgtttaggtgaaaggaacagcggcgccctgatcgatgtgcggaacagcgatggcgctaaccgaagagtcactggggtagctgatgctagccttggcgccggtagcaatgacgctgtgactggaggtcagctgttctcctcgaatctccgcattttggcggtcgaaagaaagagcatgctctttgacaccgggagggaggatggggcagctcccgcgcgcgctgggcagtacagcgtggcacttggaaatggtgcggtagcttccgtcactgcagagggcggcaccgcagtaggagcattctcgggggcgcacgcgaagaattcggttgcacttgggcgtgctgcgaccgtagcggagagcgcagaagctggtttcgcattggggaccggatcctacgtcgccgagaaaggaggaatggcgctgggcgcgggatctgtagttgaggccggcgcccaattgagtgttgccttgggccaaggttcggtggccggtgaggatggcgttgtttcatttggaaacagcaatcttcaacgccgcctcataaacatcgccaacggcaccgccaaccacaacgccgccaccgtcggccagctacgcggggcgcttgccgcgctcggcggtgaagtcgatgccaacggcaatatcgtcggccctagcttcaacgtgcagggccagtcccaatccaccctcaatggtgcattggaagcgctcgacggtgcagtcgtcagcaaccgctctcgcgtgaaccaggtcgagtcccagctgcgcagcgtgttccaggacaccccctcggtccgcgccgacggtctcaaccagctcaccctcgccggaacccacggcatggtcatttccaacgtggccaacggcctgatcgccgctggcagccgtgatgcggtcaatggtggccagctgcattcgatgcagcagcagctcaacggtcgtatcgatggcctggaagagcgcatcgatgcgccgcagccgcgggcaatggccgtcgcttcggtgcccgaaccggaagcgccggtgccgcaggccgaaggcggccagcaggtggcgtcggcaggcgagggtgagaagcccacgccgcagccgaagacgaagaaggaggacacccccaagccgcaggtcgacaccgctgaactggagaagatgctggcacgcgccaacgagtacaccgatggtgcgatcagcaacttcgagcgtcgcctggacaagatggacaagcgcttcaaccgcatggcggcaatgagcagcgcacagagcgcgatggcgatgaacaccgccggtctggccacctacaaccgcctgggtgcgggcgtgggctacagcgagggtgagtcggcgatggcggtgggctaccagcgcgtgctgaacgagaagggctcggccaccttcagcctcaatggtgcgttcaccaacagcggtgagcgcagcatgggcgtcggtgtgggcatcggctggtaa

SEQ ID NO: 505480 - DNA, 711 bp, Stenotrophomonas maltophilia
atgaacaaactgatcgtctggatgctgccgttgagtgcgctgcttgcgccatcagcacacgccaacctgtccatccaccccatgcgaaccgcgatggacacaaagcgtggtgcgcagatccgcgtctactcgcagtccacccgcccgcagtatgtacaggccagcctgcgccgcatcgacaacccggcaacgccccgcgaacaggagcaggatatcgaggtcgccgattcggccattgccattacgcccggcaagttcgcgctgtcaggcggtggcaatcgcctgatccggctgatccctttgcagccggtgcagaaggaaaccgcgtaccgcgtgtacttcgaaggtgtgcgcggccccgaaggcactgaactggaaagcagcgaagacgctgcgcacgccgacgtcggcgtcagcctggtgtggggggcgctggtgaacgtggtgcccgccgacggcgtggtcgacctgcaggtgcgcggcaacacgctgcacaacagcggcaccctgcgcgtgggcatcgtccatgcggccgaatgtacggccgccggcgtctgcacgccgcacgacctctcgcacagcctgtacccggatgccgatttcaccctgccgttccagccgcagccgggcaattcgctgcgcctgcgctaccggctcagccaggacggctatcgcgagcatgtccaggacgtggccatccagtccagttga

SEQ ID NO: 505481 - DNA, 1134 bp, Stenotrophomonas maltophilia
atgagtcggcgtgtgttgttcgtgttgatgctggtgtgcgcgctggccgtgctgatgccacgggcgtgggcgcagtggccgccggagacacatcccaccgatcagagccgggacatcgtgatgacgtgggaccgctcggtcatgcctggtgacgtggagctgtgggcgccgaggacggtgctggggttcagtcatgacgtggcgatgaagtatgggcagatccatgtggtgtgtgggtctgcttctgacagtgaatttgggcggtgtccgacggagggacagtcgctcatctcaacgggtgcaactgagattgacttgcgtctcgttgagctgaggactggcttgcgtgcagagattcgtgggctgggaagcctgcagcgagtgatgtccggctttcgctgcagcttcgactattgggactcggtgcagcgcaagctgaatgcagcattctggtaccgatgtggcgccgatgagccgatcggcacgggtgcgtctcttacgattccagcttctgaacttgcaaggctcgtcgcaggccactggaaggccacgatgcgcctgaacatcaaggccgaccccgccgcagcacctgtcgccaccgccaccttcaacttcgatttcaccgtcaccgactacgacgcgatctcgatctacttcccggccttcgacaccatcgcgccgctggtcaacatggacctgcgctacgaccccatcaagcagatggtgggcggccgcaagcagctggagatgtgcctctacgacggcctcggctcgcagagcgagttcctcggtgtcaccgtgcgtgacagcgggccgcgcccgccacccggcagcgacttcgcggtctggcaccgcgatggtggcagcgacgaccgccagcgcctggactaccacgtcagcctgaactacggcgggcgcgatatccgcatgcggcatggcgtggaagaactgctgcatggcatcgacagcgccgaactgcgcctggtcatgctgcccggcatcagccagccggtctattgcgtgcccacgccgctgacattgctgacacctcccacccctgtcgccagcaagcgccccggtctctacgagggcgagctgacggtggaactgcgcgtccccaccgccaaaccctga

SEQ ID NO: 505482 - DNA, 195 bp, Stenotrophomonas maltophilia
atgagcaggctgaagacgattcccttcgatcccgcagactatctggatgatgacgtcgcaatcgccatctatctgagcgccgccttggcggctggtaatgcaagccattttcaggaggcgcttggaacagtggtgcgagcgcgcggcacaggcagcaatgccgaagaatcgggtcttggccgcgagaacatctag

SEQ ID NO: 505483 - DNA, 585 bp, Stenotrophomonas maltophilia
atgaaaaggcaagctttggacaccgccttcgcctcaatgaaggacgcaggatttgtgcgcaacgggccgaccttcatgagagtgcgcgagcatttcgtagatgttctttcactgcagaccagaagcgacggcaaagcactcgcattcaatgtcggtgtgctcgcccgcttcatcccggggcgttgcaaggatcagaccacgaacctcaacaacaccgactgcgacgtgagctgcagggccgctcccgcagggaaaagcgaccattggataagcgttgaacaggacgctgaactgctcaagaccgaggtggatgctcttttgacggagaatgcccttcccttcttttcgcagttccaggacatcgattccatctgtggagcgttgacgatcgcggccattcaggccgactcgacgccggcacacttcaattcggtcacgcgcgtccgcagggccctgctatctgccctttcatggcaggccaaggatgacaccgagtctgccaaggcgctggccacatatggactctccatctgcaatggcgctaccgcactgaaaagccgattcaggaaaattctggaggcttag

SEQ ID NO: 505484 - DNA, 627 bp, Stenotrophomonas maltophilia
atgaccgccctgcccgccgatgtcgccctgctggtgatcgacctgcagccggacttcatgccgggtggcgcgctggcctgcgaccagggtgatgcgctggtggcaccgattgccggactgctggcgcagcgccgctaccgcacggtggtggccacccaggactggcacccggccgatcacgcctcgttcgccagccagcaccccggcaagcgtccgttcgagaccatcctgctgcacgcgcagccacagaccctgtggcccgaccattgcgtgcagggcagcgatggcgccgcgctgcacccgggcgtggactgggccatggccgacctgatcctgcgcaagggcacgcgccaacaggtggattcgtacagcgccttccgcgagaaccacggtcccgatggcgagcgcccggccaccggcctggccggctggctgcatgagcgccgcatccgcgaagtgcacgtgtgcggcctggcccgcgattactgcgtgctgtggagcgcgcaggacgcggtgaagtccggcttcaaggtgaagttcctgtgggagctgacccggccggtgaccgaggccaacgatacgatggtacgcgaggcgctgggcaaggcggggattgcgctcgcctga

SEQ ID NO: 505485 - DNA, 963 bp, Stenotrophomonas maltophilia
atgtctgattctctcgatattggcgtggacgtggactccaaggagttcgtgccggcggtggccgaccgcaaggccggtgacagggtcgccaacacccgggccgggatagccaagtggctcaaaaccttgccccagcgatgccggattggcatggaagcgacgggacggtactacgagttgttggctcggatggctggccaggcgggccacgttgtctatgtaatcgatccacggctgatcaagaactacgctcgggcgacgggctcgcgcggcaagacagatgccatggatgcccaagcgatcgcccgctatgtgaagaaggagagcgaccgcctgcgtgaatacgtaccgcgtactgacgagcagcagcagatgcacgatttgctgcgcaagcggcgagcgctggtggagacgcgcgcgcgcttggagcaatccttcggggtaagcaaaagtgaccctggggagctgtctgatctgttctgcgctctggctgggacgctgtcggagctggaaagcgaactgcagcgcttgggccgcgatggagagcatggcgcgctctacaagcgcctgctgaccatcccgggtatcggccctgccgtcgcgtcccacctgatttactacatgacgcgctggccgttggccaacgccaacgcatggattgcctgcaccggcctggatccccggcccaacgagtctggcggcagaactggacgacgtcggctgtccaaacagggcgcaccgatgctgcgccagatgctctacatggctgcaatggggctcaagcggtgtcgccgggggcaaccgctctacgacgagctggcaaaacgcggtcaccccagcaccgccgtcttcaacattctggcaaggaagctggccaggatcgcctggggcgtgttcaaaagcggccgagacttcgatccggccatgctgaaggtgggtcaagcctgcttccagcaggcttga

SEQ ID NO: 505486 - DNA, 591 bp, Stenotrophomonas maltophilia
atgggctacctgctgacgactgtcggaaattcgtacggactattgaactacgatcatgatgggtcggaggactatctcctgttcagggcaggcatccgacttgaagggctgaagcccgtgcttctctatcaagttaagagtcgggcggctctgaagcgcttaaggaagcaccacattgtctcaagcactgggcctgacctagtcagcagagagcttaagacagccttggaagccttggcgccttctgatgtcgagtttttcgacgccacagtcgtctgcggtggcgatgtagtagatggctacagcgcgatcaatatcccgaatctcgtcaattgctgcgacatggcggcaagcgagtacgagcttacgaactttgaccctgtgaacccgacctacatgttcttgtacacagtgatcaaggaagagtcgcccgacgatttcgatgttgtcgggtgtcgcgaacgcccaaattccatcatcgtaagtagccgcacgaaagacctgttgatgaagagtggtttgtcgggattggctttttacaaagcgctggatctaacgccgcaagacagaactgtttgcgagcgttgctag

SEQ ID NO: 505487 - DNA, 2796 bp, Stenotrophomonas maltophilia
atgaaagaccttcgcaattccgcacgtcgcaacaccctcgctgtcgccttgatttccgccctggtagccgcctcgccggcaatggcccaggacaaggccaccaacctggacaagatcaccgtcaccggttcgctgatcccgcagacccaggttgagacccagaccccggtcatgaccatcagcgctgaagccatccagtcgcgcggcttcaacagcgtcgccgaagtgctgcagcagtcttcgctgaccaccggcggcatccagggtggccagacctccgcctcgttcacccagggcgctgaagccgctggcatgttcggcctgaatccggggtacaccaagtacctgatcaacggccgcccgatgatgtcctacccggcgctgtacaacggcggcgacgcgttcaacaacatcagcggcattccgatcgacatcgtcgagcgcatcgaagtcctgccgggcggccagtcctccctgtatggttcggacgcgatcgccggcgtggtcaacatcatcctgaaggaccacatggaaggcggcagcctgtccgtgcgtggcggcacctccaccgaaggcggtggcagcagcttccgcatcagtggcgcgcacggcttctcggcgctggacgaccgcttcaatgcgctggtcaacgtgcagatcgaaagcagcaacccgatctggggctaccagcgtgacctgaccaagcagaacaacacccaaggctataccgcacagctgccgtcgaacgacttcgccgtcatcgacgccaagaccaatgcgctgtacatgatggacccgggcaactgcgccaatgtcgccggccagtttggcggcaccaccgtgctggccaaccgcccgaccggccagtcctgcggctcggtgttcggcgccggttacaagaccctgaagaacggcaaggacagcggccagttctattcgtcgatgaccttcgacgtgaacgacaacttccagctgttcgccgacgtgctgtacagcaaggaaaagaccgagtacacctcgggctcgaactacctgtggtggggcaccaagagcaccatgggcggcttctacgaccaggcgtcaggcaagctggtcaacctgcagcgcgcctttgctccggaagacatcggcggcgaaggctacaagagcatcctgaacaacgacaagagccgtgcctaccaggtcaccctgggcggcaagggcgcagtcggcaactgggactacagcctgagcttcacccgcggcgaatatcgcctggatgaaagcaagttccagcgcttcggcaatgccatcaacagctacttcgccgacaaggtgctcggcccgcagctgggcaccaaggatggcttcggcatctacaacaccaactggggcgcgttctactcgccgatctcgccggaagatttcgctggcttcaccggttacaccaccaaccacagccgcacctggcagaacctggctcgcgcgcaggtcaccaacggttcgctgttctcgctgccgggtggcgatgcgggcctggccgtggtcgtcgaaggcggcagcgaaggctgggactacagccccgaccagcgcctgctggacggcgacgtgtggggctcgtcggctgttgccggcaacggccatcgcagcaactatgcggtgaccagcgaactgcgcatgccgctgctggagtcgctgacggtgaccgcttccggtcgctatgacgccttcaagatcgccgacaacaccgtcgacaaggccacctacagcgtgggcgtggagttccgtccgatcgaaagcctgctgttccgcggcaagtacggcaccgccttccgcgcgccgaccctgcccgacgccttccagggtcgcagcggctactatgctgccaactcgaccgactactaccgttgcggcgagctgggctacaccccgggcaacaccgacgcctgccgctacgccgacagcgtctcggtctattccgagcgtgccggcaacccggacctggagccgatcaccgccgacgtctggaacgcgggtatcgtctgggcaccgatggcaaacctgtcgatctcggccgactactacaactggaagatcgagaacgaagtcgatacggccagcaccgaccagctgctgctggccgagtactactgccgcaacggcctgccgaatggctcctcggccacctgccagaacgtggccgactgggtcgtgcgcgattcggccggcaacctgagctcgctgtacaccccgaagatgaacgtggcccgccagaacctgcaggccgtgaccgtcggcttcaagtacctgcaggacatcggccgcttcggttcgctgcagttctcgggcaactacaccaacatgctgaagcgtgaagtgcaggcgcagccgggtgaggacttccaggacctgctgggcaacccgaagtcgatgtggaactacgacagctacgccaaggtccgttccgacgcgtcggtggcctggtcgctggacaagtggaccaccacgctgtacgcgaactacatcggccacaccccgaactacctggcaggcctgaacggctacgagtacacccacgccgcatcgggctacaaggcaggcaagtggggttcgtacaccacctacaacctgagcgtgaactaccgtgcgcaggatgacctgaccctgtcgctgatggtcaacaacgtgttcaacaagatgcccgaacagcaggcccacagctaccagggcacctccggcacgccgttcaacaactacctgtacaacgtctacggtcgcaccgtgtacgtgcaggccaagtacgacttcggcaagtaa

SEQ ID NO: 505488 - DNA, 834 bp, Stenotrophomonas maltophilia
gtgatcgcaacggccgccgccggtgacggcagcggtgtccggcgcttcgtgccgccgccgcgtgcggcggtcgatccgcaggtgttcgcgcatccgttgtttgccggattgcaggatttccgggatctgctgctcggccctcgctggccgtccatcgctgcacttgatgcgcgcctggcattgcccgggaagcgcctggttgaacaggacgccgcgctgctggccgatggcctgcactacgaagcccgcatcgcgcaggggcgcatcgccacccgcgcagacaactggcacgacctgttcaatgcgctggtctgggcctcatgcccacagctgaagcgtgcgctcaatgtgcagcagtgcgggcatatcgaggccatgccgcctggccagcgcaaccgcgcgcaggccgcgttgacccagttcgacgaaaccggtgtgatcgtgcgcgtgcgcgatgactcactgcgggctgcctgggatgcacacgactggcccgcgttgtttgacccggtgaactggcagagcgatgacatcgccatcaccgcggtattcgggcatgcgctgatggaacaggcactgctgccggggcgattgctggtgggcaagtgcgtggtggtgcacagcgatgccgatgcggcctgcgttgacgcggtggccgtggccatcgccgagggcagggcggtgaccgatcccttgcagctgcgtccgctgccgttggctggaatcccggggtggcacgagggacaggaagccgccttctatcgcaatgccgactacttccgcccgctgcgtgccggccgcgcgtacccgccgccattgcacggggccatgtag

SEQ ID NO: 505489 - DNA, 1137 bp, Stenotrophomonas maltophilia
atggaaaaaggggagaaagcaatggcagaagtgaccggcgttccgcagccagacgtcaaacagcagatggaccagactgagtcgttggtggtcgatcagggggatgagagcgacgaggaggcgtatgtcacctacgacatagcctcttatccagctgactacaccctcagcgtaatcgataagatgtgggcagatggcgatattgttgttccatccttccagcggaaatttgtctggacgattaagcaatcttcgctgcttatcgagagcctcttgatggggcttcctgtcccgcaggcgtttttctatgtggatcccgaaggtcgtaacctggtaattgatggccttcagcgaatcaaatccatcgtagcctatttttctggacgatttggtgaggaggacattcacggaaagtccgttcccttcaaactggccggtctcagtcccgttagcccgtacgccggaaagtcatactctgatttagaggacgctgatcagcgcaggcttcgaaatagtgttcttcgggtaatcaatgttcggcagctaggaccgaaggaagacgacacaagcgcttatcacatatttgagcgtctcaacacaggcgggacgccgcttactgtccaggagattagacactgcgtctaccatggtccattcgtggatctattgagcagtctaaacaaggataaggattggcgaaaaattataggaaaggatgcctttgataagcatcagaaagatgtcgagcttattcttcgagttttctcaatattctcaagggcagatgcttacgagaagccaatgaaggaatttctcaacaaatcgatggcgattaacgtcgcgggcgattcagcggctgtaagagagttccagaggcggtttccgatattaaccgcaaaaatcaatggcgaattgggagggaagccgttccacaccaaaggaagacttaacgcgtctgctttggactcggtaatgggtacattgctatcaatggatgagcaccctgttgatctcgcagcgcgatttcaggcgctcctccaagatgatgatttcatggagacgctctccgtaagcaccagtgacgcagcagtagttagacagagacttgctgtcgtcaggaagcatttgatggagtaa

SEQ ID NO: 505490 - DNA, 321 bp, Stenotrophomonas maltophilia
atgaacaaagcatcaaagatcctgtcccaagttgaagtcaccccaaccgcctcgaatcagcatgagatcaatggtgtcgacgcactgaagaaaatttttggactcgggaaattcactaggcaggccaactttcgacatgcaaacggcacttctgcaacggtggacgtgacttggtatgactcgcgcgacgcccacccatcgagaagcgagcatcgcctgtactttcagaccaatccagtgatggacgcggccaatgctggcgacaccttgacgatcacggatgtccccggtcagatactggaaatcgaggtctccccctaa

SEQ ID NO: 505491 - DNA, 1299 bp, Stenotrophomonas maltophilia
atgaaacagggaagtttgtcggagtattttcaaggcgtagcggcaaagcgactgactgaagttgaggcaaatgtcctcatttccaatcagcacgaattcaatggagttaaggctctccgcgagatgctcggagagcccaaccagcgggtgccttatccttcaaagatgatgtacctgagcgacgatcaggtcgagcccgtcgtagaagacgctgtcctcacctggtacgacgcccgccagaaggctcgggaagagcgtggcgtgatgcgcgatgagtatcgtctctactttcccagcacctcggtctctgcgaacttcggtgccggcgacatcttggtgattgcgcactgccaagatggctcactcctcctgattgttgcgaaggatggttcaagtattggtcaacagatcgagtggctattcggcgtggacacgaatggtccccgctatgttttgaagtcagagatcgacttcgatgctcagaagcttgacttcgcatcgaggattattctcgaaagtataggcctcgaggtggggtgtccggacgatagccacctcgatgagatgatcagtctgttcggtgcatctttccccacgacattggaattttcatctttcagtcgttcaaagtgcaaagaagctgaccccgtcgcagatccagatcaggccctgatggtctggatggagcaagaggagcggttgttccgtacgctggaaagacacatcgtctccactcgcctactggaaggttttttttcaacgactgggcaaccagatgtagattcattcgtctcatactcactctccgtgcagaaccgaaggaaaagccgcgttggtttaacccttgagaaccacttagaacaaattttcaaggttaataatctattgtattcccggaccgcgcgaacggagaatcgcgccaagccagatttcttattccctgggcaagatcattatcacgacccgcacttccgctccgatcacttattgatgctgggcgtcaaatcaacttgcaaggaccgctggcgccaaatcctagccgaagcggacagaatcccgttaaagcacctcctgacccttgaatctcccatttcatcccagcagaccgaggaaatgcgaagtaaagggatcacactagttatcccgtcgccccttaaacttgttttctcagcttctgagcgtcagcacttgatgtctttgatcgatttcgtggacctcgcaacatcgttgcagcgcaccgatcgctccagctttaacagtagcgccgtacatcaaaccaaacaaggaagacaccgatga

SEQ ID NO: 505492 - DNA, 1251 bp, Stenotrophomonas maltophilia
atgaacgcgtacgaactgatcgacctctccctgcagcgcttcagccccaaggaggtcgcccaggcattgggagttgatccgaagacggtccggcggtggcagctgcgcgagacagaacccaagccctacatcgccgatgcgatccgccaacgcctgctgcccttcggcgagccgccgtccggagagggccagttccgattcatcgatctgttcgcgggcatcggtggcatccgtaccgccttcgagaagcagggtggccgctgtgttttcaccagcgaatgggactcttacgccgtaaagacctacaaggctaacttccacgacggccccgaccacgttttcgcttcggacatcaccaaggtccacgagaacgacgtgccggaccacgatgtgctgctggccggcttcccttgccagccgttctccatcgcgggtgtgtccaagaagaactctctcggtcgtccgcatggtttctcggacaagacccagggaacgctattctttgacgtggcacgcatcatcgatgccaagcgtcctcgcgctttcctgctggaaaacgtgaagaatctgatgagccacgacaagggtcgaaccttctcgaccatcatggacgtgctgaagaacgagcttggttaccacgtgcatgccaaggtcatcaacggcaagcacttcggtccccagcaccgcgaacgaatcatcatcgtgggcttccgcgaagaaaccgccttcacgtgggacgacctgcaactgccggacttcggcatctcgccccgtatgggctcagtcctgcacaagcaggatggcagcgagggcgaggatcaaccctacatcggtggtacgaagggcaaggtactggacaagtacacgctctcggacaagctgtgggagtacctgcagaactatgccgccaagcaccgcgacaagggcaatggcttcggcttcggtctggtgaccccggaaagtacctgccgcacgctctccgcgcgctactataaggacggttcggagatcctcatttcccaaggtccgaagaagaatccacgccgactgacgccgcgcgagtgcgcccgtctgatgggctttgatgacaacttccgcattccggtttccgatacccgtgcctacaagcagttcggaaactcggtggttgtgccggtgattgctgaagtcgcccgcatcatggctcctcacctgatccaagaagctgcttctgagccgaccaagccggcgaagaagaaggccaaggcctga

SEQ ID NO: 505493 - DNA, 399 bp, Stenotrophomonas maltophilia
atgatgaagctgatgctgcgcgccggcatcagagctgcgcatatgatcattgtgaaacccattcgcgacaagtctgtcaagccaatgtatctcttcaacaataagcgtttgagagaacgtgccgccgtgatcggatttgaggtgacgcagcaggcggcgcagttcatccaacagcagtcgctgcatagatctggcgcgcacaccaccatcagcggcagcggttcgatcggctatcgcaatctacccgtatccatgttccgcaagctgggaacatacggtcatgaaggacagaagatctcacccgagatcctgaagcttctgtccggaaagcaagctgaggaggcatccgccgaatggcttgcgacgttaatggagccgttggggaccgcagcccgctga

SEQ ID NO: 505494 - DNA, 639 bp, Stenotrophomonas maltophilia
atgctgcgactgggacgacggatgctgggggctggcgcatgcttggccttactactgctaagcgcttgccaggctcagacagctccgccgcgacctgagccttcttccagtgctgcacagaacaatgtgccgcttgtcaggccgcttacgttgacgtcaatggccgagcccatggttgtagagttcaatcttgagccgcccggtagaaacgccgcgccaacactcctggttgccgtccgcgtaagtggggaggatggcgcagcagcgctcgagcgggccttgatgattcgacgcgctggtctgcctgcacgcgtgcacctcactcggctcggggaaatgggtgaggcaaatgctccactcgtgcgtgttgagcagcagccaggatcggccgccactcttgtgccgatcaacgctgatgggcaagtttcaacggtgtggctcgatgacgtggacgacacttcacttgaggcggcggggctgtccagtccgcaagggcactacaagcagttggcgatggcttggggccagaatctctctccaggccggtatcgcctgagtgtggagttacttgacccctcaacgcgccttgcgccaatcccggcagaattgctggtcgcctacaagcacaagtcaaaatag

SEQ ID NO: 505495 - DNA, 939 bp, Stenotrophomonas maltophilia
atggacgaacgatatcgcgtgacaatctacgttgcggcgccaggaaccccgctgttggggggcggaacgtctgccgcgggtcacgtctactacacggtgggcgatggccatgagagcatcagctatggctttgcgccgaaggagcacggggcaacgaccggtcccggcaaggtttatgactccgacgcgggtgattaccagaatcccttttaccagcgaacgctcgaaatctcgaaagatcagtacgaaaagctcaaagaatttggtgatgcgccggacaagcacgggttcaacacggagtatcacgggctcaacaatagttgtatcgatttcacttggggtgcgttgaaccacgcggggcttcatcgcaccaatgcgcttttcatgcaggacaaggatttccaaggcggcctcaagcctctcaccaacatcgagtacatccgtagtatccgcgcgccttttccggacagcgcgttgaataccgagcactacaacaaaatgccggagagaacgctgttccagcgaatcatcagcgatgagcaactgccgcggggggacagggatatgctcgactccatccgcaagggagtggcgggtatcgatgaggggcatggccgttcctacgatgcgaccagcgagaggatctcagtggggttgttggccacggccaaggagagcgggctggagcgcgttgatcatgtggtattgggcaatgcgccaagcgatggttcggcgcagcgactgttcgttgtgcagggggagctcaacgatccggcccacgtgcgggcgtcgatggcggcggaggaggccgcgcgaacgccagtggagcagtcctttgcgaaggtcgagcagatttcgaaagcccagcaggagcgcgcctcgttggcgccgcaggagctggccatggaacaaacccgggcgccgctgcagatgggctga

SEQ ID NO: 505496 - DNA, 687 bp, Stenotrophomonas maltophilia
atggtgttcacggcacgcggccttgatgccggccgcgacatcgcgcgccgggagttgccgcatttatcgaacaggtctttgccgaaccgtttcagaagtagtctgaaattgcttgattcagaaggccccgctgatcggtccggtgcagactcgaacctccagccaatcgcaggaggatcgatcatgaaaccagcaagtggcgcgccgggcattacgatggtgatgacgctgcttcttttcctggcaggcgaatcgagagcgggcggcgtaatcgagtgcaacgactgcccctctcccagcaatgcggccttggcctcgggagagggactgacggttgtggtggatttcgagagagccgagttgactgctttcgacgttgaacatgaccctgagagcggaaagtggcgagcaaatccgaccccggttccagcgcagattgaaatgcttttctgcggatcctggatgcgacgctgtcagcggggcaagcgccgctcatgcagcaatcaccgcatgagcggcagtgagacaacgctctatcgcacgaaggcaatccgctccataccggtcgcctcggccgcggccagaatcctcgccatgccttcgtactcggccgccggatcggtggcgatgcgcagctccggcaggttgccggcatgttcgcccacctgtgcctgcaggcgcgcctga

SEQ ID NO: 505497 - DNA, 1044 bp, Stenotrophomonas maltophilia
atgaactctcgacttcccgcacgcgcgatcctgggcgcagcattgctgctggcctttggtggcccggcactggcagcacccgctgcggccgtggaactgccatctgccgaagcacttgaacagatgctgcatctgctggagacccaatcgctgtaccgcgatcgcgtcgactggagtgatgcccgcgcgcggctggccgccgcaggcgatgatcgtgcagagcagcgccgcgtgctggatgaggcggccgcgcgtagcagtggtgagcatggccgatggatatcgcccagccagcagcgcgatcgctccggtcgcgcccagcgtgtgaatgctgggcagggcgctgcgttggcagaatccccgaaggtcgatgcccgcattggcgtgctgaaggtcggccccttcgtggaggatctgcagcgcagtgaacaggaacgctatgaggcgcgcaaggcctacgcgctggccctgcagcaacgcgtcgtagacctggatgacggcacgcgctgtgcctgggtggtcgacgtgagcagtaatggcggcggcaacatgtggccgatgctgcttgggctcttgcccttgctgcacggcacgccggatccacagggggcgctgatcggcgccttccgcagtgccgatggtctgcagtggtggcggcaaggagaaggagaggtcaggcaggacggcacgcaggggctgcgctcacgacaggccgcctatcacttgcgtgcgggtagcgcaccggtcgcggtgctgatgggtgcgcgcaccgcgagttcgggtgaagccgtcgcgttggcattccgcgggcaggcgggcagccgcagtttcggccaacccagcgcaggtttctcaactggcaatcggcccgtcaagctggtggacggcaccaccctgctgttgacccacaacgtgatggccgaccgcaacgggcagggcgacggtaccaggttgcagccggacgaggccaccgccagcggaccggccacccttgccgccgcccaagcctggctgctggcccaacccgcctgccagggcagctga

SEQ ID NO: 505498 - DNA, 1260 bp, Stenotrophomonas maltophilia
gtgaacgtgcacggctggctgatgggcgcggccctgttgctcgcgcctgtgatgggcgtggcggccacagccggcgactgcgcccaggggctgctgctgcggctgggctggcgcttcgacgaggccgcgctgaaggagccgcaggtgcatggtggcgcggtgtgcacccgtgcgtcgctggccgaggcgcaggcagcaggcgatctgcacgtgcgctggccggcgcacatgtccgctgctgcacgccaggcgctgctgcagcagttgctggacgatccggccacgatctgcgcctatgcgttccagctgggggcggccacgcaacgcgccgcctcggccttgcaggccaacacccgcttccgcttctccggcctgcagatgggctggatcggtttcggcctgcagggcccgcgcgctcaaggctggcagcgtacgcacagtcttggccgcggtttcgttcccagcgcgggcaacagcaaggcgctgcaggcgttctacaacggtgccgtgcgtgccgaatgcggtgtcggccgccaggtcgcgcagctggccacccagcgcgagctgtatggcgatgctgccttcgataccgagttctctgcggatgagctgtcgatcggcacctttctcgccctgcatgggaccgacagcatcctgcttggcgcgcatgccggcgatttcttcgccgatggcaaggcagtgcgtacctcggcgatggggcgccaggcgttcgtcggtgtgcctggtttcatcgagcatgcatacgacaaggccacgctggacgacctgagcaaccaggccgagaacttcgtggtggtcgaggtgggcgaggacgctgcgcgggcgctggccacgcatggcggcctggcctggtacgaccagcgcaacgtcgaactatggaaactcgcgcaggacatcccgcgcaccggccagcgctacttcgaacgcctgctgttcgagcgcgaccctgaggtgcgcgcggcgcttgcgccgcgctaccacgccacgctggcacgcatggaccgcctgctggacgatccgttctaccagcagttcgtgatctatgtgcatccgcgcggtatacgtcccatcggctaccacatcgcccgcctgcttgaccgcaacccgcgaacccccttttcgatcgacctggcggtgcacaatctgcataccacgctctaccggcgttggcgcgaggcgcagctgcgccactgcgcggctaccggcaggccaggcagcctgaccctagaccccaactga

SEQ ID NO: 505499 - DNA, 306 bp, Stenotrophomonas maltophilia
atgacgacacggacgttacgggtgctggcctggtgcagcgtgttgctggctgcatgcttggccgtgctttcgctggcaccgttcacgccggcgatcatcttcgcctggcccttgctggtgttcgccgccttctgcatctggcgtggcgcgtggctgcccggcgcactgtgtgcgtggctggcttcgctcgctttcatcggcagcccgctcagcctcttcgatggctgggaccggccgatctatgcctgctggattatcgtcgtggtgctgcttgtcatccgatggatgaggcggtcgcggccgtag

SEQ ID NO: 505500 - DNA, 144 bp, Stenotrophomonas maltophilia
atgaacgggcggctgccgctgctcggcctggccctgctgttcgccggcaccgcctctggcgccccggcctgctttatgccgattccggcagtctggtcgcggtgcagcgcgcgcgccggcaatcatgacccccgtcagtggtaa

SEQ ID NO: 505501 - DNA, 330 bp, Stenotrophomonas maltophilia
atggacagctaccagccccacccgatccgccgcgatgcggtgctgtgcagcctggccgaactgcccgacggcggcctgcgcgtggtgatggatgatctgcgccagacgggtgaatctgggcattggcagaatcgcttcttcgtgaccttcaaggactgcgcggcggggcagctcgatccgtcgacgctgccgaacgaggaattgcaggcgatcggtctgtacgtgctggttcgcctgctggccatcaatggctgcctgcgcgacacggaggaggagcccgacagcgatgcccaccttgccgagcagcgcgacagaacatcgccgcgctga

SEQ ID NO: 505502 - DNA, 291 bp, Stenotrophomonas maltophilia
atgtcccagaccgagctggcgcagaagctcgccgtcaatcgcgcaacaatcgggcactgggaacgcgagaatggctttgcaccgagtgtcgaccatctgcgtgcactgagccaggtcatgcaggtgagctcagcctggttgctgcatggcgaggacgttccactgccggtggagatggggggcgtgcgcgccgggttggaggcgaagctgctattgctgtcaaagcatctgcctgtgtcattccttgccagtgtcgtcgcccttcttgaaaacgccgagacgtacctgtag

SEQ ID NO: 505503 - DNA, 876 bp, Stenotrophomonas maltophilia
atgaatgaacacagacgctacctgaccgaggggcgcttcccccggctcagtgccctggccgccgccgccgatgcctgcgtggcagaggggaacgctgcggacctgaccggccactgccgcgaaccatttgatggccttctacggtcggaggagttgtcgctgatcgtcgccgagaccctgcatgccgttgccaacggggatctcgtccaccctgagtggctgtccaagacggccgaagaatgggtggtgatggacacccgggactattcgctgcggctggtcgcacgcaaaccccgctcggggcaactgctgcagagcctcaatttcaactgcctggtcggcaacatgagtgggcccgaattctcgttgacccgctatgggtttcccgcgggcgcgcagatggatgcgttcaaggtgggcctaaaggccgtggagcgcggtacgctcagcctgggccggggcgagtctgcagagctgttgatgaaccaggatattccgcacgtacagatgcgtgcgccggcattgacgctcacgctgtaccccaaggtgtacgcgccgttgatctggtgcttcgacaggcagtcgctgcagtcggtgatggccctggccagtcatgacagcccggtacggcggcaagcgggtgcggcgatgctgcagcacatccaccagaccgaagtgctgccggtggaggcatctctgtccacgctgtcagcgctcgttcgcgatgaatcgcattttgtccgctgggcggcgctccaggggttgtgcgcgattgacctcgagcatgcccgtccccatctgctggaggcggcacgggatgtccatccggcggtcgctgccgcagcgcaacgcgccatcgcggcgcatctcaactga

SEQ ID NO: 505504 - DNA, 906 bp, Stenotrophomonas maltophilia
atggcattcagcctgtatcccgccgtgcagggcaccgccagtgtggaagaccttgtttcctattgccgcagtcatgtcagatacggcgattacgacagcatcctcggcgcatcggatctgctggctgcgctggccaacgaccgcgaactgctggtcagggccatcaactcgtcgctgctggagcgtgatgactacttcaacgacaacatgggcgtttccagccagtcgatcattctgcactccgacccgacgttcaaggtgcgcgccaacgtctggaagaagccggtcgcccgtgcgggcagcatggaccacgattccaatctctactcctacaactacgcacacaatcacaacttcgagctgctgacggtgggctacctgggcagtggctactggaccgaaatccatgagtgcaagcctgatcggatccagggatacatcggtgagcccgtagcgctggactaccttgagaagacctccctgccccgaggcaaggtcattcttttccgtgcctgcgaggacgttcacacccagttgccgtgcgaagagttgtcgatatcgctgaaccttctggtcgtaccgccttacgagcagcttgccgaccagtacagcttcgatgtcgccgccaagcgcattgccggggtcattacgtcgccgaatctggggtgcatgtcgctgctgacattcgctgcgctgcttggcaccacccaggcctacgattccatcgaacggctggccttcggcaccggccactggcgagtgcgcaatgctgccctggaagtggcagggctgcttgcgcccgatgagcgtgagcgcctgtggcgaagggccgaacaggatgccgatccggcaatccgtcgttcggcacggcattggctggaacagggacaggcagcggccggatga

SEQ ID NO: 505505 - DNA, 255 bp, Stenotrophomonas maltophilia
atgatgggcttcctccgcagccgcttcagcacgccgttcgcacgcaagtggggcgcactcatcgtgttcgccacggtgatcctgttcctgtcgaatccggaactgctgtcggtggttctgctggtgaacatgattggcgtggacgtgttcgtcctgctcatcggcatccagctgcggcagaactggtcggtcatcagtacgttcatcatcatgccctgctatctcaggctcaggaagttgttcaagacgcgctga

SEQ ID NO: 505506 - DNA, 318 bp, Stenotrophomonas maltophilia
atgatctatccggacagctggcagccgatcacccgggaagaattggcaatcctgatctcgcagcaactgcaggcttgctcacctgtgcaacgagccgtcttcgagtccctgcgtttgccattccgtgccgttcggctgcacaggctgggcatgattgagtgggtctgggtggtcgcacaactgcccgaggggctgctttactacgaggacgttgaggaaggattcgaggtaggcacgccgggcgaggatggtgtcttgccggaccgaggttgttctcaactgacgctgacccacattctccatcgcatgctggtctga

SEQ ID NO: 505507 - DNA, 1326 bp, Stenotrophomonas maltophilia
atgaccgatctccatcgcctccgcggccgcatcactgcgctggtcctcagcgaagcctggcgccgccgcgccgcgctctggggcggcgccgtggccgtggcgctggtggcgatcctgttcgccaaagccagcgacgcggcgttccatctgttccagcgcatcacgtcgcactcgccgtggtgggccctgctgctgacgccgggcatcttcgcgctgctggcctggttgaccgccggtgtgctgaagcccacgcgcggcagcggcattccgcaggtcatcgccgcgttggacaaggccgatgagccgttccggaagaccaacctttcacccgcggtttcggccggcaagctgctgctgacctcgctgtcactgctgggtggcgcctcggtgggccgcgagggcccgactgtgcacgtaggcgccagcttgatgtacctgttcggccgctggttcggtttcaaggatccccgcgagctctcgcacttcctgctggccggtggtgcggcgggtatcgcggcggcgttcaacacgccgctggccggcatcgtcttcgccatcgaggagctcagcggtcgtttcgagcatcgcttctcgggcaccctgttgactgcggttatcgtcggtggcgtggtgtcgctgggcctgttgggcaactacacctatttcggccatgtgagcgcacgcctgccgctcggccagggctggctggcaatcctgctgtgcggcgtggtggcgggcctgctgggcggcctgttcgcgcgtgcggtgctggccagtgcggcgggccgcccgcgctggctcgggcaactgcggcagcggcatccggttctgttggccgcaggctgcggcctggtggtggtactgctcgccctggtcttcggtgaaggcgcgttcggcaccggctatgagcaggcgcgcagcctggtgcaggggcaggcggtggtcggccacgagttcgggttgatgaagctgctggccaacctcgcatcgtacgtggccggtattcccggaggcttgttctcgcccgcgctggcggtcggtgcgggactgggccacaacctggcggtgctgatgcccggcgtggacccgcgcgcgttcgtgctgctgggcatgtgtgcgtacctcaccggcgtcactcaggcgccactgacttcggcggtgatctcgctggagctgaccgacagtggtgatctgctgctgccgatcctggccacggtgctgatcgcgcgtggcgtgtccgggctggtctgccgggtgccgatctaccgtgggttggcggagttgttgatggtgccgaaagcagagccagcggataggcatcactga

SEQ ID NO: 505508 - DNA, 2118 bp, Stenotrophomonas maltophilia
atggatacacctcccgacatcacatttcatctttcgcttgtgggcctggtgggtctggaggtggtgcgcttcgagctgaaagagggcctctgccagccattccgtctggatatcgagctggccagccacgacgataatcttggcgcggcaggcctgcttgactgcactgcactgttctccatcgcgcaacaggggcggtctcagcggcagctcggtggcatcgtcactgcgttcgagcaggggaccagcggattccgccgaacgcgctaccacgctgtggtggagtcaccgctggcgcgcctcgcactgcggcacaacagcaggatcttccagcggatcgagccggtttcgattctgtcgaccctgttgaaggaacacgacatcgtcgatgttcgcaatctgtgtgagtccgagcggccgtatcgacagtactgcgtgcagtaccgggagagcgatctggacttcttccatcgcctggcggcagaggagggcgtggtctactggcatgcggtggaggaaggacgcggtgtgctggttcttgccgacacggccatgctcgccccaggcctgccgcagcacgagccggtcatcctgcagaccctgcctgccggacaggcgccggttgcccatctcagccgcttcaactgccgccgccagctggcacccacgcaactggtgcagcgcgactacagctttcatcttccgcatcgcgacctggagcatcaggcaacgccgtataggtccgaagacgccgtaggccagtatccccattacgatccagcgggccgctacaaggatgatcgaaccggccgggcgtcggcacgccgaaagcttatcggtctgcgcaacgaggctgcggtcgcaaccctggagggcgacgacgcacgtctgtgtgctggcacggccttcgtgctgagtggccgggcacatgcccctaccggagatgattggcgggtggtcacgctgcatcactggggcgaacaggccagttcacagggtgaggaggcggccagcgccgccagcggcagcagctaccgctatacgggcactgcggtgtccgtacacatggactggcggccggcaccgccgccgcggcgggtgatcgatggtccgcagatcgcgcacgttaccgggccggagggcgaggagatccactgtgatgcgcacgggcgggtgcaggtctggttcccttgggaccggcagggcaagcgcgagaacagcacctgctggatccgggtcagccagggctgggctggcaccatgttcggcgcggtggcgctgccccgggtgggccacgaggtcatcgtcagtttcctggaaggcgaccccgaccaaccgatcatcaccggccgcacttaccacgtcgccaatctccccccctacccgctgccgttgcacaagacgcgcaccacgctgaagaccaaaacccacaagggcgatggctacaacgaactgcgtttcgatgatgcccacgatcgggaagaggtgttcatccatgcccagcgcgactacaacaccgaagttggcaatgaccggaccagccggatcggcaatgaccgaagcgacgaagtagtccgagacgacacgctgcaggtgggtcacgatcgccgcgcgcaggtagacaacgacgacaccctgcgcgtacagcgcgaccgtcggctgcaggtcgaccgagaccagctggtacaggtgcagcgggacaggcagattgcggtcagccacgatttgactgagaccgtgggcaacacccgcaccgagcgcaccaccagcgaccgtaccgccgaaaccggcggccagtaccagcatcgggtcgccggccacatcgacgtgtcggcgggcagttcgctcacacagcgggcagagaccatcatcctgcaggccaccgacatcctgcagatacgggggcccggaggcacgatcaccgtagatggcgatggcgtgaccatcgaagggctggtgttgcgcttgaagggacctgtccggattaccgaagacggcgccgggaacgcgctgcaacaggctgtcgaggctgtcgcggccaagccaccatcggtgtgcgccgaacgcctgcgatgcgcggccacccgtggcgacgcactggtagtgatcgatggctga

SEQ ID NO: 505509 - DNA, 852 bp, Stenotrophomonas maltophilia
atggctgagatgaaagcgccgccgatgcggcaggggatgcgccgttacgtgctcatcgaccgcggccaagacatggagattcccgaggagcttctctggcgtaccgtggcgccgccatggctggccgaggtgcagagccagttgccgatccttctggatatggaagcactcggtgcgcagccacaggatgtgctgcgcatctggaccgagcaggcgcaccattccgaagcgggctgtggcatcacgctgctggacacggcggcgtcggccgacgcactggtcgagcacctctgcaacagcatgctctgggatggccacgaggggcgccgtcatctgctgcgctacttcgatgcgcgggtgatggcgcagctggaatggctgctgcatggggcggcgtggacgcgtctgctggggccagtgcacgaatggcatctattcctggacggcggctggcactgcatcgctgccgaggctgggcaggtgttcgtgcccacgccgtcgggcatggacacagcgaccgcgctgacctggctggatgtcattacaccggcgatcactacggcttcgccgaaggatgttaagcaccggcagcgcatggcgcagcgggccttcgcactgctgtggacggcgcagaaacgcttcagcctgcgggaacggaaagacctggcgctgtttgccgagcatggtctgagcctgcaccccgagtttcacgaccatccgctggtgcgccgtccactggaacagctccacggcagcgacatgtcctatcgcgcccttatggcgcatctggacacggacaccctgcagcgcatccgcgccgatctgatccatctgcgaggagagccgcaatga

SEQ ID NO: 505510 - DNA, 2517 bp, Stenotrophomonas maltophilia
atgaccgacaccgacaccgacaccgacaccgcagaggcactgcgcctgtgcccggaggtctgcccgcaccaccgggtaggcctgccgatctacctggcacgccatgcgctgctgccgggcgatgcaccggtcccggcgctgggtgcaaccttcaaggatgcctacaccggcatcgccgtggcaccggcgagctatgcactgcgcaagctgcgcgcgggctatgtgtatgtgtacgacgaggcgctgaacgaattcgaaagctatgcggtggatgtgaacagcgtgctgtaccgcatgggtggcgaggcgccgcgtcggcaaccgcagttcaccgagccctgcagccaggccgggcatcgggccgcagccatgtgcatcaccgtgccgctgccgcagcatgccacccgggtgtgggtggcctattcggagtcggcctggacggccgcggtctgccgggcgcacaagaaagatgccgccttgcgccagcgcagcatgcgctgcctggatgtgaagcattggctggccacccaggcccatccttcggcgctgccgatcgcgcaggtgggcgagcaggtggccgagtacgccgtctacgggccgacgcgacggaactggctgaaacaggacagtgactggttcacctggagcacggccgagccgacccgcgtggacagcgcggcgggcatcgtgcgggtggccgagcacctgatgccgggcaagggagtgatgctggcactgcccgacccggtcggggtgctgcgtgatcttgcggcattggcggcgcggcgcaggacgaagttctaccagcacccgaagatccggcgggaggctgcggtgtcctcggcgatcatgatgatcaaggccgcggtactcaaccagtacgaactgcaggacgtggcgtcgacgggtacggacatcctgcggcaacggatgggtcacgtggaactgaacggcagcatgggggcttatggcccggtgacgctgcgcagtgaatccaaggcgcagtccctcgagcgtgcgcttgacgcccccgggcgcctggaaatgatggccgagaagcattggcagaagtacgccgccaaatacaacgagccatcccgggccgcgtggcagcaggccatcgactcgcgctggcaggcctacgcaaaagcacagatccagcccctggccgaggcccacgcgcagtggctgcagagcccgctgctggcgcaactgctggatgcccatcacgaccgcgacaacccgcgcagcggcctggactacgcccagcaggtgcttggctgcatcaccgggatgcaggagcaccgcagctgctttgatgccatgcaggcacaactgctgcgcgagacccccgatgaagcaggcagcgtgctgctgcgggcgctgtacttcaaccagcgtagcgtggcgacacagatgcgcgcggcgctggacagcggcctggacctgcgcagcctgccgtgggatgggcccattggggcctacacctcggtggtcgaagcgttgggcaacggggccgacggcgtcgcggccaagctggttgagcagttgatgggcccgctgctgagagcgctcaacgccaccgtggatggcggtgcgcgggcaacgatgctggcgctggggcagatctccggcagggcgctgtttgcggtggaggtatacggcccgaaatggaaattccgggaacgggtgatccgcgagctgctggagcgcagtgaggtgccaatgcggcggcacgccacagaagcggcggtgaatgcagagatacgccgtctgaagctgaaaggcatcgacctggagggcaatggtcggctgcgctgggtggtgatggtggacccggagaaggcgcgcgcgggcgagctgaagggactgctgagcgcgcagcaggccgagacggcggatatgaagcagtggcgcagcacgatcaatacgaatgtgcggctgggcacggtgggcgcgctgctgcaggtggcggcgctgaccaagttgtggtcggacgtggatgaatcgatggagcacgaacggatggaagccaagctgcggatggtggcagggattggctcactggccggtacgacggcagagacggtggggaaggcgttggagaactactttgcgcagagaccgggtggactctctgtggcgaatcggttggtggtggtagggagggtgacgactgcagcagcgggtgtagtgatggctgttctggatggggtaaagggtgtccaggaacttttggacggaagtcatgcggttggcgcgctctacgtcatatctgccggactaggattcgcagtcctgtactttgccggttcgtcatcgacactccccgggattggatggatcgctgcggtactgctgatcggcgttgcagtttttattgaactgctgaaggacaacaagcttcaagactggcttgagcgatgcctttggggaaacctcggcgcagagaagcgatacatccatcttgaaacagagatgagagagctgcaggtcgcgcttggatatgagcaatga

SEQ ID NO: 505511 - DNA, 729 bp, Stenotrophomonas maltophilia
atgggttttatgactgctgctcccattgccgggcttagccacagggccagggttcaggatcacgacgacctctcgctggcgttggcactggcggtgacatcgctggtgatgggcgcaacggctttctggggtttatggcttctacggcaagaggccttccgctacacccactatccaatccggctcaaccgtgtgaaccggatggtctacgtccaccgcatcgatggcaccatcctgcgcatcccgtgggatgaagttttcttcactctggtccaggaaccgatgttcccatcaggcatgggcgccaactgggccatccacggccatgtgctggatgcggacggtgagaccgtgcgcgagacctttgccttctccgtggtcgagattcccgagatcgtgactgcacactgggagttcctgcggcggtacatggaagaaggcccgcaggccgtagagaagcacatcgagtactacgttcaggtgagtacgcaggaacagcgcgagcccttcaggcatagcatgaggttctcgctttggcgctatggcggattctcactggcgttgcttccgttgctccctttagattttcttattgcctgcgcccgctgggtggccatgcgcaccggaaagctgcctgtatggccggacgacgtcgaggccgaatgtgtcgttgccgctgacgatccgtgggtgcgtgatgcgcgcaacaacccggccaagtatcgatga

SEQ ID NO: 505512 - DNA, 255 bp, Stenotrophomonas maltophilia
atgagcttggccactgtgaatgcagagatacgccgtctgaagctgaaaggcatcgacctggagggcaatggccggctgcgctgggtggtgatggtggacccggagaaggcgcgcgcgggcgagctgaaggggctgctgagcgcgcagcaggccgagacggcggacatgaagcagtggcgcagcacgatcaacaccaatgtgcggctgggcacggtgggcgcgctactgcaggtggtggcgctgaccaagctgtga

SEQ ID NO: 505513 - DNA, 489 bp, Stenotrophomonas maltophilia
atggaagccaagctgcggatggtggccgggattggctcactggccggtacgacggcagagacggtggggagggcgttggagaactactttgcagccaacgccaagatggcgtcgcgaggcgtactggtcgctgcgggtggcaggtttgcgtctgcggcggcaggtgtagtgatggctgttctggatgggctcaaaagcgccgaagaactacaggaagacaatgtgggaatgttcgccctgcatgcggcctcggctggtctcggcttggttgtgacgggtgcggcgtacttcggttcaattcccgggtggggctggggcgcggcagttcttctgattctcgccgccatcgcaattgaggtgttcaaggacaacaaacttcaggattggctggaacgatgtcattgggggaagttggatcctgcgaaacggtacacgcatctagagactgagatgagagagttgagcattgctttggggagtgggaagtga

SEQ ID NO: 505514 - DNA, 858 bp, Stenotrophomonas maltophilia
atgggtacgaaaccacttggacaggtcagcacaataaagctcaactcgacctacatcgagctgatcgacaaatacttcataggaaaaggtctggttaccttcttctccgtcgtcgtcattggattggtgactgcagcaattatctactttgcgcatctggcgccggagctgataagtggcatctacaaggaacgtctaggtgaatttgccgctgcgatggcattccttggtgttgtgtcagttgtagcgtccattattccgagcgtagggataaggaacgaagcctttcgctacacccattacccgatccggctcaaccgtgtgaaccggatggtctacgtccatcgcatcgacggcaccatcctgcgcatcccgtgggatgaggtcttcttcactctggtccaagagccgatgttcccatccggcatgggcgccaactgggctatccacggccatgtgctggacgcggacggtgagaccgtgcgcgagacctttgccttctccgaagtagagatccccgagatcgttaccgggcattgggagttcctgcggcggtacatggaagaggggccagaggctgttgtcgattgcatcaagtattacgttccagtcagcacgtcctcgcggcgtgagagctggcgcgaaggcctgcgccatctgcggatgcgttacggccagtacgcccccgtcgcgctgatctatttcccgttcgacctcgccagctcgctggctcgctgggtggccatgcgcacgggaaagctgcctgtatggccggacgacgtcgaggccgaatgcgccgttgcagatgacgatccgtgggtgcgtgatgcgcgcaacaacccggccaagtatcgatga

SEQ ID NO: 505515 - DNA, 465 bp, Stenotrophomonas maltophilia
atgagacatatgctccccaagacccgattgcagttggccgtagtgaacgtcgctcagctggcgataggtaacagtcgccaccacgtgttcgatgctcttggtggcagcgtgggatccagtgaggtctgctcttggcgcctgcaggcacccgggcggaggattgcgccgctgcatctggaaattggctatcaggaccgcgcctacacggtgattgacgcttgcggcgctacctatgtcaacggtaacgacaggccattgggtcggggtcgcatcgttgccgtctccagcggggtctaccttcgggttgggccctacgaaattggcgcaacggtcttcgatggcgataatctggaacatgccgatccgctccaccagcaagaggacatcgacacgatcctggagcgatgggcgaagcagggtgccaccgaactgggtacgcagttcaaagatctctggaagttgtga

SEQ ID NO: 505516 - DNA, 660 bp, Stenotrophomonas maltophilia
atgactgatgcatttgcttcgctgcgcgtaaccgatgtcgctttcgacgacgacttcatcctgctgaccctggccgatggccgccgcacccgccagccgctgcgctgggtacctgcgttgttcgaagccgatgcagggcaacgcgcgcggtgggtcgccaccgccgatggtctgggcgtaaactggccggcgctgctgccgacgcgcgaggctggcgtggtcgatatcctcaaccaggtctgggaagaccgctacgaggccgcgctggcgcgactgaaggcagccgcgtggacgctggatgcgctgtccgacgaagaccagctgctggtggcgctgtggcgcatggaggccgacatcaacaacggcggcttcatgcagttcctgtgcaactggggcgacccgacctgccagctggcgttgcgtgcgctgcaggcgatgggcgcggcgaagacccacgcgatcctggccggcatgcgcgggctggtcgaccggctggaagatgacccggcggtcaagcaactgaccgacctgtacggcgcgatgaccgaacaggagcaggaggcgctgcacgccttcgacgaagcctatttcgagcgaccggaagacctggccaggttggggctgaagcacttcggcccggagcctgtcgaacgacgatga

SEQ ID NO: 505517 - DNA, 573 bp, Stenotrophomonas maltophilia
gtgaccgaggcaagccaacaacgcagcctgcgacagctggttggacccgtcggggccgactaccagcggcgcgcgttgccgcccggctgggtctgggcggtgctggcggtgctgctggcggccacctggccgaccgagctgccggcgacggcggcagccgcgctggtctccagtgcggtggtggtgcactggccgcagcgtgggcgcttgcattggctgggctggcggctgccggcgctggcggtgctcgccgcgctgctgtggggcccggatgtactgtcacagtggttcgaacatggcctggccctgaccttgatgtcgctggccagcctcagcattggcgtgcatgtgtggcagtcgcggcaagttgcgcgacagttgcaggcttccgccgatgcgctggacgacgcccagttgctggccctgctgcccgtcgacgccgcgcggctggcgcagcagtggcgcgccggtgatgatcgccacgctccggaactttcggtggtgatgcacctggcggtgatgcatgcggcgctggcgccgaggatgcgcaggcagggcgttctggccagctga

SEQ ID NO: 505518 - DNA, 249 bp, Stenotrophomonas maltophilia
atgccgcccacgccatggccctgggcgagcgggtccgcgcttcggtcgaagcggctgccctgcccgccccccgaggccaccgtcaccatcagcgtcggcgtggcgtggcaggcaccgggcgaagagcacgatccgcgcgacctggtcgaacgcgccgaccaggccctgtatcgggccaaacgcgccgggcgcaaccgcgtatatggcgacgcagatactacggaagacagatgcaaccgccgggcctag
